(19) United States
(12) Patent Application Publication
(10) Pub. No.: US 2016/0230186 A1
(43) Pub. Date: Aug. 11, 2016

(54) COMPOSITIONS AND METHODS FOR CONTROLLING DIABROTICA

(71) Applicant: Monsanto Technology LLC, St. Louis, MO (US)

(72) Inventors: James A. Baum, Webster Groves, MO (US); Renata Bolognesi, St. Louis, MO (US); Gerrit Cornelis Segers, Wildwood, MO (US)

(73) Assignee: Monsanto Technology LLC, St. Louis, MO (US)

(21) Appl. No.: 14/207,318

(22) Filed: Mar. 12, 2014

Related U.S. Application Data
(60) Provisional application No. 61/782,931, filed on Mar. 14, 2013.

(51) Int. Cl. C12N 15/82; C12N 15/113

(52) U.S. Cl. CPC C12N 15/8286; C12N 15/113

(57) ABSTRACT

The present invention provides methods for controlling invertebrate pest infestations, for instance in plants, and related compositions and polynucleotides useful in such methods. More specifically, the present invention provides polynucleotides and methods of use thereof for modifying the expression of genes in an invertevrate pest, for instance through RNA interference.

### CROSS REFERENCE TO RELATED APPLICATIONS

[0001] This application claims the benefit of U.S. Provisional Application No. 61/782,931, filed Mar. 14, 2013, herein incorporated by reference in its entirety.

### INCORPORATION OF SEQUENCE LISTINGS

[0002] The sequence listing that is contained in the file named “MONS356US.txt”, which is 27.7 megabytes (as measured in Microsoft Windows®) and was created on Mar. 11, 2014, is filed herewith by electronic submission and is incorporated by reference herein.

### FIELD OF THE INVENTION

[0003] This invention discloses methods for controlling invertebrate pest infestations, particularly in plants, and compositions and polynucleotides useful in such methods. More specifically, this invention is related to polynucleotides and methods of use thereof for modifying the expression of genes in an invertebrate pest, particularly through RNA interference. Particular pest species of interest include Diabrotica species, especially those that infest crop plants.

### BACKGROUND OF THE INVENTION

[0004] Commercial crops are often the targets of attack by invertebrate pests such as insects. Compositions for controlling insect infestations in plants have typically been in the form of chemical insecticides. However, there are several disadvantages to using chemical insecticides. For example, chemical insecticides are generally not selective, and applications of chemical insecticides intended to control insect pests in crop plants can exert their effects on non-target insects and other invertebrates as well. Chemical insecticides often persist in the environment and can be slow to degrade, thus potentially accumulating in the food chain. Furthermore the use of persistent chemical insecticides can result in the development of resistance in the target insect species. Thus there has been a long felt need for more environmentally friendly methods for controlling or eradicating insect infestation on or in plants, i. e., methods which are species-selective, environmentally inert, non-persistent, and biodegradable, and that fit well into pest resistance management schemes.

[0005] Insecticidal compositions that include Bacillus thuringiensis (“Bt”) bacteria have been commercially available and used as environmentally safe and acceptable insecticides for more than thirty years. The effectiveness of these compositions is due to insecticidal proteins that are produced exclusively by Bt bacteria. The insecticidal Bt proteins do not persist in the environment, are highly selective as to the target species affected, exert their effects only upon ingestion by a target insect, and have been shown to be harmless to plants and other non-targeted organisms, including humans and other vertebrates. Transgenic plants containing one or more recombinant genes encoding insecticidal Bt proteins are also available in the art and are resistant to insect pest infestation. One positive environmental result of the use of transgenic plants expressing Bt proteins is a decrease in the amount of chemical insecticides that are applied to control pest infestation in such transgenic crop fields, resulting in decreased contamination of soil and waters by non-degraded or excess chemical insecticides. In addition, there has been a noticeable increase in the numbers of beneficial insects in fields in which Bt protein-expressing transgenic crop plants are grown because of the decrease in the use of non-selective chemical insecticides.

[0006] RNA interference (RNAi, RNA-mediated gene suppression) is another approach used for pest control. In invertebrates RNAi-based gene suppression was first demonstrated in nematodes (Fire et al., (1998) Nature, 391:806-811; Timmons & Fire (1998) Nature, 395:854). Subsequently, RNAi-based suppression of invertebrate genes using recombinant nucleic acid techniques has been reported in a number of species, including agriculturally or economically important pests from various insect and nematode taxa, such as: root-knot nematodes (Meloidogyne spp.), see Huang et al. (2006) Proc. Natl. Acad. Sci. USA, 103:14302-14306; cotton bollworm (Helicoverpa armigera), see Mao et al. (2007) Nature Biotechnol., 25:1307-1313; Western corn rootworm (Diabrotica virgifera virgifera LeConte), see Baum et al. (2007) Nature Biotechnol., 25:1322-1326; sugar beet cyst nematode (Heterodera schachtii), see Sindhu et al. (2008) J. Exp. Botany, 60:315-324; mosquito (Aedes aegypti), see Pridgeon et al. (2008) J. Med. Entomol., 45:414-420; fruit flies (Drosophila melanogaster), flour beetles (Tribolium castaneum), pea aphids (Acyrthosiphon pisum), and tobacco hornworms (Manduca sexta), see Whyard et al. (2009) Insect Biochem. Mol. Biol., 39:824-832; diamondback moth (Plutella xylostella), see Gong et al. (2011) Pest Manag. Sci., 67: 514-520; green peach aphid (Myzus persicae), see Pitino et al. (2011) PLoS ONE, 6:e25709; brown planthopper (Nilaparvata lugens), see Li et al. (2011) Pest Manag. Sci., 67:852-859; and whitefly (Bemisia tabaci), see Upadhyay et al. (2011) J. Biosci., 36:153-161.

[0007] This invention is related to methods of controlling insect pests, in particular Diabrotica spp. which infest crop plants. This invention is further related to polynucleotides and recombinant DNA molecules and constructs useful in such methods. This invention is further related to insecticidal compositions, as well as to transgenic plants resistant to infestation by Diabrotica spp.

### SUMMARY OF THE INVENTION

[0008] This invention is related to control of Diabrotica species, especially those that are economically or agriculturally important pests. The compositions and methods of this invention include recombinant polynucleotide molecules, such as recombinant DNA constructs for making transgenic plants resistant to infestation by Diabrotica species and single- or double-stranded DNA or RNA “triggers” that are useful, e. g., as topically applied agents for causing RNAi-mediated suppression of a target gene in a Diabrotica species and thus controlling or preventing infestation by that Diabrotica species. A particular utility of this invention is providing maize plants, such as transgenic maize plants expressing a polynucleotide of this invention, or maize plants that have been topically treated with a polynucleotide of this invention, that are resistant to infestation by corn rootworm varieties of Diabrotica species. Another particular utility of this invention is a polynucleotide-containing composition that is topically applied to a Diabrotica species or to a plant to be protected from infestation by a Diabrotica species.

[0009] In one aspect, this invention provides a method for controlling a Diabrotica species infestation of a plant including contacting the Diabrotica species with a polynucleotide including at least 18 contiguous nucleotides with a sequence of about 95% to about 100% identity with a segment of equivalent length of a DNA having a sequence selected from the group consisting of SEQ ID NOs:1-15624 or the DNA complement thereof.

[0010] In another aspect, this invention provides method for controlling a Diabrotica species infestation of a plant including providing in the diet of a Diabrotica species an agent including a polynucleotide having at least one segment of 18 or more contiguous nucleotides with a sequence of about 95% to about 100% identity with a segment of equivalent length of a DNA having a sequence selected from the group consisting of SEQ ID NOs:1-15624 or the DNA complement thereof, wherein the agent functions upon ingestion by the Diabrotica species to inhibit a biological function within the Diabrotica species thereby controlling infestation by the Diabrotica species.

[0011] In another aspect, this invention provides a method of causing mortality or stunting in Diabrotica species larvae including providing in the diet of Diabrotica species larvae at least one recombinant RNA including at least one silencing element essentially identical or essentially complementary to a target gene of the Diabrotica species larvae, wherein the target gene sequence is selected from the group consisting of SEQ ID NOs:1-15624 or the complement thereof, and wherein ingestion of the recombinant RNA by the Diabrotica species larvae results in mortality or stunting in the Diabrotica species larvae.

[0012] In another aspect, this invention provides a method of providing a plant having improved resistance to a Diabrotica species infestation including topically applying to the plant a composition including at least one polynucleotide having at least one segment of 18 or more contiguous nucleotides with a sequence of about 95% to about 100% with a segment of equivalent length of a DNA having a sequence selected from the group consisting of SEQ ID NOs:1-15624 or the DNA complement thereof.

[0013] In another aspect, this invention provides a composition for controlling a Diabrotica species including at least one recombinant polynucleotide including at least 18 contiguous nucleotides that are essentially identical or complementary to a segment of equivalent length of a DNA having a sequence selected from the group consisting of SEQ ID NOs:1-15624.

[0014] In another aspect, this invention provides a method of providing a plant having improved resistance to a Diabrotica species infestation including expressing in the plant at least one polynucleotide including at least 18 contiguous nucleotides that are essentially identical or complementary to a segment of equivalent length of a DNA having a sequence selected from the group consisting of SEQ ID NOs:1-15624.

[0015] In another aspect, this invention provides a recombinant DNA construct including a heterologous promoter operably linked to DNA including at least one segment of 18 or more contiguous nucleotides with a sequence of about 95% to about 100% identity with a segment of equivalent length of a DNA having a sequence selected from the group consisting of SEQ ID NOs:1-15624 or the DNA complement thereof.

[0016] In another aspect, this invention provides a transgenic maize plant cell having in its genome a recombinant DNA encoding RNA that suppresses expression of a target gene in a Diabrotica species that contacts or ingests the RNA, wherein the RNA includes at least one silencing element complementary to the target gene, and wherein the target gene sequence is selected from the group consisting of SEQ ID NOs:1-15624 or the complement thereof.

[0017] In another aspect, this invention provides an isolated recombinant RNA molecule that causes mortality or stunting of growth in a Diabrotica species when ingested or contacted by the Diabrotica species, wherein the recombinant RNA molecule includes at least 18 contiguous nucleotides that are essentially complementary to a segment of equivalent length of a DNA having a sequence selected from the group consisting of SEQ ID NOs:1-15624 or the DNA complement thereof.

[0018] In related aspects, this invention provides compositions including the polynucleotide of this invention, such as formulations useful for topical application to a plant or substance in need of protection from a Diabrotica species infestation, recombinant constructs and vectors useful for making transgenic plant cells and transgenic plants, formulations and coatings useful for treating seeds, seeds treated with or containing a polynucleotide of this invention as well as commodity products and foodstuffs produced from such seeds (especially commodity products and foodstuffs having a detectable amount of a polynucleotide of this invention). A further aspect of this invention are polyclonal or monoclonal antibodies that bind a protein encoded by a sequence or a fragment of a sequence selected from the group consisting of SEQ ID NOs:1-15624; such antibodies are made by routine methods as known to one of ordinary skill in the art, for example using routine protocols as described in “Antibody Methods and Protocols” (Proetzel and Ebersbach, editors, 2012, Humana Press, New York) or “Making and Using Antibodies” (Howard and Kaser, editors, 2006, CRC Press, Boca Raton).

[0019] Other aspects and specific embodiments of this invention are disclosed in the following detailed description.

### DETAILED DESCRIPTION OF THE INVENTION

[0020] Unless defined otherwise, all technical and scientific terms used have the same meaning as commonly understood by one of ordinary skill in the art to which this invention belongs. Generally, the nomenclature used and the manufacturing or laboratory procedures described below are well known and commonly employed in the art. Conventional methods are used for these procedures, such as those provided in the art and various general references. Where a term is provided in the singular, the inventors also contemplate aspects of the invention described by the plural of that term. Where there are discrepancies in terms and definitions used in references that are incorporated by reference, the terms used in this application shall have the definitions given. Other technical terms used have their ordinary meaning in the art in which they are used, as exemplified by various art-specific dictionaries, for example, “The American Heritage® Science Dictionary” (Editors of the American Heritage Dictionaries, 2011, Houghton Mifflin Harcourt, Boston and New York), the “McGraw-Hill Dictionary of Scientific and Technical Terms” (6^{th} edition, 2002, McGraw-Hill, New York), or the “Oxford Dictionary of Biology” (6^{th} edition, 2008, Oxford University Press, Oxford and New York). The inventors do not intend to be limited to a mechanism or mode of action. Reference thereto is provided for illustrative purposes only.

[0021] Unless otherwise stated, nucleic acid sequences in the text of this specification are given, when read from left to right, in the 5′ to 3′ direction. One of skill in the art would be aware that a given DNA sequence can be understood to define a corresponding RNA sequence which is identical to the DNA sequence except for replacement of the thymine (T) nucleotides of the DNA with uracil (U) nucleotides. Thus, providing a specific DNA sequence is understood to define the exact RNA equivalent. A given first polynucleotide sequence, whether DNA or RNA, further defines the sequence of its exact complement (which can be DNA or RNA), i. e., a second polynucleotide that hybridizes perfectly to the first polynucleotide by forming Watson-Crick base-pairs. By “essentially identical” or “essentially complementary” to a target gene or a segment of a target gene is meant that a polynucleotide strand (or at least one strand of a double-stranded polynucleotide) is designed to hybridize (generally under physiological conditions such as those found in a living plant or animal cell) to a target gene or to a segment of a target gene or to the transcript of the target gene or the segment of a target gene; one of skill in the art would understand that such hybridization does not necessarily require 100% sequence identity or complementarity. A first nucleic acid sequence is “operably” connected or “linked” with a second nucleic acid sequence when the first nucleic acid sequence is placed in a functional relationship with the second nucleic acid sequence. For example, a promoter sequence is “operably linked” to DNA if the promoter provides for transcription or expression of the DNA. Generally, operably linked DNA sequences are contiguous.

[0022] The term “polynucleotide” commonly refers to a DNA or RNA molecule containing multiple nucleotides and generally refers both to “oligonucleotides” (a polynucleotide molecule of 18-25 nucleotides in length) and longer polynucleotides of 26 or more nucleotides. Polynucleotides also include molecules containing multiple nucleotides including non-canonical nucleotides or chemically modified nucleotides. Generally, polynucleotides of this invention, whether DNA or RNA or both, and whether single- or double-stranded, include at least 18 contiguous nucleotides (or, in the case of double-stranded polynucleotides, at least 18 contiguous base-pairs) that are essentially identical or complementary to a segment of equivalent size of the DNA of a target gene or the target gene's RNA transcript. Throughout this disclosure, “at least 18 contiguous” means “from about 18 to about 10,000, including every whole number point in between”. Thus, embodiments of this invention include compositions including oligonucleotides having a length of 18-25 nucleotides (18-mers, 19-mers, 20-mers, 21-mers, 22-mers, 23-mers, 24-mers, or 25-mers), or medium-length polynucleotides having a length of 26 or more nucleotides (polynucleotides of 26, 27, 28, 29, 30, 31, 32, 33, 34, 35, 36, 37, 38, 39, 40, 41, 42, 43, 44, 45, 46, 47, 48, 49, 50, 51, 52, 53, 54, 55, 56, 57, 58, 59, 60, about 65, about 70, about 75, about 80, about 85, about 90, about 95, about 100, about 110, about 120, about 130, about 140, about 150, about 160, about 170, about 180, about 190, about 200, about 210, about 220, about 230, about 240, about 250, about 260, about 270, about 280, about 290, or about 300 nucleotides), or long polynucleotides having a length greater than about 300 nucleotides (e. g., polynucleotides of between about 300 to about 400 nucleotides, between about 400 to about 500 nucleotides, between about 500 to about 600 nucleotides, between about 600 to about 700 nucleotides, between about 700 to about 800 nucleotides, between about 800 to about 900 nucleotides, between about 900 to about 1000 nucleotides, between about 300 to about 500 nucleotides, between about 300 to about 600 nucleotides, between about 300 to about 700 nucleotides, between about 300 to about 800 nucleotides, between about 300 to about 900 nucleotides, or about 1000 nucleotides in length, or even greater than about 1000 nucleotides in length, for example up to the entire length of a target gene including coding or non-coding or both coding and non-coding portions of the target gene). Where a polynucleotide is double-stranded, its length can be similarly described in terms of base pairs.

Controlling Diabrotica Infestations by Contacting with a Polynucleotide

[0023] A first aspect of this invention provides a method for controlling a Diabrotica species infestation of a plant including contacting the Diabrotica species with a polynucleotide including at least 18 contiguous nucleotides with a sequence of about 95% to about 100% identity with a segment of equivalent length of a DNA having a sequence selected from the group consisting of SEQ ID NOs:1-15624 or the DNA complement thereof.

[0024] In various embodiments, the Diabrotica species is at least one selected from the group consisting of Diabrotica balteata, Diabrotica barberi, Diabrotica beniensis, Diabrotica cristata, Diabrotica curvipustulata, Diabrotica dissimilis, Diabrotica elegantula, Diabrotica emorsitans, Diabrotica graminea, Diabrotica hispanolae, Diabrotica lemniscata, Diabrotica linsleyi, Diabrotica longicornis, Diabrotica milleri, Diabrotica nummularis, Diabrotica occlusa, Diabrotica porracea, Diabrotica scutellata, Diabrotica speciosa, Diabrotica tibialis, Diabrotica trifasciata, Diabrotica undecimpunctata, Diabrotica virgifera, and Diabrotica viridula. In specific embodiments, the Diabrotica species is at least one selected from the group consisting of Diabrotica virgifera virgifera (Western Corn Rootworm, WCR), Diabrotica undecimpunctata howardii (Southern Corn Rootworm, SCR), Diabrotica barberi (Northern Corn Rootworm, NCR), Diabrotica virgifera zeae (Mexican Corn Rootworm, MCR), Diabrotica balteata (Brazilian Corn Rootworm, BZR), or Brazilian Corn Rootworm complex (BCR) consisting of Diabrotica viridula and Diabrotica speciosa.

[0025] The plant can be any plant that is subject to infestation by a Diabrotica species. Of particular interest are embodiments wherein the plant is a row crop plant or a vegetable crop plant. Examples include a plant selected from the group consisting of maize, cucumber, squash, soybeans, and dry beans. One row crop plant of interest is maize, and embodiments include those wherein the plant is an ungerminated maize seed, or a maize plant in a vegetative stage (from emergence to tasseling stage, i. e., VE, V1, V2, V3, . . . , V(n), VT), or a maize plant in a reproductive stage (R1, R2, R3, R4, R5, R6). One embodiment includes maize plants in a field of maize.

[0026] The polynucleotide of this invention can be single-stranded (ss) or double-stranded (ds). “Double-stranded” refers to the base-pairing that occurs between sufficiently complementary, anti-parallel nucleic acid strands to form a double-stranded nucleic acid structure, generally under physiologically relevant conditions. Embodiments of the method include those wherein the polynucleotide is at least one selected from the group consisting of sense single-stranded DNA (ssDNA), sense single-stranded RNA (ssRNA), double-stranded RNA (dsRNA), double-stranded DNA (dsDNA), a double-stranded DNA/RNA hybrid, anti-sense ssDNA, or anti-sense ssRNA; a mixture of polynucleotides of any of these types can be used.

[0027] In some embodiments, the contiguous nucleotides have a sequence of about 95%, about 96%, about 97%, about 98%, about 99%, or about 100% identity with the segment of equivalent length of a DNA having a sequence selected from the group consisting of SEQ ID NOs:1-15624 or the DNA complement thereof. In some embodiments the contiguous nucleotides are exactly (100%) identical to a segment of equivalent length of a DNA having a sequence selected from the group consisting of SEQ ID NOs:1-15624 or the DNA complement thereof. In some embodiments, the polynucleotide has an overall sequence of about 95%, about 96%, about 97%, about 98%, about 99%, or about 100% identity with a segment of a DNA having a sequence selected from the group consisting of SEQ ID NOs:1-15624 or the DNA complement thereof.

[0028] Polynucleotides of use in this method include at least 18 contiguous nucleotides with a sequence of about 95% to about 100% identity with a segment of equivalent length of a DNA having a sequence selected from the group consisting of SEQ ID NOs:1-15624 or the DNA complement thereof. The contiguous nucleotides number at least 18, e. g., between 18-24, or between 18-28, or between 20-30, or between 20-50, or between 20-100, or between 50-100, or between 100-250, or between 100-500, or between 200-1000, or between 500-2000, or even greater, for example, up to the entire length of an open reading frame or up to the entire length of a gene or nucleotide sequence to be suppressed. The contiguous nucleotides can number more than 18, e. g., 19, 20, 21, 22, 23, 24, 25, 26, 27, 28, 29, 30, or greater than 30, e. g., about 35, about 40, about 45, about 50, about 55, about 60, about 65, about 70, about 75, about 80, about 85, about 90, about 95, about 100, about 110, about 120, about 130, about 140, about 150, about 160, about 170, about 180, about 190, about 200, about 210, about 220, about 230, about 240, about 250, about 260, about 270, about 280, about 290, about 300, or greater than 300.

[0029] The polynucleotide of this invention is generally designed to suppress one or more genes (“target genes”). The term “gene” refers to any portion of a nucleic acid that provides for expression of a transcript or encodes a transcript. A “gene” thus includes, but is not limited to, a promoter region, 5′ untranslated regions, transcript encoding regions that can include intronic regions, and 3′ untranslated regions. Thus, the target genes can include coding or non-coding sequence or both. In specific embodiments, the polynucleotide is designed to suppress one or more target genes, where each target gene has a DNA sequence selected from the group consisting of SEQ ID NOs:1-15624. In various embodiments, the polynucleotide is designed to suppress one or more genes, where each gene has a sequence selected from the group consisting of SEQ ID NOs:1-15624, and can be designed to suppress multiple genes from this group, or to target different regions of one or more of these genes. In an embodiment, the polynucleotide includes multiple sections or segments each of which includes at least 18 contiguous nucleotides with a sequence of about 95% to about 100% identity with a segment of equivalent length of a DNA having a sequence selected from the group consisting of SEQ ID NOs:1-15624 or the DNA complement thereof. In such cases, each section can be identical or different in size or in sequence, and can be sense or anti-sense relative to the target gene. For example, in one embodiment the polynucleotide can include multiple sections in tandem or repetitive arrangements, wherein each section includes at least 18 contiguous nucleotides with a sequence of about 95% to about 100% identity with a segment of equivalent length of a DNA having a sequence selected from the group consisting of SEQ ID NOs:1-15624 or the DNA complement thereof; “spacer” nucleotides which do not correspond to a target gene can optionally be used in between the sections.

[0030] The total length of the polynucleotide of this invention can be greater than 18 contiguous nucleotides, and can include nucleotides in addition to the contiguous nucleotides having the sequence of about 95% to about 100% identity with a segment of equivalent length of a DNA having a sequence selected from the group consisting of SEQ ID NOs:1-15624 or the DNA complement thereof. In other words, the total length of the polynucleotide can be greater than the length of the section or segment of the polynucleotide designed to suppress one or more target genes, where each target gene has a DNA sequence selected from the group consisting of SEQ ID NOs:1-15624. For example, the polynucleotide can have nucleotides flanking the “active” segment of at least 18 contiguous nucleotides that suppresses the target gene, or include “spacer” nucleotides between active segments, or can have additional nucleotides at the 5′ end, or at the 3′ end, or at both the 5′ and 3′ ends. In an embodiment, the polynucleotide can include additional nucleotides that provide stabilizing secondary structure.

[0031] In various embodiments the polynucleotide of this invention consists of naturally occurring nucleotides, such as those which occur in DNA and RNA. In certain embodiments, the polynucleotide is a combination of ribonucleotides and deoxyribonucleotides, for example, synthetic polynucleotides consisting mainly of ribonucleotides but with one or more terminal deoxyribonucleotides or synthetic polynucleotides consisting mainly of deoxyribonucleotides but with one or more terminal dideoxyribonucleotides. In certain embodiments, the polynucleotide includes non-canonical nucleotides such as inosine, thiouridine, or pseudouridine. In certain embodiments, the polynucleotide includes chemically modified nucleotides. Examples of chemically modified oligonucleotides or polynucleotides are well known in the art; see, for example, U.S. Patent Publication 2011/0171287, U.S. Patent Publication 2011/0171176, U.S. Patent Publication 2011/0152353, U.S. Patent Publication 2011/0152346, and U.S. Patent Publication 2011/0160082, which are herein incorporated by reference. Illustrative examples include, but are not limited to, the naturally occurring phosphodiester backbone of an oligonucleotide or polynucleotide which can be partially or completely modified with phosphorothioate, phosphorodithioate, or methylphosphonate internucleotide linkage modifications, modified nucleoside bases or modified sugars can be used in oligonucleotide or polynucleotide synthesis, and oligonucleotides or polynucleotides can be labeled with a fluorescent moiety (e. g., fluorescein or rhodamine) or other label (e. g., biotin).

[0032] The polynucleotide of this invention is provided by suitable means known to one in the art. Embodiments include those wherein the polynucleotide is chemically synthesized (e. g., by in vitro transcription, such as transcription using a T7 polymerase or other polymerase), produced by expression in a microorganism or in cell culture (such as plant or insect cells grown in culture), produced by expression in a plant cell, or produced by microbial fermentation.

[0033] In many embodiments the polynucleotide of this invention is provided as an isolated DNA or RNA fragment (not part of an expression construct, i. e., lacking additional elements such as a promoter or terminator sequences). Such polynucleotides can be relatively short, such as single- or double-stranded polynucleotides of between about 18 to about 200 or about 300 nucleotides (for single-stranded polynucleotides) or between about 18 to about 200 or about 300 base-pairs (for double-stranded polynucleotides). Alternatively the polynucleotide can be provided in more complex constructs, e. g., as part of a recombinant expression construct, or included in a recombinant vector, for example in a recombinant plant virus vector or in a recombinant baculovirus vector. Such recombinant expression constructs or vectors can be designed to include additional elements, such as expression cassettes for expressing a gene of interest (e. g., an insecticidal protein).

[0034] In various embodiments of the method, the contacting includes application to a surface of the Diabrotica species of a suitable composition including the polynucleotide of this invention; such a composition can be provided, e. g., as a solid, liquid (including homogeneous mixtures such as solutions and non-homogeneous mixtures such as suspensions, colloids, micelles, and emulsions), powder, suspension, emulsion, spray, encapsulated or micro-encapsulation formulation, in or on microbeads or other carrier particulates, in a film or coating, or on or within a matrix. The contacting can be in the form of a seed treatment. Suitable binders, inert carriers, surfactants, and the like can optionally be included in the composition, as is known to one skilled in formulation of pesticides and seed treatments. In embodiments, the contacting includes providing the polynucleotide in a composition that further includes one or more components selected from the group consisting of a carrier agent, a surfactant, an organosilicone, a polynucleotide herbicidal molecule, a non-polynucleotide herbicidal molecule, a non-polynucleotide pesticide, a safener, and an insect growth regulator. In embodiments, the contacting includes providing the polynucleotide in a composition that further includes at least one pesticidal agent selected from the group consisting of a patatin, a plant lectin, a phytoecdysteroid, a Bacillus thuringiensis insecticidal protein, a Xenorhabdus insecticidal protein, a Photorhabdus insecticidal protein, a Bacillus laterosporous insecticidal protein, and a Bacillus sphearicus insecticidal protein. In one embodiment the contacting includes providing the polynucleotide in a composition that can be ingested or otherwise absorbed internally by the Diabrotica species.

[0035] It is anticipated that the combination of certain polynucleotides of this invention (e. g., the polynucleotide triggers described in the working Examples) with one or more non-polynucleotide pesticidal agents will result in a synergetic improvement in prevention or control of Diabrotica species infestations, when compared to the effect obtained with the polynucleotide alone or the non-polynucleotide pesticidal agent alone. In an embodiment, a composition containing one or more polynucleotides of this invention and one or more non-polynucleotide pesticidal agent selected from the group consisting of a patatin, a plant lectin, a phytoecdysteroid, a Bacillus thuringiensis insecticidal protein, a Xenorhabdus insecticidal protein, a Photorhabdus insecticidal protein, a Bacillus laterosporous insecticidal protein, and a Bacillus sphearicus insecticidal protein, is found to effect synergistically improved prevention or control of Diabrotica species infestations.

### Controlling Diabrotica Infestations by Providing a Dietary Polynucleotide

[0036] Another aspect of this invention provides a method for controlling a Diabrotica species infestation of a plant including providing in the diet of a Diabrotica species an agent including a polynucleotide having at least one segment of 18 or more contiguous nucleotides with a sequence of about 95% to about 100% identity with a segment of equivalent length of a DNA having a sequence selected from the group consisting of SEQ ID NOs:1-15624 or the DNA complement thereof, wherein the agent functions upon ingestion by the Diabrotica species to inhibit a biological function within the Diabrotica species thereby controlling infestation by the Diabrotica species.

[0037] In various embodiments, the Diabrotica species is at least one selected from the group consisting of Diabrotica balteata, Diabrotica barberi, Diabrotica beniensis, Diabrotica cristata, Diabrotica curvipustulata, Diabrotica dissimilis, Diabrotica elegantula, Diabrotica emorsitans, Diabrotica graminea, Diabrotica hispanolae, Diabrotica lemniscata, Diabrotica linsleyi, Diabrotica longicornis, Diabrotica milleri, Diabrotica nummularis, Diabrotica occlusa, Diabrotica porracea, Diabrotica scutellata, Diabrotica speciosa, Diabrotica tibialis, Diabrotica trifasciata, Diabrotica undecimpunctata, Diabrotica virgifera, and Diabrotica viridula. In specific embodiments, the Diabrotica species is at least one selected from the group consisting of Diabrotica virgifera virgifera (Western Corn Rootworm, WCR), Diabrotica undecimpunctata howardii (Southern Corn Rootworm, SCR), Diabrotica barberi (Northern Corn Rootworm, NCR), Diabrotica virgifera zeae (Mexican Corn Rootworm, MCR), Diabrotica balteata (Brazilian Corn Rootworm, BZR), or Brazilian Corn Rootworm complex (BCR) consisting of Diabrotica viridula and Diabrotica speciosa.

[0038] In various embodiments, the agent including a polynucleotide of this invention includes a microbial cell or is produced in a microorganism. For example, the agent can include or can be produced in bacteria or yeast cells. In similar embodiments the agent including a polynucleotide includes a transgenic plant cell or is produced in a plant cell (for example a plant cell transiently expressing the polynucleotide); such plant cells can be cells in an plant or cells grown in tissue culture or in cell suspension.

[0039] The plant can be any plant that is subject to infestation by a Diabrotica species. Of particular interest are embodiments wherein the plant is a row crop plant or a vegetable crop plant. Examples include a plant selected from the group consisting of maize, cucumber, squash, soybeans, and dry beans. One row crop plant of interest is maize, and embodiments include those wherein the plant is an ungerminated maize seed, or a maize plant in a vegetative stage (from emergence to tasseling stage, i. e., VE, V1, V2, V3, . . . , V(n), VT), or a maize plant in a reproductive stage (R1, R2, R3, R4, R5, R6). One embodiment includes maize plants in a field of maize.

[0040] In various embodiments, the agent including a polynucleotide of this invention is provided for dietary uptake by the Diabrotica species in a form suitable for ingestion, for example, as a solid, liquid (including homogeneous mixtures such as solutions and non-homogeneous mixtures such as suspensions, colloids, micelles, and emulsions), powder, suspension, emulsion, spray, encapsulated or micro-encapsulation formulation, in or on microbeads or other carrier particulates, in a film or coating, or on or within a matrix. The agent including a polynucleotide can be provided for dietary uptake by the Diabrotica species by applying the agent to a plant subject to infestation by the Diabrotica species, for example by spraying, dusting, or coating the plant, or by application of a soil drench, or by providing in an artificial diet. The agent including a polynucleotide can be provided for dietary uptake by the Diabrotica species in an artificial diet formulated to meet the particular nutritional requirements for maintaining the Diabrotica species, wherein the artificial diet is supplemented with some amount of the polynucleotide obtained from a separate source such as chemical synthesis or purified from a microbial fermentation; this embodiment can be useful, e. g., for determining the timing and amounts of effective polynucleotide treatment regimes. In some embodiments the agent including a polynucleotide is provided for dietary uptake by the Diabrotica species in the form of a plant cell or in plant cell components, or in a microorganism (such as a bacterium or a yeast) or a microbial fermentation product, or in a synthetic diet. In one embodiment the agent including a polynucleotide is provided in the form of bait that is ingested by the Diabrotica species. The agent including a polynucleotide can be provided for dietary uptake by the Diabrotica species in the form of a seed treatment. Suitable binders, inert carriers, surfactants, and the like can be included in the agent, as is known to one skilled in formulation of pesticides and seed treatments. In embodiments, the agent including a polynucleotide further includes one or more components selected from the group consisting of a carrier agent, a surfactant, an organosilicone, a polynucleotide herbicidal molecule, a non-polynucleotide herbicidal molecule, a non-polynucleotide pesticide, a safener, and an insect growth regulator. In embodiments, the agent including a polynucleotide further includes at least one pesticidal agent selected from the group consisting of a patatin, a plant lectin, a phytoecdysteroid, a phytoecdysteroid, a Bacillus thuringiensis insecticidal protein, a Xenorhabdus insecticidal protein, a Photorhabdus insecticidal protein, a Bacillus laterosporous insecticidal protein, and a Bacillus sphearicus insecticidal protein.

[0041] It is anticipated that the combination of certain polynucleotides of use in agents of this invention (e. g., the polynucleotide triggers described in the working Examples) with one or more non-polynucleotide pesticidal agents will result in a synergetic improvement in prevention or control of Diabrotica species infestations, when compared to the effect obtained with the polynucleotide alone or the non-polynucleotide pesticidal agent alone. In an embodiment, a composition containing one or more polynucleotides of this invention and one or more non-polynucleotide pesticidal agent selected from the group consisting of a patatin, a plant lectin, a phytoecdysteroid, a Bacillus thuringiensis insecticidal protein, a Xenorhabdus insecticidal protein, a Photorhabdus insecticidal protein, a Bacillus laterosporous insecticidal protein, and a Bacillus sphearicus insecticidal protein, is found to effect synergistically improved prevention or control of Diabrotica species infestations when provided to the Diabrotica species in a diet.

[0042] The polynucleotide of use in agents of this invention can be single-stranded (ss) or double-stranded (ds). “Double-stranded” refers to the base-pairing that occurs between sufficiently complementary, anti-parallel nucleic acid strands to form a double-stranded nucleic acid structure, generally under physiologically relevant conditions. Embodiments of the method include those wherein the polynucleotide is at least one selected from the group consisting of sense single-stranded DNA (ssDNA), sense single-stranded RNA (ssRNA), double-stranded RNA (dsRNA), double-stranded DNA (dsDNA), a double-stranded DNA/RNA hybrid, anti-sense ssDNA, or anti-sense ssRNA; a mixture of polynucleotides of any of these types can be used.

[0043] In some embodiments, the contiguous nucleotides have a sequence of about 95%, about 96%, about 97%, about 98%, about 99%, or about 100% identity with the segment of equivalent length of a DNA having a sequence selected from the group consisting of SEQ ID NOs:1-15624 or the DNA complement thereof. In some embodiments the contiguous nucleotides are exactly (100%) identical to a segment of equivalent length of a DNA having a sequence selected from the group consisting of SEQ ID NOs:1-15624 or the DNA complement thereof. In some embodiments, the polynucleotide has an overall sequence of about 95%, about 96%, about 97%, about 98%, about 99%, or about 100% identity with a segment of a DNA having a sequence selected from the group consisting of SEQ ID NOs:1-15624 or the DNA complement thereof.

[0044] Polynucleotides of use in agents of this invention include at least 18 contiguous nucleotides with a sequence of about 95% to about 100% identity with a segment of equivalent length of a DNA having a sequence selected from the group consisting of SEQ ID NOs:1-15624 or the DNA complement thereof. The contiguous nucleotides number at least 18, e. g., between 18-24, or between 18-28, or between 20-30, or between 20-50, or between 20-100, or between 50-100, or between 100-250, or between 100-500, or between 200-1000, or between 500-2000, or even greater, for example, up to the entire length of an open reading frame or up to the entire length of a gene or nucleotide sequence to be suppressed. The contiguous nucleotides can number more than 18, e. g., 19, 20, 21, 22, 23, 24, 25, 26, 27, 28, 29, 30, or greater than 30, e. g., about 35, about 40, about 45, about 50, about 55, about 60, about 65, about 70, about 75, about 80, about 85, about 90, about 95, about 100, about 110, about 120, about 130, about 140, about 150, about 160, about 170, about 180, about 190, about 200, about 210, about 220, about 230, about 240, about 250, about 260, about 270, about 280, about 290, about 300, or greater than 300.

[0045] The polynucleotide of use in agents of this invention is generally designed to suppress one or more genes (“target genes”). The term “gene” refers to any portion of a nucleic acid that provides for expression of a transcript or encodes a transcript. A “gene” thus includes, but is not limited to, a promoter region, 5′ untranslated regions, transcript encoding regions that can include intronic regions, and 3′ untranslated regions. Thus, the target genes can include coding or non-coding sequence or both. In specific embodiments, the polynucleotide is designed to suppress one or more target genes, where each target gene has a DNA sequence selected from the group consisting of SEQ ID NOs:1-15624. In various embodiments, the polynucleotide is designed to suppress one or more genes, where each gene has a sequence selected from the group consisting of SEQ ID NOs:1-15624, and can be designed to suppress multiple genes from this group, or to target different regions of one or more of these genes. In an embodiment, the polynucleotide includes multiple sections or segments each of which includes at least 18 contiguous nucleotides with a sequence of about 95% to about 100% identity with a segment of equivalent length of a DNA having a sequence selected from the group consisting of SEQ ID NOs:1-15624 or the DNA complement thereof. In such cases, each section can be identical or different in size or in sequence, and can be sense or anti-sense relative to the target gene. For example, in one embodiment the polynucleotide can include multiple sections in tandem or repetitive arrangements, wherein each section includes at least 18 contiguous nucleotides with a sequence of about 95% to about 100% identity with a segment of equivalent length of a DNA having a sequence selected from the group consisting of SEQ ID NOs:1-15624 or the DNA complement thereof; “spacer” nucleotides which do not correspond to a target gene can optionally be used in between the sections.

[0046] The total length of the polynucleotide of use in agents of this invention can be greater than 18 contiguous nucleotides, and can include nucleotides in addition to the contiguous nucleotides having the sequence of about 95% to about 100% identity with a segment of equivalent length of a DNA having a sequence selected from the group consisting of SEQ ID NOs:1-15624 or the DNA complement thereof. In other words, the total length of the polynucleotide can be greater than the length of the section or segment of the polynucleotide designed to suppress one or more target genes, where each target gene has a DNA sequence selected from the group consisting of SEQ ID NOs:1-15624. For example, the polynucleotide can have nucleotides flanking the “active” segment of at least 18 contiguous nucleotides that suppresses the target gene, or include “spacer” nucleotides between active segments, or can have additional nucleotides at the 5′ end, or at the 3′ end, or at both the 5′ and 3′ ends. In an embodiment, the polynucleotide can include additional nucleotides that provide stabilizing secondary structure.

[0047] In various embodiments the polynucleotide of use in agents of this invention consists of naturally occurring nucleotides, such as those which occur in DNA and RNA. In certain embodiments, the polynucleotide is a combination of ribonucleotides and deoxyribonucleotides, for example, synthetic polynucleotides consisting mainly of ribonucleotides but with one or more terminal deoxyribonucleotides or synthetic polynucleotides consisting mainly of deoxyribonucleotides but with one or more terminal dideoxyribonucleotides. In certain embodiments, the polynucleotide includes non-canonical nucleotides such as inosine, thiouridine, or pseudouridine. In certain embodiments, the polynucleotide includes chemically modified nucleotides. Examples of chemically modified oligonucleotides or polynucleotides are well known in the art; see, for example, U.S. Patent Publication 2011/0171287, U.S. Patent Publication 2011/0171176, U.S. Patent Publication 2011/0152353, U.S. Patent Publication 2011/0152346, and U.S. Patent Publication 2011/0160082, which are herein incorporated by reference. Illustrative examples include, but are not limited to, the naturally occurring phosphodiester backbone of an oligonucleotide or polynucleotide which can be partially or completely modified with phosphorothioate, phosphorodithioate, or methylphosphonate internucleotide linkage modifications, modified nucleoside bases or modified sugars can be used in oligonucleotide or polynucleotide synthesis, and oligonucleotides or polynucleotides can be labeled with a fluorescent moiety (e. g., fluorescein or rhodamine) or other label (e. g., biotin).

[0048] The polynucleotide of use in agents of this invention is provided by suitable means known to one in the art. Embodiments include those wherein the polynucleotide is chemically synthesized (e. g., by in vitro transcription, such as transcription using a T7 polymerase or other polymerase), produced by expression in a microorganism or in cell culture (such as plant or insect cells grown in culture), produced by expression in a plant cell, or produced by microbial fermentation.

[0049] In many embodiments the polynucleotide of use in agents of this invention is provided as an isolated DNA or RNA fragment (not part of an expression construct, i. e., lacking additional elements such as a promoter or terminator sequences). Such polynucleotides can be relatively short, such as single- or double-stranded polynucleotides of between about 18 to about 200 or about 300 nucleotides (for single-stranded polynucleotides) or between about 18 to about 200 or about 300 base-pairs (for double-stranded polynucleotides). Alternatively the polynucleotide can be provided in more complex constructs, e. g., as part of a recombinant expression construct, or included in a recombinant vector, for example in a recombinant plant virus vector or in a recombinant baculovirus vector. Such recombinant expression constructs or vectors can be designed to include additional elements, such as expression cassettes for expressing a gene of interest (e. g., an insecticidal protein).

### Controlling Diabrotica Infestations by Providing a Dietary Recombinant RNA

[0050] Another aspect of this invention provides a method of causing mortality or stunting in Diabrotica species larvae including providing in the diet of Diabrotica species larvae at least one recombinant RNA including at least one silencing element, wherein the at least one silencing element is essentially identical or essentially complementary to a target gene of the Diabrotica species larvae, wherein the target gene sequence is selected from the group consisting of SEQ ID NOs:1-15624 or the complement thereof, and wherein ingestion of the recombinant RNA by the Diabrotica species larvae results in mortality or stunting in the Diabrotica species larvae. A related aspect of this invention is the recombinant RNA including at least one silencing element, wherein the at least one silencing element is essentially identical or essentially complementary to a target gene of the Diabrotica species larvae, wherein the target gene sequence is selected from the group consisting of SEQ ID NOs:1-15624 or the complement thereof.

[0051] In various embodiments, the Diabrotica species is at least one selected from the group consisting of Diabrotica balteata, Diabrotica barberi, Diabrotica beniensis, Diabrotica cristata, Diabrotica curvipustulata, Diabrotica dissimilis, Diabrotica elegantula, Diabrotica emorsitans, Diabrotica graminea, Diabrotica hispanolae, Diabrotica lemniscata, Diabrotica linsleyi, Diabrotica longicornis, Diabrotica milleri, Diabrotica nummularis, Diabrotica occlusa, Diabrotica porracea, Diabrotica scutellata, Diabrotica speciosa, Diabrotica tibialis, Diabrotica trifasciata, Diabrotica undecimpunctata, Diabrotica virgifera, and Diabrotica viridula. In specific embodiments, the Diabrotica species is at least one selected from the group consisting of Diabrotica virgifera virgifera (Western Corn Rootworm, WCR), Diabrotica undecimpunctata howardii (Southern Corn Rootworm, SCR), Diabrotica barberi (Northern Corn Rootworm, NCR), Diabrotica virgifera zeae (Mexican Corn Rootworm, MCR), Diabrotica balteata (Brazilian Corn Rootworm, BZR), or Brazilian Corn Rootworm complex (BCR) consisting of Diabrotica viridula and Diabrotica speciosa.

[0052] In various embodiments, the diet providing the recombinant RNA includes a microbial cell or is produced in a microorganism. For example, the diet providing the recombinant RNA can include or can be produced in bacteria or yeast cells. In similar embodiments the diet providing the recombinant RNA includes a transgenic plant cell or is produced in a plant cell (for example a plant cell transiently expressing the polynucleotide); such plant cells can be cells in an plant or cells grown in tissue culture or in cell suspension.

[0053] In one embodiment the diet providing the recombinant RNA is any plant that is subject to infestation by a Diabrotica species, wherein the recombinant RNA is contained in or on the plant. Such plants can be stably transgenic plants that express the recombinant RNA, or non-transgenic plants that transiently express the recombinant RNA. Stably transgenic plants generally contain integrated into their genome a recombinant construct that encodes the recombinant RNA. Of particular interest are embodiments wherein the plant is a row crop plant or a vegetable crop plant. Examples include a plant selected from the group consisting of maize, cucumber, squash, soybeans, and dry beans. One row crop plant of interest is maize, and embodiments include those wherein the plant is an ungerminated maize seed, or a maize plant in a vegetative stage (from emergence to tasseling stage, i. e., VE, V1, V2, V3, . . . , V(n), VT), or a maize plant in a reproductive stage (R1, R2, R3, R4, R5, R6). One embodiment includes maize plants in a field of maize.

[0054] In various embodiments, the diet providing the recombinant RNA is provided in a form suitable for ingestion by the Diabrotica species, for example, as a solid, liquid (including homogeneous mixtures such as solutions and non-homogeneous mixtures such as suspensions, colloids, micelles, and emulsions), powder, suspension, emulsion, spray, encapsulated or micro-encapsulation formulation, in or on microbeads or other carrier particulates, in a film or coating, or on or within a matrix. The diet providing the recombinant RNA can be provided by applying the diet to a plant subject to infestation by the Diabrotica species, for example by spraying, dusting, or coating the plant, or by application of a soil drench, or by providing in an artificial diet. In one embodiment the diet providing the recombinant RNA is provided in the form of bait that is ingested by the Diabrotica species. The diet providing the recombinant RNA can be an artificial diet formulated to meet the particular nutritional requirements for maintaining the Diabrotica species, wherein the artificial diet is supplemented with some amount of the recombinant RNA obtained from a separate source such as chemical synthesis or purified from a microbial fermentation; this embodiment can be useful, e. g., for determining the timing and amounts of effective polynucleotide treatment regimes. In some embodiments the diet providing the recombinant RNA is provided in the form of a plant cell or in plant cell components, or in a microorganism (such as a bacterium or a yeast) or a microbial fermentation product, or in a synthetic diet. In one embodiment the diet providing the recombinant RNA is provided in the form of bait that is ingested by the Diabrotica species. The diet providing the recombinant RNA can be provided in the form of a seed treatment. Suitable binders, inert carriers, surfactants, and the like can be included in the diet, as is known to one skilled in formulation of pesticides and seed treatments. In embodiments, the diet providing the recombinant RNA further includes one or more components selected from the group consisting of a carrier agent, a surfactant, an organosilicone, a polynucleotide herbicidal molecule, a non-polynucleotide herbicidal molecule, a non-polynucleotide pesticide, a safener, and an insect growth regulator. In embodiments, the diet providing the recombinant RNA further includes at least one pesticidal agent selected from the group consisting of a patatin, a plant lectin, a phytoecdysteroid, a Bacillus thuringiensis insecticidal protein, a Xenorhabdus insecticidal protein, a Photorhabdus insecticidal protein, a Bacillus laterosporous insecticidal protein, and a Bacillus sphearicus insecticidal protein.

[0055] It is anticipated that the combination of certain recombinant RNAs of this invention (e. g., the dsRNA triggers described in the working Examples) with one or more non-polynucleotide pesticidal agents will result in a synergetic improvement in prevention or control of Diabrotica species infestations, when compared to the effect obtained with the recombinant RNA alone or the non-polynucleotide pesticidal agent alone. In an embodiment, a composition containing one or more recombinant RNAs of this invention and one or more non-polynucleotide pesticidal agent selected from the group consisting of a patatin, a plant lectin, a phytoecdysteroid, a Bacillus thuringiensis insecticidal protein, a Xenorhabdus insecticidal protein, a Photorhabdus insecticidal protein, a Bacillus laterosporous insecticidal protein, and a Bacillus sphearicus insecticidal protein, is found to effect synergistically improved prevention or control of Diabrotica species infestations.

[0056] The recombinant RNA of this invention can be single-stranded (ss) or double-stranded (ds). “Double-stranded” refers to the base-pairing that occurs between sufficiently complementary, anti-parallel nucleic acid strands to form a double-stranded nucleic acid structure, generally under physiologically relevant conditions. Embodiments of the method include those wherein the recombinant RNA is at least one selected from the group consisting of sense single-stranded RNA (ssRNA), anti-sense single-stranded (ssRNA), or double-stranded RNA (dsRNA); a mixture of recombinant RNAs of any of these types can be used. In one embodiment a double-stranded DNA/RNA hybrid can be used.

[0057] The at least one recombinant RNA of this invention includes at least one silencing element, wherein the silencing element is essentially identical (as the RNA equivalent) or essentially complementary to a target gene of the Diabrotica species larvae, wherein the target gene sequence is selected from the group consisting of SEQ ID NOs:1-15624 or the complement thereof. In some embodiments, the silencing element has a sequence of about 95%, about 96%, about 97%, about 98%, about 99%, or about 100% identity with a segment of equivalent length of a DNA having a sequence selected from the group consisting of SEQ ID NOs:1-15624 or the DNA complement thereof. In some embodiments the silencing element is exactly (100%) identical (as the RNA equivalent) to a segment of equivalent length of a DNA having a sequence selected from the group consisting of SEQ ID NOs:1-15624 or the DNA complement thereof. In some embodiments, the silencing element has an overall sequence of about 95%, about 96%, about 97%, about 98%, about 99%, or about 100% identity with the segment of a DNA having a sequence selected from the group consisting of SEQ ID NOs:1-15624 or the DNA complement thereof.

[0058] In some embodiments, the silencing element includes at least 18 contiguous nucleotides with a sequence of about 95% to about 100% with a segment of equivalent length of the target gene. In some embodiments the silencing element includes at least 18 contiguous nucleotides with a sequence of about 95% to about 100% identity with a segment of equivalent length of a DNA having a sequence selected from the group consisting of SEQ ID NOs:1-15624 or the DNA complement thereof. In some embodiments the silencing element includes at least 18 contiguous nucleotides, e. g., between 18-24, or between 18-28, or between 20-30, or between 20-50, or between 20-100, or between 50-100, or between 100-250, or between 100-500, or between 200-1000 contiguous nucleotides. In some embodiments the silencing element includes more than 18 contiguous nucleotides, e. g., 19, 20, 21, 22, 23, 24, 25, 26, 27, 28, 29, 30, or greater than 30, e. g., about 35, about 40, about 45, about 50, about 55, about 60, about 65, about 70, about 75, about 80, about 85, about 90, about 95, about 100, about 110, about 120, about 130, about 140, about 150, about 160, about 170, about 180, about 190, about 200, about 210, about 220, about 230, about 240, about 250, about 260, about 270, about 280, about 290, about 300, or greater than 300 contiguous nucleotides.

[0059] The recombinant RNA of this invention is generally designed to suppress one or more genes (“target genes”). Such target genes can include coding or non-coding sequence or both. In specific embodiments, the recombinant RNA is designed to suppress one or more target genes, where each target gene has a DNA sequence selected from the group consisting of SEQ ID NOs:1-15624. In various embodiments, the recombinant RNA is designed to suppress one or more genes, where each gene has a sequence selected from the group consisting of SEQ ID NOs:1-15624, and can be designed to suppress multiple genes from this group, or to target different regions of one or more of these genes. In an embodiment, the recombinant RNA includes multiple silencing elements each of which includes at least 18 contiguous nucleotides with a sequence of about 95% to about 100% identity with a segment of equivalent length of a DNA having a sequence selected from the group consisting of SEQ ID NOs:1-15624 or the DNA complement thereof. In such cases, each silencing element can be identical or different in size or in sequence, and can be sense or anti-sense relative to the target gene. For example, in one embodiment the polynucleotide can include multiple silencing elements in tandem or repetitive arrangements, wherein each silencing element includes at least 18 contiguous nucleotides with a sequence of about 95% to about 100% identity with a segment of equivalent length of a DNA having a sequence selected from the group consisting of SEQ ID NOs:1-15624 or the DNA complement thereof; “spacer” nucleotides which do not correspond to a target gene can optionally be used in between the silencing elements.

[0060] The total length of the recombinant RNA of this invention can be greater than 18 contiguous nucleotides, and can include nucleotides in addition to the silencing element having the sequence of about 95% to about 100% identity with a segment of equivalent length of a DNA having a sequence selected from the group consisting of SEQ ID NOs:1-15624 or the DNA complement thereof. In other words, the total length of the recombinant RNA can be greater than the length of the silencing element designed to suppress one or more target genes, where each target gene has a DNA sequence selected from the group consisting of SEQ ID NOs:1-15624. For example, the recombinant RNA can have nucleotides flanking the “active” silencing element of at least 18 contiguous nucleotides that suppresses the target gene, or include “spacer” nucleotides between active silencing element, or can have additional nucleotides at the 5′ end, or at the 3′ end, or at both the 5′ and 3′ ends. In an embodiment, the recombinant RNA can include additional nucleotides that provide stabilizing secondary structure.

[0061] In various embodiments the recombinant RNA of this invention consists of naturally occurring ribonucleotides. In other embodiments the recombinant RNA is chemically modified, or includes chemically modified nucleotides. The recombinant RNA is provided by suitable means known to one in the art. Embodiments include those wherein the recombinant RNA is chemically synthesized (e. g., by in vitro transcription, such as transcription using a T7 polymerase or other polymerase), produced by expression in a microorganism or in cell culture (such as plant or insect cells grown in culture), produced by expression in a plant cell, or produced by microbial fermentation.

[0062] In many embodiments the recombinant RNA of this invention is provided as an isolated RNA fragment. Such RNAs can be relatively short, such as single- or double-stranded RNAs of between about 18 to about 200 or about 300 nucleotides (for single-stranded RNAs) or between about 18 to about 200 or about 300 base-pairs (for double-stranded RNAs). Alternatively the recombinant RNA can be provided in more complex constructs, e. g., including additional RNA encoding an aptamer or ribozyme or an insecticidal protein.

### Methods of Providing Plants Having Improved Resistance to Diabrotica Infestations, and the Plants and Seeds Thus Provided

[0063] Another aspect of this invention provides a method of providing a plant having improved resistance to a Diabrotica species infestation including topically applying to the plant a composition including at least one polynucleotide having at least one segment of 18 or more contiguous nucleotides with a sequence of about 95% to about 100% identity with a segment of equivalent length of a DNA having a sequence selected from the group consisting of SEQ ID NOs:1-15624 or the DNA complement thereof, whereby the plant treated with the polynucleotide composition exhibits improved resistance to a Diabrotica species infestation, relative to an untreated plant. In an embodiment the at least one polynucleotide includes at least 18 contiguous nucleotides that are essentially identical or complementary to a segment of equivalent length of a DNA having a sequence selected from the group consisting of SEQ ID NOs:1-15624.

[0064] The plant can be any plant that is subject to infestation by a Diabrotica species. Of particular interest are embodiments wherein the plant is a row crop plant or a vegetable crop plant. Examples include a plant selected from the group consisting of maize, cucumber, squash, soybeans, and dry beans. One row crop plant of interest is maize, and embodiments include those wherein the plant is an ungerminated maize seed, or a maize plant in a vegetative stage (from emergence to tasseling stage, i. e., VE, V1, V2, V3, . . . , V(n), VT), or a maize plant in a reproductive stage (R1, R2, R3, R4, R5, R6). One embodiment includes maize plants in a field of maize.

[0065] In various embodiments, the Diabrotica species is at least one selected from the group consisting of Diabrotica balteata, Diabrotica barberi, Diabrotica beniensis, Diabrotica cristata, Diabrotica curvipustulata, Diabrotica dissimilis, Diabrotica elegantula, Diabrotica emorsitans, Diabrotica graminea, Diabrotica hispanolae, Diabrotica lemniscata, Diabrotica linsleyi, Diabrotica longicornis, Diabrotica milleri, Diabrotica nummularis, Diabrotica occlusa, Diabrotica porracea, Diabrotica scutellata, Diabrotica speciosa, Diabrotica tibialis, Diabrotica trifasciata, Diabrotica undecimpunctata, Diabrotica virgifera, and Diabrotica viridula. In specific embodiments, the Diabrotica species is at least one selected from the group consisting of Diabrotica virgifera virgifera (Western Corn Rootworm, WCR), Diabrotica undecimpunctata howardii (Southern Corn Rootworm, SCR), Diabrotica barberi (Northern Corn Rootworm, NCR), Diabrotica virgifera zeae (Mexican Corn Rootworm, MCR), Diabrotica balteata (Brazilian Corn Rootworm, BZR), or Brazilian Corn Rootworm complex (BCR) consisting of Diabrotica viridula and Diabrotica speciosa.

[0066] By “topical application” is meant application to the surface or exterior of an object, such as the surface or exterior of a plant, such as application to the surfaces of a plant part such as a leaf, stem, flower, fruit, shoot, root, seed, tuber, flowers, anthers, or pollen, or application to an entire plant, or to the above-ground or below-ground portions of a plant. Topical application can be carried out on non-living surfaces, such as application to soil, or to a surface or matrix by which a Diabrotica insect can come in contact with the polynucleotide. In various embodiments of the method, the composition including at least one polynucleotide is topically applied to the plant in a suitable form, e. g., as a solid, liquid (including homogeneous mixtures such as solutions and non-homogeneous mixtures such as suspensions, colloids, micelles, and emulsions), powder, suspension, emulsion, spray, encapsulated or micro-encapsulation formulation, in or on microbeads or other carrier particulates, in a film or coating, or on or within a matrix. Topical application of the polynucleotide-containing composition to the plant can be in the form of a seed treatment. Suitable binders, inert carriers, surfactants, and the like can optionally be included in the composition, as is known to one skilled in formulation of pesticides and seed treatments. In one embodiment the polynucleotide-containing composition can be ingested or otherwise absorbed internally by the Diabrotica species. For example, the polynucleotide-containing composition can be in the form of bait. In embodiments, the polynucleotide-containing composition further includes one or more components selected from the group consisting of a carrier agent, a surfactant, an organosilicone, a polynucleotide herbicidal molecule, a non-polynucleotide herbicidal molecule, a non-polynucleotide pesticide, a safener, and an insect growth regulator. In one embodiment the composition further includes a nonionic organosilicone surfactant such as Silwet, e. g., Silwet® L-77 surfactant having CAS Number 27306-78-1 and EPA Number: CAL.REG.NO. 5905-50073-AA, currently available from Momentive Performance Materials, Albany, N.Y. In embodiments, the topically applied composition further includes at least one pesticidal agent selected from the group consisting of a patatin, a plant lectin, a phytoecdysteroid, a Bacillus thuringiensis insecticidal protein, a Xenorhabdus insecticidal protein, a Photorhabdus insecticidal protein, a Bacillus laterosporous insecticidal protein, and a Bacillus sphearicus insecticidal protein. Alternatively such additional components or pesticidal agents can be provided separately, e. g., by separate topical application or by transgenic expression in the plant. Alternatively the plant is topically treated with the polynucleotide-containing composition as well as with a separate (preceding, following, or concurrent) application of a substance that improves the efficacy of the polynucleotide-containing composition. For example, a plant can be sprayed with a first topical application of a solution containing a nonionic organosilicone surfactant such as Silwet, e. g., Silwet® L-77, followed by a second topical application of the polynucleotide-containing composition, or vice-versa.

[0067] It is anticipated that the combination of certain polynucleotides useful in compositions of this invention (e. g., the polynucleotide triggers described in the working Examples) with one or more non-polynucleotide pesticidal agents will result in a synergetic improvement in prevention or control of Diabrotica species infestations, when compared to the effect obtained with the polynucleotide alone or the non-polynucleotide pesticidal agent alone. In an embodiment, a transgenic plant expressing one or more polynucleotides of this invention and one or more genes encoding a non-polynucleotide pesticidal agent selected from the group consisting of a patatin, a plant lectin, a phytoecdysteroid, a Bacillus thuringiensis insecticidal protein, a Xenorhabdus insecticidal protein, a Photorhabdus insecticidal protein, a Bacillus laterosporous insecticidal protein, and a Bacillus sphearicus insecticidal protein, is found to exhibit synergistically improved resistance to Diabrotica species infestations.

[0068] In some embodiments of the method, the composition including at least one polynucleotide is topically applied to above-ground parts of the plant, e. g., sprayed or dusted onto leaves, stems, and flowering parts of the plant. In other embodiments, the composition including at least one polynucleotide is topically applied to below-ground parts of the plant, such as to the roots, e. g., by means of a soil drench. In other embodiments, the composition including at least one polynucleotide is topically applied to a seed that is grown into the plant.

[0069] The polynucleotide useful in compositions of this invention can be single-stranded (ss) or double-stranded (ds). “Double-stranded” refers to the base-pairing that occurs between sufficiently complementary, anti-parallel nucleic acid strands to form a double-stranded nucleic acid structure, generally under physiologically relevant conditions. Embodiments of the method include those wherein the polynucleotide is at least one selected from the group consisting of sense single-stranded DNA (ssDNA), sense single-stranded RNA (ssRNA), double-stranded RNA (dsRNA), double-stranded DNA (dsDNA), a double-stranded DNA/RNA hybrid, anti-sense ssDNA, or anti-sense ssRNA; a mixture of polynucleotides of any of these types can be used.

[0070] In various embodiments the polynucleotide useful in compositions of this invention consists of naturally occurring nucleotides, such as those which occur in DNA and RNA. In certain embodiments, the polynucleotide is a combination of ribonucleotides and deoxyribonucleotides, for example, synthetic polynucleotides consisting mainly of ribonucleotides but with one or more terminal deoxyribonucleotides or synthetic polynucleotides consisting mainly of deoxyribonucleotides but with one or more terminal dideoxyribonucleotides. In certain embodiments, the polynucleotide includes non-canonical nucleotides such as inosine, thiouridine, or pseudouridine. In certain embodiments, the polynucleotide includes chemically modified nucleotides. Examples of chemically modified oligonucleotides or polynucleotides are well known in the art; see, for example, U.S. Patent Publication 2011/0171287, U.S. Patent Publication 2011/0171176, U.S. Patent Publication 2011/0152353, U.S. Patent Publication 2011/0152346, and U.S. Patent Publication 2011/0160082, which are herein incorporated by reference. Illustrative examples include, but are not limited to, the naturally occurring phosphodiester backbone of an oligonucleotide or polynucleotide which can be partially or completely modified with phosphorothioate, phosphorodithioate, or methylphosphonate internucleotide linkage modifications, modified nucleoside bases or modified sugars can be used in oligonucleotide or polynucleotide synthesis, and oligonucleotides or polynucleotides can be labeled with a fluorescent moiety (e. g., fluorescein or rhodamine) or other label (e. g., biotin).

[0071] The polynucleotide useful in compositions of this invention is provided by suitable means known to one in the art. Embodiments include those wherein the polynucleotide is chemically synthesized (e. g., by in vitro transcription, such as transcription using a T7 polymerase or other polymerase), produced by expression in a microorganism or in cell culture (such as plant or insect cells grown in culture), produced by expression in a plant cell, or produced by microbial fermentation.

[0072] In many embodiments the polynucleotide useful in compositions of this invention is provided as an isolated DNA or RNA fragment (not part of an expression construct, i. e., lacking additional elements such as a promoter or terminator sequences). Such polynucleotides can be relatively short, such as single- or double-stranded polynucleotides of between about 18 to about 200 or about 300 nucleotides (for single-stranded polynucleotides) or between about 18 to about 200 or about 300 base-pairs (for double-stranded polynucleotides). Alternatively the polynucleotide can be provided in more complex constructs, e. g., as part of a recombinant expression construct, or included in a recombinant vector, for example in a recombinant plant virus vector or in a recombinant baculovirus vector. Such recombinant expression constructs or vectors can be designed to include additional elements, such as expression cassettes for expressing a gene of interest (e. g., an insecticidal protein).

[0073] The polynucleotide useful in compositions of this invention (i. e., the polynucleotide of this invention that is topically applied to the plant) has at least one segment of 18 or more contiguous nucleotides with a sequence of about 95% to about 100% identity with a segment of equivalent length of a DNA having a sequence selected from the group consisting of SEQ ID NOs:1-15624 or the DNA complement thereof. In an embodiment the polynucleotide that is topically applied to the plant includes at least 18 contiguous nucleotides that are essentially identical or complementary to a segment of equivalent length of a DNA having a sequence selected from the group consisting of SEQ ID NOs:1-15624. In some embodiments, the contiguous nucleotides have a sequence of about 95%, about 96%, about 97%, about 98%, about 99%, or about 100% identity with the segment of equivalent length of a DNA having a sequence selected from the group consisting of SEQ ID NOs:1-15624 or the DNA complement thereof. In some embodiments the contiguous nucleotides are exactly (100%) identical to a segment of equivalent length of a DNA having a sequence selected from the group consisting of SEQ ID NOs:1-15624 or the DNA complement thereof. In some embodiments, the polynucleotide has an overall sequence of about 95%, about 96%, about 97%, about 98%, about 99%, or about 100% identity with a segment of a DNA having a sequence selected from the group consisting of SEQ ID NOs:1-15624 or the DNA complement thereof.

[0074] The polynucleotide useful in compositions of this invention (i. e., the polynucleotide of this invention that is topically applied to the plant) includes at least 18 contiguous nucleotides with a sequence of about 95% to about 100% identity with a segment of equivalent length of a DNA having a sequence selected from the group consisting of SEQ ID NOs:1-15624 or the DNA complement thereof. The contiguous nucleotides number at least 18, e. g., between 18-24, or between 18-28, or between 20-30, or between 20-50, or between 20-100, or between 50-100, or between 100-250, or between 100-500, or between 200-1000, or between 500-2000, or even greater, for example, up to the entire length of an open reading frame or up to the entire length of a gene or nucleotide sequence to be suppressed. The contiguous nucleotides can number more than 18, e. g., 19, 20, 21, 22, 23, 24, 25, 26, 27, 28, 29, 30, or greater than 30, e. g., about 35, about 40, about 45, about 50, about 55, about 60, about 65, about 70, about 75, about 80, about 85, about 90, about 95, about 100, about 110, about 120, about 130, about 140, about 150, about 160, about 170, about 180, about 190, about 200, about 210, about 220, about 230, about 240, about 250, about 260, about 270, about 280, about 290, about 300, or greater than 300.

[0075] The topically applied polynucleotide is generally designed to suppress one or more genes (“target genes”). Such target genes can include coding or non-coding sequence or both. In specific embodiments, the polynucleotide is designed to suppress one or more target genes, where each target gene has a DNA sequence selected from the group consisting of SEQ ID NOs:1-15624. In various embodiments, the topically applied polynucleotide is designed to suppress one or more genes, where each gene has a sequence selected from the group consisting of SEQ ID NOs:1-15624, and can be designed to suppress multiple genes from this group, or to target different regions of one or more of these genes. In an embodiment, the topically applied polynucleotide includes multiple sections or segments each of which includes at least 18 contiguous nucleotides with a sequence of about 95% to about 100% identity with a segment of equivalent length of a DNA having a sequence selected from the group consisting of SEQ ID NOs:1-15624 or the DNA complement thereof. In such cases, each section can be identical or different in size or in sequence, and can be sense or anti-sense relative to the target gene. For example, in one embodiment the topically applied polynucleotide can include multiple sections in tandem or repetitive arrangements, wherein each section includes at least 18 contiguous nucleotides with a sequence of about 95% to about 100% identity with a segment of equivalent length of a DNA having a sequence selected from the group consisting of SEQ ID NOs:1-15624 or the DNA complement thereof; “spacer” nucleotides which do not correspond to a target gene can optionally be used in between the sections.

[0076] The total length of the topically applied polynucleotide can be greater than 18 contiguous nucleotides, and can include nucleotides in addition to the contiguous nucleotides having the sequence of about 95% to about 100% identity with a segment of equivalent length of a DNA having a sequence selected from the group consisting of SEQ ID NOs:1-15624 or the DNA complement thereof. In other words, the total length of the topically applied polynucleotide can be greater than the length of the section or segment of the polynucleotide designed to suppress one or more target genes, where each target gene has a DNA sequence selected from the group consisting of SEQ ID NOs:1-15624. For example, the topically applied polynucleotide can have nucleotides flanking the “active” segment of at least 18 contiguous nucleotides that suppresses the target gene, or include “spacer” nucleotides between active segments, or can have additional nucleotides at the 5′ end, or at the 3′ end, or at both the 5′ and 3′ ends. In an embodiment, the topically applied polynucleotide can include additional nucleotides that provide stabilizing secondary structure.

[0077] In a related aspect, this invention is directed to the plant having improved resistance to a Diabrotica species infestation, provided by this method which includes topically applying to the plant a composition including at least one polynucleotide having at least one segment of 18 or more contiguous nucleotides with a sequence of about 95% to about 100% identity with a segment of equivalent length of a DNA having a sequence selected from the group consisting of SEQ ID NOs:1-15624 or the DNA complement thereof, whereby the plant treated with the polynucleotide composition exhibits improved resistance to a Diabrotica species infestation, relative to an untreated plant. In yet another aspect, this invention is directed to seed (especially transgenic progeny seed) produced by the plant having improved resistance to a Diabrotica species infestation, as provided by this method. Also contemplated is a commodity product produced by the plant having improved resistance to a Diabrotica species infestation, as provided by this method, and a commodity product produced from the transgenic progeny seed of such a plant.

### Compositions for Controlling Diabrotica Species

[0078] Another aspect of this invention provides a composition for controlling a Diabrotica species including at least one recombinant polynucleotide including at least 18 contiguous nucleotides that are essentially identical or complementary to a segment of equivalent length of a DNA having a sequence selected from the group consisting of SEQ ID NOs:1-15624. In an embodiment the recombinant polynucleotide has at least one segment of 18 or more contiguous nucleotides with a sequence of about 95% to about 100% identity with a segment of equivalent length of a DNA having a sequence selected from the group consisting of SEQ ID NOs:1-15624 or the DNA complement thereof. In this context “controlling” includes inducement of a physiological or behavioural change such as, but not limited to, growth stunting, increased mortality, decrease in reproductive capacity, decrease in or cessation of feeding behavior or movement, or decrease in or cessation of metamorphosis stage development.

[0079] In various embodiments, the composition for controlling a Diabrotica species is in the form of at least one selected from the group consisting of a solid, liquid (including homogeneous mixtures such as solutions and non-homogeneous mixtures such as suspensions, colloids, micelles, and emulsions), powder, suspension, emulsion, spray, encapsulated or micro-encapsulation formulation, in or on microbeads or other carrier particulates, in a film or coating, or on or within a matrix. Suitable binders, inert carriers, surfactants, and the like can be included in the composition for controlling a Diabrotica species, as is known to one skilled in formulation of pesticides and seed treatments. In embodiments, the composition for controlling a Diabrotica species further includes one or more components selected from the group consisting of a carrier agent, a surfactant, an organosilicone, a polynucleotide herbicidal molecule, a non-polynucleotide herbicidal molecule, a non-polynucleotide pesticide, a safener, and an insect growth regulator. In one embodiment the composition for controlling a Diabrotica species further includes a nonionic organosilicone surfactant such as Silwet, e. g., Silwet® L-77 surfactant having CAS Number 27306-78-1 and EPA Number: CAL.REG.NO. 5905-50073-AA, currently available from Momentive Performance Materials, Albany, N.Y. In embodiments, the composition for controlling a Diabrotica species further includes at least one pesticidal agent selected from the group consisting of a patatin, a plant lectin, a phytoecdysteroid, a phytoecdysteroid, a Bacillus thuringiensis insecticidal protein, a Xenorhabdus insecticidal protein, a Photorhabdus insecticidal protein, a Bacillus laterosporous insecticidal protein, and a Bacillus sphearicus insecticidal protein.

[0080] It is anticipated that the combination of certain recombinant polynucleotides of this invention (e. g., the polynucleotide triggers described in the working Examples) with one or more non-polynucleotide pesticidal agents will result in a synergetic improvement in prevention or control of Diabrotica species infestations, when compared to the effect obtained with the recombinant polynucleotide alone or the non-polynucleotide pesticidal agent alone. In an embodiment, a composition containing one or more recombinant polynucleotides of this invention and one or more non-polynucleotide pesticidal agent selected from the group consisting of a patatin, a plant lectin, a phytoecdysteroid, a Bacillus thuringiensis insecticidal protein, a Xenorhabdus insecticidal protein, a Photorhabdus insecticidal protein, a Bacillus laterosporous insecticidal protein, and a Bacillus sphearicus insecticidal protein, is found to effect synergistically improved prevention or control of Diabrotica species infestations.

[0081] The composition for controlling a Diabrotica species can be provided for dietary uptake by the Diabrotica species by applying the composition to a plant or surface subject to infestation by the Diabrotica species, for example by spraying, dusting, or coating the plant, or by application of a soil drench, or by providing in an artificial diet. The composition for controlling a Diabrotica species can be provided for dietary uptake by the Diabrotica species in an artificial diet formulated to meet the particular nutritional requirements for maintaining the Diabrotica species, wherein the artificial diet is supplemented with some amount of the recombinant polynucleotide obtained from a separate source such as chemical synthesis or purified from a microbial fermentation; this embodiment can be useful, e. g., for determining the timing and amounts of effective polynucleotide treatment regimes. In some embodiments the composition for controlling a Diabrotica species is provided for dietary uptake by the Diabrotica species in the form of a plant cell or in plant cell components, or in a microorganism (such as a bacterium or a yeast) or a microbial fermentation product, or in a synthetic diet. In one embodiment the composition for controlling a Diabrotica species is provided in the form of bait that is ingested by the Diabrotica species. The composition for controlling a Diabrotica species can be provided for dietary uptake by the Diabrotica species in the form of a seed treatment.

[0082] In various embodiments, the composition for controlling a Diabrotica species includes a microbial cell or is produced in a microorganism. For example, the composition for controlling a Diabrotica species can include or can be produced in bacteria or yeast cells. In similar embodiments the composition for controlling a Diabrotica species includes a transgenic plant cell or is produced in a plant cell (for example a plant cell transiently expressing the polynucleotide); such plant cells can be cells in an plant or cells grown in tissue culture or in cell suspension.

[0083] In various embodiments, the Diabrotica species to be controlled is at least one selected from the group consisting of Diabrotica balteata, Diabrotica barberi, Diabrotica beniensis, Diabrotica cristata, Diabrotica curvipustulata, Diabrotica dissimilis, Diabrotica elegantula, Diabrotica emorsitans, Diabrotica graminea, Diabrotica hispanolae, Diabrotica lemniscata, Diabrotica linsleyi, Diabrotica longicornis, Diabrotica milleri, Diabrotica nummularis, Diabrotica occlusa, Diabrotica porracea, Diabrotica scutellata, Diabrotica speciosa, Diabrotica tibialis, Diabrotica trifasciata, Diabrotica undecimpunctata, Diabrotica virgifera, and Diabrotica viridula. In specific embodiments, the Diabrotica species is at least one selected from the group consisting of Diabrotica virgifera virgifera (Western Corn Rootworm, WCR), Diabrotica undecimpunctata howardii (Southern Corn Rootworm, SCR), Diabrotica barberi (Northern Corn Rootworm, NCR), Diabrotica virgifera zeae (Mexican Corn Rootworm, MCR), Diabrotica balteata (Brazilian Corn Rootworm, BZR), or Brazilian Corn Rootworm complex (BCR) consisting of Diabrotica viridula and Diabrotica speciosa.

[0084] In some embodiments the Diabrotica species to be controlled infests a plant. Of particular interest are embodiments wherein the plant is a row crop plant or a vegetable crop plant. Examples include a plant selected from the group consisting of maize, cucumber, squash, soybeans, and dry beans. One row crop plant of interest is maize, and embodiments include those wherein the plant is an ungerminated maize seed, or a maize plant in a vegetative stage (from emergence to tasseling stage, i. e., VE, V1, V2, V3, . . . , V(n), VT), or a maize plant in a reproductive stage (R1, R2, R3, R4, R5, R6). One embodiment includes maize plants in a field of maize.

[0085] The recombinant polynucleotide useful in compositions of this invention can be single-stranded (ss) or double-stranded (ds). “Double-stranded” refers to the base-pairing that occurs between sufficiently complementary, anti-parallel nucleic acid strands to form a double-stranded nucleic acid structure, generally under physiologically relevant conditions. Embodiments of the method include those wherein the recombinant polynucleotide is at least one selected from the group consisting of sense single-stranded DNA (ssDNA), sense single-stranded RNA (ssRNA), double-stranded RNA (dsRNA), double-stranded DNA (dsDNA), a double-stranded DNA/RNA hybrid, anti-sense ssDNA, or anti-sense ssRNA; a mixture of polynucleotides of any of these types can be used.

[0086] The recombinant polynucleotide of the composition for controlling a Diabrotica species includes at least 18 contiguous nucleotides that are essentially identical or complementary to a segment of equivalent length of a DNA having a sequence selected from the group consisting of SEQ ID NOs:1-15624. In an embodiment the recombinant polynucleotide has at least one segment of 18 or more contiguous nucleotides with a sequence of about 95% to about 100% identity with a segment of equivalent length of a DNA having a sequence selected from the group consisting of SEQ ID NOs:1-15624 or the DNA complement thereof In some embodiments, the contiguous nucleotides have a sequence of about 95%, about 96%, about 97%, about 98%, about 99%, or about 100% identity with the segment of equivalent length of a DNA having a sequence selected from the group consisting of SEQ ID NOs:1-15624 or the DNA complement thereof. In some embodiments the contiguous nucleotides are exactly (100%) identical to a segment of equivalent length of a DNA having a sequence selected from the group consisting of SEQ ID NOs:1-15624 or the DNA complement thereof. In some embodiments, the polynucleotide has an overall sequence of about 95%, about 96%, about 97%, about 98%, about 99%, or about 100% identity with a segment of a DNA having a sequence selected from the group consisting of SEQ ID NOs:1-15624 or the DNA complement thereof.

[0087] Recombinant polynucleotides of use in the composition for controlling a Diabrotica species include at least 18 contiguous nucleotides with a sequence of about 95% to about 100% identity with a segment of equivalent length of a DNA having a sequence selected from the group consisting of SEQ ID NOs:1-15624 or the DNA complement thereof. The contiguous nucleotides number at least 18, e. g., between 18-24, or between 18-28, or between 20-30, or between 20-50, or between 20-100, or between 50-100, or between 100-250, or between 100-500, or between 200-1000, or between 500-2000, or even greater, for example, up to the entire length of an open reading frame or up to the entire length of a gene or nucleotide sequence to be suppressed. The contiguous nucleotides can number more than 18, e. g., 19, 20, 21, 22, 23, 24, 25, 26, 27, 28, 29, 30, or greater than 30, e. g., about 35, about 40, about 45, about 50, about 55, about 60, about 65, about 70, about 75, about 80, about 85, about 90, about 95, about 100, about 110, about 120, about 130, about 140, about 150, about 160, about 170, about 180, about 190, about 200, about 210, about 220, about 230, about 240, about 250, about 260, about 270, about 280, about 290, about 300, or greater than 300.

[0088] The recombinant polynucleotide is generally designed to suppress one or more genes (“target genes”). The term “gene” refers to any portion of a nucleic acid that provides for expression of a transcript or encodes a transcript. A “gene” thus includes, but is not limited to, a promoter region, 5′ untranslated regions, transcript encoding regions that can include intronic regions, and 3′ untranslated regions. Thus, the target genes can include coding or non-coding sequence or both. In specific embodiments, the polynucleotide is designed to suppress one or more target genes, where each target gene has a DNA sequence selected from the group consisting of SEQ ID NOs:1-15624. In various embodiments, the polynucleotide is designed to suppress one or more genes, where each gene has a sequence selected from the group consisting of SEQ ID NOs:1-15624, and can be designed to suppress multiple genes from this group, or to target different regions of one or more of these genes. In an embodiment, the polynucleotide includes multiple sections or segments each of which includes at least 18 contiguous nucleotides with a sequence of about 95% to about 100% identity with a segment of equivalent length of a DNA having a sequence selected from the group consisting of SEQ ID NOs:1-15624 or the DNA complement thereof. In such cases, each section can be identical or different in size or in sequence, and can be sense or anti-sense relative to the target gene. For example, in one embodiment the polynucleotide can include multiple sections in tandem or repetitive arrangements, wherein each section includes at least 18 contiguous nucleotides with a sequence of about 95% to about 100% identity with a segment of equivalent length of a DNA having a sequence selected from the group consisting of SEQ ID NOs:1-15624 or the DNA complement thereof; “spacer” nucleotides which do not correspond to a target gene can optionally be used in between the sections.

[0089] The total length of the recombinant polynucleotide useful in compositions of this invention can be greater than 18 contiguous nucleotides, and can include nucleotides in addition to the contiguous nucleotides having the sequence of about 95% to about 100% identity with a segment of equivalent length of a DNA having a sequence selected from the group consisting of SEQ ID NOs:1-15624 or the DNA complement thereof. In other words, the total length of the polynucleotide can be greater than the length of the section or segment of the polynucleotide designed to suppress one or more target genes, where each target gene has a DNA sequence selected from the group consisting of SEQ ID NOs:1-15624. For example, the polynucleotide can have nucleotides flanking the “active” segment of at least 18 contiguous nucleotides that suppresses the target gene, or include “spacer” nucleotides between active segments, or can have additional nucleotides at the 5′ end, or at the 3′ end, or at both the 5′ and 3′ ends. In an embodiment, the polynucleotide can include additional nucleotides that provide stabilizing secondary structure.

[0090] In various embodiments the recombinant polynucleotide useful in compositions of this invention consists of naturally occurring nucleotides, such as those which occur in DNA and RNA. In certain embodiments, the polynucleotide is a combination of ribonucleotides and deoxyribonucleotides, for example, synthetic polynucleotides consisting mainly of ribonucleotides but with one or more terminal deoxyribonucleotides or synthetic polynucleotides consisting mainly of deoxyribonucleotides but with one or more terminal dideoxyribonucleotides. In certain embodiments, the polynucleotide includes non-canonical nucleotides such as inosine, thiouridine, or pseudouridine. In certain embodiments, the polynucleotide includes chemically modified nucleotides. Examples of chemically modified oligonucleotides or polynucleotides are well known in the art; see, for example, U.S. Patent Publication 2011/0171287, U.S. Patent Publication 2011/0171176, U.S. Patent Publication 2011/0152353, U.S. Patent Publication 2011/0152346, and U.S. Patent Publication 2011/0160082, which are herein incorporated by reference. Illustrative examples include, but are not limited to, the naturally occurring phosphodiester backbone of an oligonucleotide or polynucleotide which can be partially or completely modified with phosphorothioate, phosphorodithioate, or methylphosphonate internucleotide linkage modifications, modified nucleoside bases or modified sugars can be used in oligonucleotide or polynucleotide synthesis, and oligonucleotides or polynucleotides can be labeled with a fluorescent moiety (e. g., fluorescein or rhodamine) or other label (e. g., biotin).

[0091] The recombinant polynucleotide useful in compositions of this invention is provided by suitable means known to one in the art. Embodiments include those wherein the polynucleotide is chemically synthesized (e. g., by in vitro transcription, such as transcription using a T7 polymerase or other polymerase), produced by expression in a microorganism or in cell culture (such as plant or insect cells grown in culture), produced by expression in a plant cell, or produced by microbial fermentation.

[0092] In many embodiments the recombinant polynucleotide is provided as an isolated DNA or RNA fragment (not part of an expression construct, i. e., lacking additional elements such as a promoter or terminator sequences). Such polynucleotides can be relatively short, such as single- or double-stranded polynucleotides of between about 18 to about 200 or about 300 nucleotides (for single-stranded polynucleotides) or between about 18 to about 200 or about 300 base-pairs (for double-stranded polynucleotides). Alternatively the polynucleotide can be provided in more complex constructs, e. g., as part of a recombinant expression construct, or included in a recombinant vector, for example in a recombinant plant virus vector or in a recombinant baculovirus vector. Such recombinant expression constructs or vectors can be designed to include additional elements, such as expression cassettes for expressing a gene of interest (e. g., an insecticidal protein).

### Methods of Providing Plants Having Improved Resistance to Diabrotica Species Infestations, and the Plants and Seeds Thus Provided

[0093] Another aspect of this invention provides a method of providing a plant having improved resistance to a Diabrotica species infestation including expressing in the plant at least one polynucleotide including at least 18 contiguous nucleotides that are essentially identical or complementary to a segment of equivalent length of a DNA having a sequence selected from the group consisting of SEQ ID NOs:1-15624, whereby the resulting plant has improved resistance to a Diabrotica species when compared to a control plant in which the polynucleotide is not expressed. In an embodiment the method includes expressing in the plant at least one polynucleotide including at least one segment of 18 or more contiguous nucleotides with a sequence of about 95% to about 100% identity with a segment of equivalent length of a DNA having a sequence selected from the group consisting of SEQ ID NOs:1-15624 or the DNA complement thereof. By “expressing a polynucleotide in the plant” is generally meant “expressing an RNA transcript in the plant”. However, the polynucleotide expressed in the plant can also be DNA, e. g., a DNA produced in the plant during genome replication.

[0094] The plant can be any plant that is subject to infestation by a Diabrotica species. Of particular interest are embodiments wherein the plant is a row crop plant or a vegetable crop plant. Examples include a plant selected from the group consisting of maize, cucumber, squash, soybeans, and dry beans. One row crop plant of interest is maize, and embodiments include those wherein the plant is an ungerminated maize seed, or a maize plant in a vegetative stage (from emergence to tasseling stage, i. e., VE, V1, V2, V3, . . . , V(n), VT), or a maize plant in a reproductive stage (R1, R2, R3, R4, R5, R6). One embodiment includes maize plants in a field of maize.

[0095] In various embodiments, the Diabrotica species is at least one selected from the group consisting of Diabrotica balteata, Diabrotica barberi, Diabrotica beniensis, Diabrotica cristata, Diabrotica curvipustulata, Diabrotica dissimilis, Diabrotica elegantula, Diabrotica emorsitans, Diabrotica graminea, Diabrotica hispanolae, Diabrotica lemniscata, Diabrotica linsleyi, Diabrotica longicornis, Diabrotica milleri, Diabrotica nummularis, Diabrotica occlusa, Diabrotica porracea, Diabrotica scutellata, Diabrotica speciosa, Diabrotica tibialis, Diabrotica trifasciata, Diabrotica undecimpunctata, Diabrotica virgifera, and Diabrotica viridula. In specific embodiments, the Diabrotica species is at least one selected from the group consisting of Diabrotica virgifera virgifera (Western Corn Rootworm, WCR), Diabrotica undecimpunctata howardii (Southern Corn Rootworm, SCR), Diabrotica barberi (Northern Corn Rootworm, NCR), Diabrotica virgifera zeae (Mexican Corn Rootworm, MCR), Diabrotica balteata (Brazilian Corn Rootworm, BZR), or Brazilian Corn Rootworm complex (BCR) consisting of Diabrotica viridula and Diabrotica speciosa.

[0096] The method includes expressing at least one polynucleotide in a plant. In many embodiments, a first polynucleotide can be provided to a plant in the form of DNA (e. g., in the form of an isolated DNA molecule, or as an expression construct, or as a transformation vector), and the polynucleotide expressed in the plant is a second polynucleotide (an RNA transcript) in the plant. In an embodiment, the polynucleotide is expressed in the plant by transgenic expression, i. e., by stably integrating the polynucleotide into the plant's genome from where it can be expressed in a cell or cells of the plant. In an embodiment, a first polynucleotide (e. g., a recombinant DNA construct including a promoter operably linked to DNA encoding an RNA silencing element for suppressing a target gene selected from the group consisting of the genes having a sequence selected from the group consisting of SEQ ID NOs:1-15624) is stably integrated into the plant's genome from where secondarily produced polynucleotides (e. g., an RNA transcript including the RNA silencing element for suppressing the target gene) can be expressed in a cell or cells of the plant. Methods of providing stably transformed plant are provided in the section headed “Making and Using Transgenic Plant Cells and Transgenic Plants”.

[0097] In another embodiment the polynucleotide of use in methods of this invention is expressed by transient expression. In such embodiments the method can include a step of introducing a polynucleotide into the plant by routine techniques known in the art. For example, transient expression can be accomplished by infiltration of a polynucleotide solution using a needle-less syringe into a leaf of a plant.

[0098] In some embodiments where the polynucleotide of use in methods of this invention is expressed by transient expression, a first polynucleotide is provided to a plant in the form of RNA or DNA or both RNA and DNA, and a secondarily produced second polynucleotide is transiently expressed in the plant. In embodiments, the first polynucleotide is one or more selected from: (a) a single-stranded RNA molecule (ssRNA), (b) a single-stranded RNA molecule that self-hybridizes to form a double-stranded RNA molecule, (c) a double-stranded RNA molecule (dsRNA), (d) a single-stranded DNA molecule (ssDNA), (e) a single-stranded DNA molecule that self-hybridizes to form a double-stranded DNA molecule, (f) a single-stranded DNA molecule including a modified Pol III gene that is transcribed to an RNA molecule, (g) a double-stranded DNA molecule (dsDNA), (h) a double-stranded DNA molecule including a modified Pol III gene that is transcribed to an RNA molecule, and (i) a double-stranded, hybridized RNA/DNA molecule, or combinations thereof. In embodiments, a first polynucleotide is introduced into the plant by topical application to the plant of a polynucleotide-containing composition in a suitable form, e. g., as a solid, liquid (including homogeneous mixtures such as solutions and non-homogeneous mixtures such as suspensions, colloids, micelles, and emulsions), powder, suspension, emulsion, spray, encapsulated or micro-encapsulation formulation, in or on microbeads or other carrier particulates, in a film or coating, or on or within a matrix. Topical application of the polynucleotide-containing composition to the plant can be in the form of a seed treatment. Suitable binders, inert carriers, surfactants, and the like can optionally be included in the composition, as is known to one skilled in formulation of pesticides and seed treatments. In embodiments, the polynucleotide-containing composition further includes one or more components selected from the group consisting of a carrier agent, a surfactant, an organosilicone, a polynucleotide herbicidal molecule, a non-polynucleotide herbicidal molecule, a non-polynucleotide pesticide, a safener, and an insect growth regulator. In one embodiment the composition further includes a nonionic organosilicone surfactant such as Silwet, e. g., Silwet® L-77 surfactant having CAS Number 27306-78-1 and EPA Number: CAL.REG.NO. 5905-50073-AA, currently available from Momentive Performance Materials, Albany, N.Y. In embodiments, the topically applied composition further includes at least one pesticidal agent selected from the group consisting of a patatin, a plant lectin, a phytoecdysteroid, a Bacillus thuringiensis insecticidal protein, a Xenorhabdus insecticidal protein, a Photorhabdus insecticidal protein, a Bacillus laterosporous insecticidal protein, and a Bacillus sphearicus insecticidal protein. Alternatively such additional components or pesticidal agents can be provided separately, e. g., by separate topical application or by transgenic expression in the plant. Alternatively the plant is topically treated with the polynucleotide-containing composition as well as with a separate (preceding, following, or concurrent) application of a substance that improves the efficacy of the polynucleotide-containing composition. For example, a plant can be sprayed with a first topical application of a solution containing a nonionic organosilicone surfactant such as Silwet, e. g., Silwet® L-77, followed by a second topical application of the polynucleotide-containing composition, or vice-versa.

[0099] It is anticipated that the combination of certain polynucleotides of this invention (e. g., the polynucleotide triggers described in the working Examples) with one or more non-polynucleotide pesticidal agents will result in a synergetic improvement in prevention or control of Diabrotica species infestations, when compared to the effect obtained with the polynucleotide alone or the non-polynucleotide pesticidal agent alone. In an embodiment, a transgenic plant expressing one or more polynucleotides of this invention and one or more genes encoding a non-polynucleotide pesticidal agent selected from the group consisting of a patatin, a plant lectin, a phytoecdysteroid, a Bacillus thuringiensis insecticidal protein, a Xenorhabdus insecticidal protein, a Photorhabdus insecticidal protein, a Bacillus laterosporous insecticidal protein, and a Bacillus sphearicus insecticidal protein, is found to exhibit synergistically improved resistance to Diabrotica species infestations.

[0100] In embodiments where the polynucleotide of use in methods of this invention is expressed by transient expression, a first polynucleotide is provided to a plant in the form of RNA or DNA or both RNA and DNA, and a secondarily produced second polynucleotide is transiently expressed in the plant; the site of application of the first polynucleotide need not be the same site where the second polynucleotide is transiently expressed. For example, a first polynucleotide can be provided to a plant by topical application onto a leaf, or by injection into a stem, and the second polynucleotide can be transiently expressed elsewhere in the plant, e. g., in the roots or throughout the plant. In some embodiments of the method, a composition including at least one polynucleotide is topically applied to above-ground parts of the plant, e. g., sprayed or dusted onto leaves, stems, and flowering parts of the plant. In other embodiments, a composition including at least one polynucleotide is topically applied to below-ground parts of the plant, such as to the roots, e. g., by means of a soil drench. In other embodiments, a composition including at least one polynucleotide is topically applied to a seed that is grown into the plant having improved resistance to a Diabrotica species infestation.

[0101] The polynucleotide of use in methods of this invention can be single-stranded (ss) or double-stranded (ds). “Double-stranded” refers to the base-pairing that occurs between sufficiently complementary, anti-parallel nucleic acid strands to form a double-stranded nucleic acid structure, generally under physiologically relevant conditions. Embodiments of the method include those wherein the polynucleotide is at least one selected from the group consisting of sense single-stranded DNA (ssDNA), sense single-stranded RNA (ssRNA), double-stranded RNA (dsRNA), double-stranded DNA (dsDNA), a double-stranded DNA/RNA hybrid, anti-sense ssDNA, or anti-sense ssRNA; a mixture of polynucleotides of any of these types can be used.

[0102] In some embodiments a first polynucleotide (DNA or RNA or both) is provided to a plant and a second polynucleotide having a sequence corresponding to the first polynucleotide is subsequently expressed in the plant. In such embodiments the polynucleotide expressed in the plant is an RNA transcript which can be ssRNA or dsRNA or both. In some embodiments where the polynucleotide is expressed by transient expression, a first polynucleotide is provided to a plant in the form of RNA or DNA or both RNA and DNA, and a secondarily produced second polynucleotide is transiently expressed in the plant. In embodiments, the first polynucleotide may be one or more of the following: (a) a single-stranded RNA molecule (ssRNA), (b) a single-stranded RNA molecule that self-hybridizes to form a double-stranded RNA molecule, (c) a double-stranded RNA molecule (dsRNA), (d) a single-stranded DNA molecule (ssDNA), (e) a single-stranded DNA molecule that self-hybridizes to form a double-stranded DNA molecule, (f) a single-stranded DNA molecule including a modified Pol III gene that is transcribed to an RNA molecule, (g) a double-stranded DNA molecule (dsDNA), (h) a double-stranded DNA molecule including a modified Pol III gene that is transcribed to an RNA molecule, and (i) a double-stranded, hybridized RNA/DNA molecule, or combinations thereof. In various embodiments the first polynucleotide consists of naturally occurring nucleotides, such as those which occur in DNA and RNA. In other embodiments the first polynucleotide is chemically modified, or includes chemically modified nucleotides. The first polynucleotide is provided by suitable means known to one in the art. Embodiments include those wherein the first polynucleotide is chemically synthesized (e. g., by in vitro transcription, such as transcription using a T7 polymerase or other polymerase), produced by expression in a microorganism or in cell culture (such as plant or insect cells grown in culture), produced by expression in a plant cell, or produced by microbial fermentation. The first polynucleotide can be provided as an RNA or DNA fragment. Alternatively the first polynucleotide can be provided in more complex constructs, e. g., as part of a recombinant expression construct, or included in a recombinant vector, for example in a recombinant plant virus vector or in a recombinant baculovirus vector; such recombinant expression constructs or vectors can be designed to include additional elements, such as expression cassettes for expressing a gene of interest (e. g., an insecticidal protein).

[0103] In many embodiments the polynucleotide expressed in the plant is an isolated RNA fragment and can be relatively short, such as single- or double-stranded RNAs of between about 18 to about 200 or about 300 nucleotides (for single-stranded RNAs) or between about 18 to about 200 or about 300 base-pairs (for double-stranded RNAs).

[0104] The polynucleotide expressed in the plant has at least one segment of 18 or more contiguous nucleotides with a sequence of about 95% to about 100% identity with a segment of equivalent length of a DNA having a sequence selected from the group consisting of SEQ ID NOs:1-15624 or the DNA complement thereof. In an embodiment the polynucleotide expressed in the plant includes at least 18 contiguous nucleotides that are essentially identical or complementary to a segment of equivalent length of a DNA having a sequence selected from the group consisting of SEQ ID NOs:1-15624. In some embodiments, the contiguous nucleotides have a sequence of about 95%, about 96%, about 97%, about 98%, about 99%, or about 100% identity with the segment of equivalent length of a DNA having a sequence selected from the group consisting of SEQ ID NOs:1-15624 or the DNA complement thereof. In some embodiments the contiguous nucleotides are exactly (100%) identical to a segment of equivalent length of a DNA having a sequence selected from the group consisting of SEQ ID NOs:1-15624 or the DNA complement thereof. In some embodiments, the polynucleotide has an overall sequence of about 95%, about 96%, about 97%, about 98%, about 99%, or about 100% identity with a segment of a DNA having a sequence selected from the group consisting of SEQ ID NOs:1-15624 or the DNA complement thereof.

[0105] The polynucleotide expressed in the plant includes at least 18 contiguous nucleotides with a sequence of about 95% to about 100% identity with a segment of equivalent length of a DNA having a sequence selected from the group consisting of SEQ ID NOs:1-15624 or the DNA complement thereof. The contiguous nucleotides number at least 18, e. g., between 18-24, or between 18-28, or between 20-30, or between 20-50, or between 20-100, or between 50-100, or between 100-250, or between 100-500, or between 200-1000, or between 500-2000, or even greater, for example, up to the entire length of an open reading frame or up to the entire length of a gene or nucleotide sequence to be suppressed. The contiguous nucleotides can number more than 18, e. g., 19, 20, 21, 22, 23, 24, 25, 26, 27, 28, 29, 30, or greater than 30, e. g., about 35, about 40, about 45, about 50, about 55, about 60, about 65, about 70, about 75, about 80, about 85, about 90, about 95, about 100, about 110, about 120, about 130, about 140, about 150, about 160, about 170, about 180, about 190, about 200, about 210, about 220, about 230, about 240, about 250, about 260, about 270, about 280, about 290, about 300, or greater than 300.

[0106] The polynucleotide expressed in the plant is generally designed to suppress one or more genes (“target genes”). Such target genes can include coding or non-coding sequence or both. In specific embodiments, the polynucleotide expressed in the plant is designed to suppress one or more target genes, where each target gene has a DNA sequence selected from the group consisting of SEQ ID NOs:1-15624. In various embodiments, the polynucleotide expressed in the plant is designed to suppress one or more genes, where each gene has a sequence selected from the group consisting of SEQ ID NOs:1-15624, and can be designed to suppress multiple genes from this group, or to target different regions of one or more of these genes. In an embodiment, the polynucleotide expressed in the plant includes multiple sections or segments each of which includes at least 18 contiguous nucleotides with a sequence of about 95% to about 100% identity with a segment of equivalent length of a DNA having a sequence selected from the group consisting of SEQ ID NOs:1-15624 or the DNA complement thereof. In such cases, each section can be identical or different in size or in sequence, and can be sense or anti-sense relative to the target gene. For example, in one embodiment the polynucleotide expressed in the plant can include multiple sections in tandem or repetitive arrangements, wherein each section includes at least 18 contiguous nucleotides with a sequence of about 95% to about 100% identity with a segment of equivalent length of a DNA having a sequence selected from the group consisting of SEQ ID NOs:1-15624 or the DNA complement thereof; “spacer” nucleotides which do not correspond to a target gene can optionally be used in between the sections.

[0107] The total length of the polynucleotide expressed in the plant can be greater than 18 contiguous nucleotides, and can include nucleotides in addition to the contiguous nucleotides having the sequence of about 95% to about 100% identity with a segment of equivalent length of a DNA having a sequence selected from the group consisting of SEQ ID NOs:1-15624 or the DNA complement thereof. In other words, the total length of the polynucleotide expressed in the plant can be greater than the length of the section or segment of the polynucleotide designed to suppress one or more target genes, where each target gene has a DNA sequence selected from the group consisting of SEQ ID NOs:1-15624. For example, the polynucleotide expressed in the plant can have nucleotides flanking the “active” segment of at least 18 contiguous nucleotides that suppresses the target gene, or include “spacer” nucleotides between active segments, or can have additional nucleotides at the 5′ end, or at the 3′ end, or at both the 5′ and 3′ ends. In an embodiment, the polynucleotide expressed in the plant can include additional nucleotides that provide stabilizing secondary structure.

[0108] In a related aspect, this invention is directed to the plant having improved resistance to a Diabrotica species infestation, provided by expressing in the plant at least one polynucleotide including at least 18 contiguous nucleotides that are essentially identical or complementary to a segment of equivalent length of a DNA having a sequence selected from the group consisting of SEQ ID NOs:1-15624, whereby the resulting plant has improved resistance to a Diabrotica species infestation when compared to a control plant in which the polynucleotide is not expressed. In a related aspect, this invention is directed to the plant having improved resistance to a Diabrotica species infestation, provided by expressing in the plant at least one polynucleotide including at least one segment of 18 or more contiguous nucleotides with a sequence of about 95% to about 100% identity with a segment of equivalent length of a DNA having a sequence selected from the group consisting of SEQ ID NOs:1-15624 or the DNA complement thereof, whereby the resulting plant has improved resistance to a Diabrotica species infestation when compared to a control plant in which the polynucleotide is not expressed. In yet another aspect, this invention is directed to seed (especially transgenic progeny seed) produced by the plant having improved resistance to a Diabrotica species infestation, as provided by this method. Also contemplated is a commodity product produced by the plant having improved resistance to a Diabrotica species infestation, as provided by this method, and a commodity product produced from the transgenic progeny seed of such a plant.

### Recombinant DNA Constructs for Controlling a Diabrotica Species

[0109] Another aspect of this invention provides a recombinant DNA construct including a heterologous promoter operably linked to DNA including at least one segment of 18 or more contiguous nucleotides with a sequence of about 95% to about 100% identity with a segment of equivalent length of a DNA having a sequence selected from the group consisting of SEQ ID NOs:1-15624 or the DNA complement thereof. The recombinant DNA constructs are useful in providing a plant having improved resistance to a Diabrotica species infestation, e. g., by expressing in a plant a transcript of such a recombinant DNA construct. The recombinant DNA constructs are also useful in the manufacture of polynucleotides useful in making compositions that can be applied to a plant or surface in need of protection from a Diabrotica species infestation.

[0110] The recombinant DNA construct of this invention includes a heterologous promoter operably linked to DNA including at least one segment of 18 or more contiguous nucleotides with a sequence of about 95% to about 100% identity with a segment of equivalent length of a DNA having a sequence selected from the group consisting of SEQ ID NOs:1-15624 or the DNA complement thereof. In some embodiments, the segment of 18 or more contiguous nucleotides has a sequence with about 95%, about 96%, about 97%, about 98%, about 99%, or about 100% identity with the segment of equivalent length of a DNA having a sequence selected from the group consisting of SEQ ID NOs:1-15624 or the DNA complement thereof. In some embodiments the contiguous nucleotides are exactly (100%) identical to a segment of equivalent length of a DNA having a sequence selected from the group consisting of SEQ ID NOs:1-15624 or the DNA complement thereof. In some embodiments, the DNA has an overall sequence of about 95%, about 96%, about 97%, about 98%, about 99%, or about 100% identity with a DNA having a sequence selected from the group consisting of SEQ ID NOs:1-15624 or the DNA complement thereof.

[0111] The recombinant DNA construct of this invention therefore includes a heterologous promoter operably linked to DNA including at least one segment of 18 or more contiguous nucleotides designed to suppress expression of a target gene having a sequence selected from the group consisting of SEQ ID NOs:1-15624 or the DNA complement thereof. The contiguous nucleotides of the segment number at least 18, e. g., between 18-24, or between 18-28, or between 20-30, or between 20-50, or between 20-100, or between 50-100, or between 100-250, or between 100-500, or between 200-1000, or between 500-2000, or even greater, for example, up to the entire length of an open reading frame or up to the entire length of a gene or nucleotide sequence to be suppressed. The contiguous nucleotides can number more than 18, e. g., 19, 20, 21, 22, 23, 24, 25, 26, 27, 28, 29, 30, or greater than 30, e. g., about 35, about 40, about 45, about 50, about 55, about 60, about 65, about 70, about 75, about 80, about 85, about 90, about 95, about 100, about 110, about 120, about 130, about 140, about 150, about 160, about 170, about 180, about 190, about 200, about 210, about 220, about 230, about 240, about 250, about 260, about 270, about 280, about 290, about 300, or greater than 300.

[0112] The recombinant DNA construct of this invention includes a heterologous promoter operably linked to DNA generally designed to suppress one or more genes (“target genes”). Such target genes can include coding or non-coding sequence or both. In specific embodiments, the recombinant DNA construct is designed to suppress one or more target genes, where each target gene has a DNA sequence selected from the group consisting of SEQ ID NOs:1-15624. In various embodiments, the recombinant DNA construct is designed to suppress one or more genes, where each gene has a sequence selected from the group consisting of SEQ ID NOs:1-15624, and can be designed to suppress multiple genes from this group, or to target different regions of one or more of these genes. In an embodiment, the recombinant DNA construct includes a heterologous promoter operably linked to multiple sections or segments each of which includes at least 18 contiguous nucleotides with a sequence of about 95% to about 100% identity with a segment of equivalent length of a DNA having a sequence selected from the group consisting of SEQ ID NOs:1-15624 or the DNA complement thereof. In such cases, each section can be identical or different in size or in sequence, and can be sense or anti-sense relative to the target gene. For example, in one embodiment the recombinant DNA construct can include a heterologous promoter operably linked to multiple sections in tandem or repetitive arrangements, wherein each section includes at least 18 contiguous nucleotides with a sequence of about 95% to about 100% identity with a segment of equivalent length of a DNA having a sequence selected from the group consisting of SEQ ID NOs:1-15624 or the DNA complement thereof; “spacer” nucleotides which do not correspond to a target gene can optionally be used in between the sections.

[0113] The recombinant DNA construct of this invention includes a heterologous promoter operably linked to DNA which can have a total length that is greater than 18 contiguous nucleotides, and can include nucleotides in addition to the segment of at least 18 contiguous nucleotides having the sequence of about 95% to about 100% identity with a segment of equivalent length of a DNA having a sequence selected from the group consisting of SEQ ID NOs:1-15624 or the DNA complement thereof. In other words, the total length of the DNA can be greater than the length of the segment of the DNA designed to suppress one or more target genes, where each target gene has a DNA sequence selected from the group consisting of SEQ ID NOs:1-15624. For example, the DNA can have nucleotides flanking the “active” segment of at least 18 contiguous nucleotides that suppresses the target gene, or include “spacer” nucleotides between active segments, or can have additional nucleotides at the 5′ end, or at the 3′ end, or at both the 5′ and 3′ ends. In an embodiment, the DNA can include or encode additional nucleotides that provide stabilizing secondary structure.

[0114] In recombinant DNA constructs of this invention, the heterologous promoter is operably linked to DNA that encodes a transcript that can be single-stranded (ss) or double-stranded (ds) or a combination of both. Embodiments of the method include those wherein the DNA encodes a transcript including sense single-stranded RNA (ssRNA), anti-sense ssRNA, or double-stranded RNA (dsRNA), or a combination of any of these.

[0115] The recombinant DNA construct of this invention is provided by suitable means known to one in the art. Embodiments include those wherein the recombinant DNA construct is synthesized in vitro, produced by expression in a microorganism or in cell culture (such as plant or insect cells grown in culture), produced by expression in a plant cell, or produced by microbial fermentation.

[0116] The heterologous promoter of use in recombinant DNA constructs of this invention is selected from the group consisting of a promoter functional in a plant, a promoter functional in a prokaryote, a promoter functional in a fungal cell, and a baculovirus promoter. Non-limiting examples of promoters are described in the section headed “Promoters”.

[0117] In some embodiments, the recombinant DNA construct of this invention includes a second promoter also operably linked to the DNA. For example, the DNA including at least one segment of 18 or more contiguous nucleotides can be flanked by two promoters arranged so that the promoters transcribe in opposite directions and in a convergent manner, yielding opposite-strand transcripts of the DNA that are complementary to and capable of hybridizing with each other to form double-stranded RNA. In one embodiment, the DNA is located between two root-specific promoters, which enable transcription of the DNA in opposite directions, resulting in the formation of dsRNA.

[0118] In some embodiments the recombinant DNA construct of this invention includes other DNA elements in addition to the heterologous promoter operably linked to DNA including at least one segment of 18 or more contiguous nucleotides with a sequence of about 95% to about 100% identity with a segment of equivalent length of a DNA having a sequence selected from the group consisting of SEQ ID NOs:1-15624 or the DNA complement thereof. Such DNA elements are known in the art, and include but are not limited to introns, recombinase recognition sites, aptamers or ribozymes, additional and additional expression cassettes for expressing coding sequences (e. g., to express a transgene such as an insecticidal protein or selectable marker) or non-coding sequences (e. g., to express additional suppression elements). Inclusion of one or more recognition sites for binding and cleavage by a small RNA (e. g., by a miRNA or an siRNA that is expressed only in a particular cell or tissue) allows for more precise expression patterns in a plant, wherein the expression of the recombinant DNA construct is suppressed where the small RNA is expressed.

[0119] In some embodiments, the recombinant DNA construct of this invention is provided in a recombinant vector. By “recombinant vector” is meant a recombinant polynucleotide molecule that is used to transfer genetic information from one cell to another. Embodiments suitable to this invention include, but are not limited to, recombinant plasmids, recombinant cosmids, artificial chromosomes, and recombinant viral vectors such as recombinant plant virus vectors and recombinant baculovirus vectors.

[0120] In some embodiments, the recombinant DNA construct of this invention is provided in a plant chromosome or plastid, e. g., in a transgenic plant cell or a transgenic plant. Thus, also encompassed by this invention is a transgenic plant cell having in its genome the recombinant DNA construct, as well as a transgenic plant or partially transgenic plant including such a transgenic plant cell. Partially transgenic plants include, e. g., a non-transgenic scion grafted onto a transgenic rootstock including the transgenic plant cell. In various embodiments the plant is a row crop plant or a vegetable crop plant. Of particular interest are embodiments wherein the plant is a row crop plant or a vegetable crop plant. Examples include a plant selected from the group consisting of maize, cucumber, squash, soybeans, and dry beans. One row crop plant of interest is maize, and embodiments include those wherein the plant is an ungerminated maize seed, or a maize plant in a vegetative stage (from emergence to tasseling stage, i. e., VE, V1, V2, V3, . . . , V(n), VT), or a maize plant in a reproductive stage (R1, R2, R3, R4, R5, R6). One embodiment includes maize plants in a field of maize. In yet another aspect, this invention is directed to seed (especially transgenic progeny seed) produced by the transgenic plant having in its genome a recombinant DNA construct of this invention. Also contemplated is a commodity product produced by such a transgenic plant, and a commodity product produced from the transgenic progeny seed of such a transgenic plant.

[0121] The recombinant DNA construct of this invention can be provided in a composition for topical application to a surface of a plant or of a plant seed, or for topical application to any substrate needing protection from a Diabrotica species infestation. Likewise, the recombinant DNA construct can be provided in a composition for topical application to a Diabrotica species, or in a composition for ingestion by a Diabrotica species. In various embodiments, such compositions containing the recombinant DNA construct are provided in the form of at least one selected from the group consisting of a solid, liquid (including homogeneous mixtures such as solutions and non-homogeneous mixtures such as suspensions, colloids, micelles, and emulsions), powder, suspension, emulsion, spray, encapsulated or micro-encapsulation formulation, in or on microbeads or other carrier particulates, in a film or coating, or on or within a matrix. Suitable binders, inert carriers, surfactants, and the like can be included in the composition containing the recombinant DNA construct, as is known to one skilled in formulation of pesticides and seed treatments. In embodiments, the composition containing the recombinant DNA construct further includes one or more components selected from the group consisting of a carrier agent, a surfactant, an organosilicone, a polynucleotide herbicidal molecule, a non-polynucleotide herbicidal molecule, a non-polynucleotide pesticide, a safener, and an insect growth regulator. In one embodiment the composition containing the recombinant DNA construct further includes a nonionic organosilicone surfactant such as Silwet, e. g., Silwet® L-77 surfactant having CAS Number 27306-78-1 and EPA Number: CAL.REG.NO. 5905-50073-AA, currently available from Momentive Performance Materials, Albany, N.Y. In embodiments, the composition containing the recombinant DNA construct further includes at least one pesticidal agent selected from the group consisting of a patatin, a plant lectin, a phytoecdysteroid, a phytoecdysteroid, a Bacillus thuringiensis insecticidal protein, a Xenorhabdus insecticidal protein, a Photorhabdus insecticidal protein, a Bacillus laterosporous insecticidal protein, and a Bacillus sphearicus insecticidal protein.

[0122] It is anticipated that the combination of certain recombinant DNA constructs of this invention (e. g., recombinant DNA constructs including the polynucleotide triggers described in the working Examples), whether transgenically expressed or topically applied, with one or more non-polynucleotide pesticidal agents, whether transgenically expressed or topically applied, will result in a synergetic improvement in prevention or control of Diabrotica species infestations, when compared to the effect obtained with the recombinant DNA constructs alone or the non-polynucleotide pesticidal agent alone. In an embodiment, a recombinant DNA construct for expressing one or more polynucleotides of this invention as well as one or more genes encoding a non-polynucleotide pesticidal agent selected from the group consisting of a patatin, a plant lectin, a phytoecdysteroid, a Bacillus thuringiensis insecticidal protein, a Xenorhabdus insecticidal protein, a Photorhabdus insecticidal protein, a Bacillus laterosporous insecticidal protein, and a Bacillus sphearicus insecticidal protein, is found to provide synergistically improved resistance to Diabrotica species infestations in plants expressing the recombinant DNA construct.

[0123] The composition containing the recombinant DNA construct of this invention can be provided for dietary uptake by a Diabrotica species by applying the composition to a plant or surface subject to infestation by the Diabrotica species, for example by spraying, dusting, or coating the plant, or by application of a soil drench, or by providing in an artificial diet. The composition containing the recombinant DNA construct can be provided for dietary uptake by a Diabrotica species in an artificial diet formulated to meet the particular nutritional requirements for maintaining the Diabrotica species, wherein the artificial diet is supplemented with some amount of the recombinant DNA construct obtained from a separate source such as in vitro synthesis or purified from a microbial fermentation or other biological source; this embodiment can be useful, e. g., for determining the timing and amounts of effective treatment regimes. In some embodiments the composition containing the recombinant DNA construct is provided for dietary uptake by the Diabrotica species in the form of a plant cell or in plant cell components, or in a microorganism (such as a bacterium or a yeast) or a microbial fermentation product, or in a synthetic diet. In one embodiment the composition containing the recombinant DNA construct is provided in the form of bait that is ingested by the Diabrotica species. The composition containing the recombinant DNA construct can be provided for dietary uptake by the Diabrotica species in the form of a seed treatment.

[0124] In various embodiments, the composition containing the recombinant DNA construct of this invention includes a microbial cell or is produced in a microorganism. For example, the composition for containing the recombinant DNA construct can include or can be produced in bacteria or yeast cells. In similar embodiments the composition containing the recombinant DNA construct includes a transgenic plant cell or is produced in a plant cell (for example a plant cell transiently expressing the polynucleotide); such plant cells can be cells in an plant or cells grown in tissue culture or in cell suspension.

[0125] The recombinant DNA construct of this invention is particularly useful for making plants having improved resistance to a Diabrotica infestation as well as for making compositions for controlling a Diabrotica species. In various embodiments, the Diabrotica species to be controlled is at least one selected from the group consisting of Diabrotica balteata, Diabrotica barberi, Diabrotica beniensis, Diabrotica cristata, Diabrotica curvipustulata, Diabrotica dissimilis, Diabrotica elegantula, Diabrotica emorsitans, Diabrotica graminea, Diabrotica hispanolae, Diabrotica lemniscata, Diabrotica linsleyi, Diabrotica longicornis, Diabrotica milleri, Diabrotica nummularis, Diabrotica occlusa, Diabrotica porracea, Diabrotica scutellata, Diabrotica speciosa, Diabrotica tibialis, Diabrotica trifasciata, Diabrotica undecimpunctata, Diabrotica virgifera, and Diabrotica viridula. In specific embodiments, the Diabrotica species is at least one selected from the group consisting of Diabrotica virgifera virgifera (Western Corn Rootworm, WCR), Diabrotica undecimpunctata howardii (Southern Corn Rootworm, SCR), Diabrotica barberi (Northern Corn Rootworm, NCR), Diabrotica virgifera zeae (Mexican Corn Rootworm, MCR), Diabrotica balteata (Brazilian Corn Rootworm, BZR), or Brazilian Corn Rootworm complex (BCR) consisting of Diabrotica viridula and Diabrotica speciosa.

### Transgenic Maize Plant Cells

[0126] Another aspect of this invention provides a plant cell expressing any of the recombinant DNA constructs of this invention. Such plant cells include, for example: a transgenic maize plant cell expressing a polynucleotide comprising at least 18 contiguous nucleotides with a sequence of about 95% to about 100% identity with a segment of equivalent length of a DNA having a sequence selected from the group consisting of SEQ ID NOs:1-15624 or the DNA complement thereof; a transgenic maize plant cell expressing a polynucleotide having at least one segment of 18 or more contiguous nucleotides with a sequence of about 95% to about 100% identity with a segment of equivalent length of a DNA having a sequence selected from the group consisting of SEQ ID NOs:1-15624 or the DNA complement thereof; a transgenic maize plant cell expressing a recombinant RNA comprising at least one silencing element essentially identical or essentially complementary to a target gene of said Diabrotica species larvae, wherein said target gene sequence is selected from the group consisting of SEQ ID NOs:1-15624 or the complement thereof; a transgenic maize plant cell expressing a polynucleotide comprising at least 18 contiguous nucleotides that are essentially identical or complementary to a segment of equivalent length of a DNA having a sequence selected from the group consisting of SEQ ID NOs:1-15624; a transgenic maize plant cell expressing a recombinant DNA construct comprising a heterologous promoter operably linked to DNA comprising at least one segment of 18 or more contiguous nucleotides with a sequence of about 95% to about 100% identity with a segment of equivalent length of a DNA having a sequence selected from the group consisting of SEQ ID NOs:1-15624 or the DNA complement thereof; a transgenic maize plant cell expressing a recombinant DNA encoding RNA that suppresses expression of a target gene in a Diabrotica species that contacts or ingests said RNA, wherein said RNA comprises at least one silencing element complementary to said target gene, and wherein said target gene sequence is selected from the group consisting of SEQ ID NOs:1-15624 or the complement thereof; or a transgenic maize plant cell expressing a recombinant RNA molecule comprises at least 18 contiguous nucleotides that are essentially complementary to a segment of equivalent length of a DNA having a sequence selected from the group consisting of SEQ ID NOs:1-15624 or the DNA complement thereof. Such plant cells are useful in providing a plant having improved resistance to a Diabrotica species infestation when compared to a control plant lacking such plant cells. The plant cell can be an isolated plant cell, or a plant cell grown in culture, or a cell of any plant that is subject to infestation by a Diabrotica species. Of particular interest are embodiments wherein the plant cell is a cell of a row crop plant or a vegetable crop plant. Examples include a plant cell selected from the group consisting cells of maize, cucumber, squash, soybeans, and dry beans. Of particular interest is a cell of maize plants, and embodiments include those wherein the plant cell is a cell of an ungerminated maize seed, or of a maize plant in a vegetative stage (from emergence to tasseling stage, i. e., VE, V1, V2, V3, . . . , V(n), VT), or of a maize plant in a reproductive stage (R1, R2, R3, R4, R5, R6). One embodiment includes cells of maize plants in a field of maize.

[0127] In an embodiment, the recombinant DNA is stably integrated into the plant's genome from where it can be expressed in a cell or cells of the plant according to this invention. Methods of providing stably transformed plants are provided in the section headed “Making and Using Transgenic Plant Cells and Transgenic Plants”. Thus, one specific aspect of this invention provides a transgenic maize plant cell having in its genome a recombinant DNA encoding RNA that suppresses expression of a target gene in a Diabrotica species that contacts or ingests the RNA, wherein the RNA includes at least one silencing element complementary to the target gene, and wherein the target gene sequence is selected from the group consisting of SEQ ID NOs:1-15624 or the complement thereof. Such transgenic maize plant cells are useful in providing a maize plant having improved resistance to a Diabrotica species infestation when compared to a control maize plant lacking such transgenic maize plant cells.

[0128] Where embodiments where the plant cell of this invention is used in providing a plant exhibiting improved resistance to a Diabrotica species, the Diabrotica species is at least one selected from the group consisting of Diabrotica balteata, Diabrotica barberi, Diabrotica beniensis, Diabrotica cristata, Diabrotica curvipustulata, Diabrotica dissimilis, Diabrotica elegantula, Diabrotica emorsitans, Diabrotica graminea, Diabrotica hispanolae, Diabrotica lemniscata, Diabrotica linsleyi, Diabrotica longicornis, Diabrotica milleri, Diabrotica nummularis, Diabrotica occlusa, Diabrotica porracea, Diabrotica scutellata, Diabrotica speciosa, Diabrotica tibialis, Diabrotica trifasciata, Diabrotica undecimpunctata, Diabrotica virgifera, and Diabrotica viridula. In specific embodiments, the Diabrotica species is at least one selected from the group consisting of Diabrotica virgifera virgifera (Western Corn Rootworm, WCR), Diabrotica undecimpunctata howardii (Southern Corn Rootworm, SCR), Diabrotica barberi (Northern Corn Rootworm, NCR), Diabrotica virgifera zeae (Mexican Corn Rootworm, MCR), Diabrotica balteata (Brazilian Corn Rootworm, BZR), or Brazilian Corn Rootworm complex (BCR) consisting of Diabrotica viridula and Diabrotica speciosa.

[0129] One specific aspect of this invention provides a transgenic maize plant cell having in its genome a recombinant DNA encoding RNA that suppresses expression of a target gene in a Diabrotica species that contacts or ingests the RNA, wherein the RNA includes at least one silencing element complementary to the target gene, and wherein the target gene sequence is selected from the group consisting of SEQ ID NOs:1-15624 or the complement thereof. In embodiments, the RNA element includes at least 18 contiguous nucleotides with a sequence of about 95% to about 100% identity with a segment of equivalent length of a DNA having a sequence selected from the group consisting of SEQ ID NOs:1-15624 or the DNA complement thereof. In embodiments, the RNA element includes at least 18 contiguous nucleotides capable of hybridizing in vivo or of hybridizing under physiological conditions (e. g., such as physiological conditions normally found in the cells of a Diabrotica species) to a segment of equivalent length of a DNA having a sequence selected from the group consisting of SEQ ID NOs:1-15624.

[0130] The RNA element useful in plant cells of this invention can include sense single-stranded RNA (ssRNA) or anti-sense ssRNA (where “sense” and “anti-sense” is in reference to the coding sequences of a target gene such as those with a sequence selected from the group consisting of SEQ ID NOs:1-15624), or can include double-stranded RNA (dsRNA) or any combination of these.

[0131] The RNA element useful in plant cells of this invention includes at least 18 contiguous nucleotides with a sequence of about 95% to about 100% identity with a segment of equivalent length of a DNA having a sequence selected from the group consisting of SEQ ID NOs:1-15624 or the DNA complement thereof. The contiguous nucleotides number at least 18, e. g., between 18-24, or between 18-28, or between 20-30, or between 20-50, or between 20-100, or between 50-100, or between 100-250, or between 100-500, or between 200-1000, or between 500-2000, or even greater, for example, up to the entire length of an open reading frame or up to the entire length of a gene or nucleotide sequence to be suppressed. The contiguous nucleotides can number more than 18, e. g., 19, 20, 21, 22, 23, 24, 25, 26, 27, 28, 29, 30, or greater than 30, e. g., about 35, about 40, about 45, about 50, about 55, about 60, about 65, about 70, about 75, about 80, about 85, about 90, about 95, about 100, about 110, about 120, about 130, about 140, about 150, about 160, about 170, about 180, about 190, about 200, about 210, about 220, about 230, about 240, about 250, about 260, about 270, about 280, about 290, about 300, or greater than 300.

[0132] The RNA element useful in plant cells of this invention is generally designed to suppress one or more genes (“target genes”). Such target genes can include coding or non-coding sequence or both. In specific embodiments, the RNA element is designed to suppress one or more target genes, where each target gene has a DNA sequence selected from the group consisting of SEQ ID NOs:1-15624. In various embodiments, the RNA element is designed to suppress one or more genes, where each gene has a sequence selected from the group consisting of SEQ ID NOs:1-15624, and can be designed to suppress multiple genes from this group, or to target different regions of one or more of these genes. In an embodiment, the RNA element includes multiple sections or segments each of which includes at least 18 contiguous nucleotides with a sequence of about 95% to about 100% identity with a segment of equivalent length of a DNA having a sequence selected from the group consisting of SEQ ID NOs:1-15624 or the DNA complement thereof. In such cases, each section can be identical or different in size or in sequence, and can be sense or anti-sense relative to the target gene. For example, in one embodiment the RNA element can include multiple sections in tandem or repetitive arrangements, wherein each section includes at least 18 contiguous nucleotides with a sequence of about 95% to about 100% identity with a segment of equivalent length of a DNA having a sequence selected from the group consisting of SEQ ID NOs:1-15624 or the DNA complement thereof; “spacer” nucleotides which do not correspond to a target gene can optionally be used in between the sections.

[0133] The total length of the transcript of the recombinant DNA construct useful in plant cells of this invention can be greater than 18 contiguous nucleotides, and can include nucleotides in addition to the RNA element having the sequence of about 95% to about 100% identity with a segment of equivalent length of a DNA having a sequence selected from the group consisting of SEQ ID NOs:1-15624 or the DNA complement thereof. In other words, the total length of the transcript of the recombinant DNA construct can be greater than the length of the RNA element designed to suppress one or more target genes, where each target gene has a DNA sequence selected from the group consisting of SEQ ID NOs:1-15624. For example, the transcript of the recombinant DNA construct can have nucleotides flanking the “active” RNA element of at least 18 contiguous nucleotides that suppresses the target gene, or include “spacer” nucleotides between active segments, or can have additional nucleotides at the 5′ end, or at the 3′ end, or at both the 5′ and 3′ ends. In an embodiment, the transcript of the recombinant DNA construct can include additional nucleotides that provide stabilizing secondary structure.

[0134] The transcript of the recombinant DNA construct useful in plant cells of this invention has at least one RNA element of 18 or more contiguous nucleotides with a sequence of about 95% to about 100% identity with a segment of equivalent length of a DNA having a sequence selected from the group consisting of SEQ ID NOs:1-15624 or the DNA complement thereof. In an embodiment the RNA element includes at least 18 contiguous nucleotides that are essentially identical or complementary to a segment of equivalent length of a DNA having a sequence selected from the group consisting of SEQ ID NOs:1-15624. In some embodiments, the contiguous nucleotides have a sequence of about 95%, about 96%, about 97%, about 98%, about 99%, or about 100% identity with the segment of equivalent length of a DNA having a sequence selected from the group consisting of SEQ ID NOs:1-15624 or the DNA complement thereof. In some embodiments the contiguous nucleotides are exactly (100%) identical to a segment of equivalent length of a DNA having a sequence selected from the group consisting of SEQ ID NOs:1-15624 or the DNA complement thereof. In some embodiments, the RNA element has an overall sequence of about 95%, about 96%, about 97%, about 98%, about 99%, or about 100% identity with a segment of a DNA having a sequence selected from the group consisting of SEQ ID NOs:1-15624 or the DNA complement thereof.

[0135] In embodiments, the plant cell is further capable expressing additional heterologous DNA sequences. For example, a transgenic maize plant cell can have a genome that further includes recombinant DNA encoding at least one pesticidal agent selected from the group consisting of a patatin, a plant lectin, a phytoecdysteroid, a phytoecdysteroid, a Bacillus thuringiensis insecticidal protein, a Xenorhabdus insecticidal protein, a Photorhabdus insecticidal protein, a Bacillus laterosporous insecticidal protein, and a Bacillus sphearicus insecticidal protein.

[0136] In a related aspect, this invention is directed to a plant having improved resistance to a Diabrotica species infestation, such as a transgenic maize plant including a transgenic maize plant cell expressing a recombinant DNA construct encoding an RNA element for suppressing one or more target genes with a sequence selected from the group consisting of SEQ ID NOs:1-15624. In yet another aspect, this invention is directed to seed (especially transgenic progeny seed) produced by the transgenic maize plant having improved resistance to a Diabrotica species infestation, as provided by this method. Also contemplated is a commodity product produced by the transgenic maize plant having improved resistance to a Diabrotica species infestation, as provided by this method, and a commodity product produced from the transgenic progeny seed of such a transgenic maize plant.

### Recombinant RNA Molecules for Controlling Diabrotica Species

[0137] Another aspect of this invention provides a recombinant RNA molecule that causes mortality or stunting of growth in a Diabrotica species when ingested or contacted by the Diabrotica species, wherein the recombinant RNA molecule includes at least 18 contiguous nucleotides that are essentially complementary to a segment of equivalent length of a DNA having a sequence selected from the group consisting of SEQ ID NOs:1-15624 or the DNA complement thereof. In one embodiment the recombinant RNA molecule includes at least one segment of 18 or more contiguous nucleotides with a sequence of about 95% to about 100% identity with a segment of equivalent length of a DNA having a sequence selected from the group consisting of SEQ ID NOs:1-15624 or the DNA complement thereof. In this context “controlling” includes inducement of a physiological or behavioural change such as, but not limited to, growth stunting, increased mortality, decrease in reproductive capacity, decrease in or cessation of feeding behavior or movement, or decrease in or cessation of metamorphosis stage development. Generally the recombinant RNA molecule has been isolated, that is, substantially purified from a mixture such as from a fermentation or from an in vitro synthesis mixture. Such a purified recombinant RNA molecule can of course be combined with other components to form compositions wherein the recombinant RNA molecule is an active agent, or can be combined with other nucleic acid elements, e. g., in a chimeric RNA molecule.

[0138] The recombinant RNA molecule of this invention is useful in the manufacture of compositions that can be applied to a plant or other surface in need of protection from a Diabrotica species infestation. The recombinant RNA molecule is useful in the manufacture of compositions for controlling a Diabrotica species that contacts or ingests such a composition. In various embodiments, the Diabrotica species to be controlled is at least one selected from the group consisting of Diabrotica balteata, Diabrotica barberi, Diabrotica beniensis, Diabrotica cristata, Diabrotica curvipustulata, Diabrotica dissimilis, Diabrotica elegantula, Diabrotica emorsitans, Diabrotica graminea, Diabrotica hispanolae, Diabrotica lemniscata, Diabrotica linsleyi, Diabrotica longicornis, Diabrotica milleri, Diabrotica nummularis, Diabrotica occlusa, Diabrotica porracea, Diabrotica scutellata, Diabrotica speciosa, Diabrotica tibialis, Diabrotica trifasciata, Diabrotica undecimpunctata, Diabrotica virgifera, and Diabrotica viridula. In specific embodiments, the Diabrotica species is at least one selected from the group consisting of Diabrotica virgifera virgifera (Western Corn Rootworm, WCR), Diabrotica undecimpunctata howardii (Southern Corn Rootworm, SCR), Diabrotica barberi (Northern Corn Rootworm, NCR), Diabrotica virgifera zeae (Mexican Corn Rootworm, MCR), Diabrotica balteata (Brazilian Corn Rootworm, BZR), or Brazilian Corn Rootworm complex (BCR) consisting of Diabrotica viridula and Diabrotica speciosa.

[0139] Embodiments of the recombinant RNA molecule of this invention include at least one segment of 18 or more contiguous nucleotides with a sequence of about 95% to about 100% identity with a segment of equivalent length of a DNA having a sequence selected from the group consisting of SEQ ID NOs:1-15624 or the DNA complement thereof. In some embodiments, the segment of 18 or more contiguous nucleotides has a sequence with about 95%, about 96%, about 97%, about 98%, about 99%, or about 100% identity with the segment of equivalent length of a DNA having a sequence selected from the group consisting of SEQ ID NOs:1-15624 or the DNA complement thereof. In some embodiments the contiguous nucleotides are exactly (100%) identical to a segment of equivalent length of a DNA having a sequence selected from the group consisting of SEQ ID NOs:1-15624 or the DNA complement thereof. In some embodiments, the DNA has an overall sequence of about 95%, about 96%, about 97%, about 98%, about 99%, or about 100% identity with a DNA having a sequence selected from the group consisting of SEQ ID NOs:1-15624 or the DNA complement thereof.

[0140] Embodiments of the recombinant RNA molecule of this invention include at least one segment of 18 or more contiguous nucleotides designed to suppress expression of a target gene having a sequence selected from the group consisting of SEQ ID NOs:1-15624 or the DNA complement thereof. The contiguous nucleotides of the segment number at least 18, e. g., between 18-24, or between 18-28, or between 20-30, or between 20-50, or between 20-100, or between 50-100, or between 100-250, or between 100-500, or between 200-1000, or between 500-2000, or even greater, for example, up to the entire length of an open reading frame or up to the entire length of a gene or nucleotide sequence to be suppressed. The contiguous nucleotides can number more than 18, e. g., 19, 20, 21, 22, 23, 24, 25, 26, 27, 28, 29, 30, or greater than 30, e. g., about 35, about 40, about 45, about 50, about 55, about 60, about 65, about 70, about 75, about 80, about 85, about 90, about 95, about 100, about 110, about 120, about 130, about 140, about 150, about 160, about 170, about 180, about 190, about 200, about 210, about 220, about 230, about 240, about 250, about 260, about 270, about 280, about 290, about 300, or greater than 300.

[0141] The recombinant RNA molecule of this invention is generally designed to suppress one or more genes (“target genes”). Such target genes can include coding or non-coding sequence or both. In specific embodiments, the recombinant RNA molecule is designed to suppress one or more target genes, where each target gene has a DNA sequence selected from the group consisting of SEQ ID NOs:1-15624. In various embodiments, the recombinant RNA molecule is designed to suppress one or more genes, where each gene has a sequence selected from the group consisting of SEQ ID NOs:1-15624, and can be designed to suppress multiple genes from this group, or to target different regions of one or more of these genes. Embodiments of the recombinant RNA molecule include at least one segment of 18 or more contiguous nucleotides having a sequence designed to suppress one or more genes, where each gene has a sequence selected from the group consisting of SEQ ID NOs:1-15624. In an embodiment, the recombinant RNA molecule includes multiple sections or segments each of which includes at least 18 contiguous nucleotides with a sequence of about 95% to about 100% identity with a segment of equivalent length of a DNA having a sequence selected from the group consisting of SEQ ID NOs:1-15624 or the DNA complement thereof. In such cases, each section can be identical or different in size or in sequence, and can be sense or anti-sense relative to the target gene. For example, in one embodiment the recombinant RNA molecule includes multiple sections in tandem or repetitive arrangements, wherein each section includes at least 18 contiguous nucleotides with a sequence of about 95% to about 100% identity with a segment of equivalent length of a DNA having a sequence selected from the group consisting of SEQ ID NOs:1-15624 or the DNA complement thereof; “spacer” nucleotides which do not correspond to a target gene can optionally be used in between the sections.

[0142] The recombinant RNA molecule of this invention can have a total length that is greater than 18 contiguous nucleotides, and can include nucleotides in addition to the segment of at least 18 contiguous nucleotides having the sequence of about 95% to about 100% identity with a segment of equivalent length of a DNA having a sequence selected from the group consisting of SEQ ID NOs:1-15624 or the DNA complement thereof. In other words, the total length of the recombinant RNA molecule can be greater than the length of the segment of the recombinant RNA molecule which is designed to suppress one or more target genes, where each target gene has a DNA sequence selected from the group consisting of SEQ ID NOs:1-15624. For example, the recombinant RNA molecule can have nucleotides flanking the “active” segment of at least 18 contiguous nucleotides that suppresses the target gene, or include “spacer” nucleotides between active segments, or can have additional nucleotides at the 5′ end, or at the 3′ end, or at both the 5′ and 3′ ends. In an embodiment, the recombinant RNA molecule can include or encode additional nucleotides that provide stabilizing secondary structure.

[0143] The recombinant RNA molecule of this invention can be single-stranded (ss) or double-stranded (ds) or a combination of both. Embodiments of the recombinant RNA molecule include sense single-stranded RNA (ssRNA), anti-sense ssRNA, or double-stranded RNA (dsRNA), or a combination of any of these.

[0144] The recombinant RNA molecule of this invention is provided by suitable means known to one in the art. Embodiments include those wherein the recombinant RNA molecule is synthesized in vitro, produced by expression in a microorganism or in cell culture (such as plant or insect cells grown in culture), produced by expression in a plant cell, or produced by microbial fermentation.

[0145] In some embodiments the recombinant RNA molecule of this invention includes other RNA elements, such as RNA aptamers or ribozymes, additional non-coding RNA (e. g., additional suppression elements), or one or more recognition sites for binding and cleavage by a small RNA (e. g., by a miRNA or an siRNA that is expressed only in a particular cell or tissue).

[0146] The recombinant RNA molecule of this invention can be provided in a composition for topical application to a surface of a plant or of a plant seed, or for topical application to any substrate needing protection from a Diabrotica species infestation. Likewise, the recombinant RNA molecule can be provided in a composition for topical application to a Diabrotica species, or in a composition for ingestion by a Diabrotica species. In various embodiments, such compositions containing the recombinant RNA molecule are provided in the form of at least one selected from the group consisting of a solid, liquid (including homogeneous mixtures such as solutions and non-homogeneous mixtures such as suspensions, colloids, micelles, and emulsions), powder, suspension, emulsion, spray, encapsulated or micro-encapsulation formulation, in or on microbeads or other carrier particulates, in a film or coating, or on or within a matrix. Suitable binders, inert carriers, surfactants, and the like can included in the composition containing the recombinant RNA molecule, as is known to one skilled in formulation of pesticides and seed treatments. In embodiments, the composition containing the recombinant RNA molecule further includes one or more components selected from the group consisting of a carrier agent, a surfactant, an organosilicone, a polynucleotide herbicidal molecule, a non-polynucleotide herbicidal molecule, a non-polynucleotide pesticide, a safener, and an insect growth regulator. In one embodiment the composition containing the recombinant RNA molecule further includes a nonionic organosilicone surfactant such as Silwet, e. g., Silwet® L-77 surfactant having CAS Number 27306-78-1 and EPA Number: CAL.REG.NO. 5905-50073-AA, currently available from Momentive Performance Materials, Albany, N.Y. In embodiments, the composition containing the recombinant RNA molecule further includes at least one pesticidal agent selected from the group consisting of a patatin, a plant lectin, a phytoecdysteroid, a phytoecdysteroid, a Bacillus thuringiensis insecticidal protein, a Xenorhabdus insecticidal protein, a Photorhabdus insecticidal protein, a Bacillus laterosporous insecticidal protein, and a Bacillus sphearicus insecticidal protein.

[0147] The composition containing the recombinant RNA molecule of this invention can be provided for dietary uptake by a Diabrotica species by applying the composition to a plant or surface subject to infestation by the Diabrotica species, for example by spraying, dusting, or coating the plant, or by application of a soil drench, or by providing in an artificial diet. The composition containing the recombinant RNA molecule can be provided for dietary uptake by a Diabrotica species in an artificial diet formulated to meet the particular nutritional requirements for maintaining the Diabrotica species, wherein the artificial diet is supplemented with some amount of the recombinant RNA molecule obtained from a separate source such as in vitro synthesis or purified from a microbial fermentation or other biological source; this embodiment can be useful, e. g., for determining the timing and amounts of effective treatment regimes. In some embodiments the composition containing the recombinant RNA molecule is provided for dietary uptake by the Diabrotica species in the form of a plant cell or in plant cell components, or in a microorganism (such as a bacterium or a yeast) or a microbial fermentation product, or in a synthetic diet. In one embodiment the composition containing the recombinant RNA molecule is provided in the form of bait that is ingested by the Diabrotica species. The composition containing the recombinant RNA molecule can be provided for dietary uptake by the Diabrotica species in the form of a seed treatment.

[0148] In various embodiments, the composition containing the recombinant RNA molecule of this invention includes a microbial cell or is produced in a microorganism. For example, the composition for containing the recombinant RNA molecule can include or can be produced in bacteria or yeast cells. In similar embodiments the composition containing the recombinant RNA molecule includes a transgenic plant cell or is produced in a plant cell (for example a plant cell transiently expressing the polynucleotide); such plant cells can be cells in an plant or cells grown in tissue culture or in cell suspension.

### Related Techniques

[0149] Embodiments of the polynucleotides and nucleic acid molecules of this invention can include additional elements, such as promoters, small RNA recognition sites, aptamers or ribozymes, additional and additional expression cassettes for expressing coding sequences (e. g., to express a transgene such as an insecticidal protein or selectable marker) or non-coding sequences (e. g., to express additional suppression elements). For example, an aspect of this invention provides a recombinant DNA construct including a heterologous promoter operably linked to DNA including at least one segment of 18 or more contiguous nucleotides with a sequence of about 95% to about 100% identity with a segment of equivalent length of a DNA having a sequence selected from the group consisting of SEQ ID NOs:1-15624 or the DNA complement thereof. In another embodiment, a recombinant DNA construct including a promoter operably linked to DNA encoding: (a) an RNA silencing element for suppressing a target gene selected from the group consisting of the genes having a sequence selected from the group consisting of SEQ ID NOs:1-15624), and (b) an aptamer, is stably integrated into the plant's genome from where RNA transcripts including the RNA aptamer and the RNA silencing element are expressed in cells of the plant; the aptamer serves to guide the RNA silencing element to a desired location in the cell. In another embodiment, inclusion of one or more recognition sites for binding and cleavage by a small RNA (e. g., by a miRNA or an siRNA that is expressed only in a particular cell or tissue) allows for more precise expression patterns in a plant, wherein the expression of the recombinant DNA construct is suppressed where the small RNA is expressed. Such additional elements are described below.

### Promoters

[0150] Promoters of use in the invention are functional in the cell in which the construct is intended to be transcribed. Generally these promoters are heterologous promoters, as used in recombinant constructs, i. e., they are not in nature found to be operably linked to the other nucleic elements used in the constructs of this invention. In various embodiments, the promoter is selected from the group consisting of a constitutive promoter, a spatially specific promoter, a temporally specific promoter, a developmentally specific promoter, and an inducible promoter. In many embodiments the promoter is a promoter functional in a plant, for example, a pol II promoter, a pol III promoter, a pol IV promoter, or a pol V promoter.

[0151] Non-constitutive promoters suitable for use with the recombinant DNA constructs of this invention include spatially specific promoters, temporally specific promoters, and inducible promoters. Spatially specific promoters can include organelle-, cell-, tissue-, or organ-specific promoters (e. g., a plastid-specific, a root-specific, a pollen-specific, or a seed-specific promoter for expression in plastids, roots, pollen, or seeds, respectively). In many cases a seed-specific, embryo-specific, aleurone-specific, or endosperm-specific promoter is especially useful. Temporally specific promoters can include promoters that tend to promote expression during certain developmental stages in a plant's growth cycle, or during different times of day or night, or at different seasons in a year. Inducible promoters include promoters induced by chemicals or by environmental conditions such as, but not limited to, biotic or abiotic stress (e. g., water deficit or drought, heat, cold, high or low nutrient or salt levels, high or low light levels, or pest or pathogen infection). MicroRNA promoters are useful, especially those having a temporally specific, spatially specific, or inducible expression pattern; examples of miRNA promoters, as well as methods for identifying miRNA promoters having specific expression patterns, are provided in U.S. Patent Application Publications 2006/0200878, 2007/0199095, and 2007/0300329, which are specifically incorporated herein by reference. An expression-specific promoter can also include promoters that are generally constitutively expressed but at differing degrees or “strengths” of expression, including promoters commonly regarded as “strong promoters” or as “weak promoters”.

[0152] Promoters of particular interest include the following examples: an opaline synthase promoter isolated from T-DNA of Agrobacterium; a cauliflower mosaic virus 35S promoter; enhanced promoter elements or chimeric promoter elements such as an enhanced cauliflower mosaic virus (CaMV) 35S promoter linked to an enhancer element (an intron from heat shock protein 70 of Zea mays); root specific promoters such as those disclosed in U.S. Pat. Nos. 5,837,848; 6,437,217 and 6,426,446; a maize L3 oleosin promoter disclosed in U.S. Pat. No. 6,433,252; a promoter for a plant nuclear gene encoding a plastid-localized aldolase disclosed in U.S. Patent Application Publication 2004/0216189; cold-inducible promoters disclosed in U.S. Pat. No. 6,084,089; salt-inducible promoters disclosed in U.S. Pat. No. 6,140,078; light-inducible promoters disclosed in U.S. Pat. No. 6,294,714; pathogen-inducible promoters disclosed in U.S. Pat. No. 6,252,138; and water deficit-inducible promoters disclosed in U.S. Patent Application Publication 2004/0123347 A1. All of the above-described patents and patent publications disclosing promoters and their use, especially in recombinant DNA constructs functional in plants are incorporated herein by reference.

[0153] Plant vascular- or phloem-specific promoters of interest include a rolC or rolA promoter of Agrobacterium rhizogenes, a promoter of a Agrobacterium tumefaciens T-DNA gene 5, the rice sucrose synthase RSs1 gene promoter, a Commelina yellow mottle badnavirus promoter, a coconut foliar decay virus promoter, a rice tungro bacilliform virus promoter, the promoter of a pea glutamine synthase GS3A gene, a invCD111 and invCD141 promoters of a potato invertase genes, a promoter isolated from Arabidopsis shown to have phloem-specific expression in tobacco by Kertbundit et al. (1991) Proc. Natl. Acad. Sci. USA., 88:5212-5216, a VAHOX1 promoter region, a pea cell wall invertase gene promoter, an acid invertase gene promoter from carrot, a promoter of a sulfate transporter gene Sultr1;3, a promoter of a plant sucrose synthase gene, and a promoter of a plant sucrose transporter gene.

[0154] Promoters suitable for use with a recombinant DNA construct or polynucleotide of this invention include polymerase II (“pol II”) promoters and polymerase III (“pol III”) promoters. RNA polymerase II transcribes structural or catalytic RNAs that are usually shorter than 400 nucleotides in length, and recognizes a simple run of T residues as a termination signal; it has been used to transcribe siRNA duplexes (see, e. g., Lu et al. (2004) Nucleic Acids Res., 32:e171). Pol II promoters are therefore preferred in certain embodiments where a short RNA transcript is to be produced from a recombinant DNA construct of this invention. In one embodiment, the recombinant DNA construct includes a pol II promoter to express an RNA transcript flanked by self-cleaving ribozyme sequences (e. g., self-cleaving hammerhead ribozymes), resulting in a processed RNA, such as a single-stranded RNA that binds to the transcript of the Diabrotica target gene, with defined 5′ and 3′ ends, free of potentially interfering flanking sequences. An alternative approach uses pol III promoters to generate transcripts with relatively defined 5′ and 3′ ends, i. e., to transcribe an RNA with minimal 5′ and 3′ flanking sequences. In some embodiments, Pol III promoters (e. g., U6 or H1 promoters) are preferred for adding a short AT-rich transcription termination site that results in 2 base-pair overhangs (UU) in the transcribed RNA; this is useful, e. g., for expression of siRNA-type constructs. Use of pol III promoters for driving expression of siRNA constructs has been reported; see van de Wetering et al. (2003) EMBO Rep., 4: 609-615, and Tuschl (2002) Nature Biotechnol., 20: 446-448.

[0155] The promoter element can include nucleic acid sequences that are not naturally occurring promoters or promoter elements or homologues thereof but that can regulate expression of a gene. Examples of such “gene independent” regulatory sequences include naturally occurring or artificially designed RNA sequences that include a ligand-binding region or aptamer (see “Aptamers”, below) and a regulatory region (which can be cis-acting). See, for example, Isaacs et al. (2004) Nat. Biotechnol., 22:841-847, Bayer and Smolke (2005) Nature Biotechnol., 23:337-343, Mandal and Breaker (2004) Nature Rev. Mol. Cell Biol., 5:451-463, Davidson and Ellington (2005) Trends Biotechnol., 23:109-112, Winkler et al. (2002) Nature, 419:952-956, Sudarsan et al. (2003) RNA, 9:644-647, and Mandal and Breaker (2004) Nature Struct. Mol. Biol., 11:29-35. Such “riboregulators” could be selected or designed for specific spatial or temporal specificity, for example, to regulate translation of DNA that encodes a silencing element for suppressing a Diabrotica target gene only in the presence (or absence) of a given concentration of the appropriate ligand. One example is a riboregulator that is responsive to an endogenous ligand (e. g., jasmonic acid or salicylic acid) produced by the plant when under stress (e. g., abiotic stress such as water, temperature, or nutrient stress, or biotic stress such as attach by pests or pathogens); under stress, the level of endogenous ligand increases to a level sufficient for the riboregulator to begin transcription of the DNA that encodes a silencing element for suppressing a Diabrotica target gene.

### Recombinase Sites

[0156] In some embodiments, the recombinant DNA construct or polynucleotide of this invention includes DNA encoding one or more site-specific recombinase recognition sites. In one embodiment, the recombinant DNA construct includes at least a pair of loxP sites, wherein site-specific recombination of DNA between the loxP sites is mediated by a Cre recombinase. The position and relative orientation of the loxP sites is selected to achieve the desired recombination; for example, when the loxP sites are in the same orientation, the DNA between the loxP sites is excised in circular form. In another embodiment, the recombinant DNA construct includes DNA encoding one loxP site; in the presence of Cre recombinase and another DNA with a loxP site, the two DNAs are recombined.

### Aptamers

[0157] In some embodiments, the recombinant DNA construct or polynucleotide of this invention includes DNA that is processed to an RNA aptamer, that is, an RNA that binds to a ligand through binding mechanism that is not primarily based on Watson-Crick base-pairing (in contrast, for example, to the base-pairing that occurs between complementary, anti-parallel nucleic acid strands to form a double-stranded nucleic acid structure). See, for example, Ellington and Szostak (1990) Nature, 346:818-822. Examples of aptamers can be found, for example, in the public Aptamer Database, available on line at aptamer.icmb.utexas.edu (Lee et al. (2004) Nucleic Acids Res., 32(1):D95-100). Aptamers useful in the invention can, however, be monovalent (binding a single ligand) or multivalent (binding more than one individual ligand, e. g., binding one unit of two or more different ligands).

[0158] Ligands useful in the invention include any molecule (or part of a molecule) that can be recognized and be bound by a nucleic acid secondary structure by a mechanism not primarily based on Watson-Crick base pairing. In this way, the recognition and binding of ligand and aptamer is analogous to that of antigen and antibody, or of biological effector and receptor. Ligands can include single molecules (or part of a molecule), or a combination of two or more molecules (or parts of a molecule), and can include one or more macromolecular complexes (e. g., polymers, lipid bilayers, liposomes, cellular membranes or other cellular structures, or cell surfaces). Examples of specific ligands include vitamins such as coenzyme B₁₂ and thiamine pyrophosphate, flavin mononucleotide, guanine, adenosine, S-adenosylmethionine, S-adenosylhomocysteine, coenzyme A, lysine, tyrosine, dopamine, glucosamine-6-phosphate, caffeine, theophylline, antibiotics such as chloramphenicol and neomycin, herbicides such as glyphosate and dicamba, proteins including viral or phage coat proteins and invertebrate epidermal or digestive tract surface proteins, and RNAs including viral RNA, transfer-RNAs (t-RNAs), ribosomal RNA (rRNA), and RNA polymerases such as RNA-dependent RNA polymerase (RdRP). One class of RNA aptamers useful in the invention are “thermoswitches” that do not bind a ligand but are thermally responsive, that is to say, the aptamer's conformation is determined by temperature; see, for example, Box 3 in Mandal and Breaker (2004) Nature Rev. Mol. Cell Biol., 5:451-463.

### Transgene Transcription Units

[0159] In some embodiments, the recombinant DNA construct or polynucleotide of this invention includes a transgene transcription unit. A transgene transcription unit includes DNA sequence encoding a gene of interest, e. g., a natural protein or a heterologous protein. A gene of interest can be any coding or non-coding sequence from any species (including, but not limited to, non-eukaryotes such as bacteria, and viruses; fungi, protists, plants, invertebrates, and vertebrates. Particular genes of interest are genes encoding at least one pesticidal agent selected from the group consisting of a patatin, a plant lectin, a phytoecdysteroid, a phytoecdysteroid, a Bacillus thuringiensis insecticidal protein, a Xenorhabdus insecticidal protein, a Photorhabdus insecticidal protein, a Bacillus laterosporous insecticidal protein, and a Bacillus sphearicus insecticidal protein. The transgene transcription unit can further include 5′ or 3′ sequence or both as required for transcription of the transgene.

### Introns

[0160] In some embodiments, the recombinant DNA construct or polynucleotide of this invention includes DNA encoding a spliceable intron. By “intron” is generally meant a segment of DNA (or the RNA transcribed from such a segment) that is located between exons (protein-encoding segments of the DNA or corresponding transcribed RNA), wherein, during maturation of the messenger RNA, the intron present is enzymatically “spliced out” or removed from the RNA strand by a cleavage/ligation process that occurs in the nucleus in eukaryotes. The term “intron” is also applied to non-coding DNA sequences that are transcribed to RNA segments that can be spliced out of a maturing RNA transcript, but are not introns found between protein-coding exons. One example of these are spliceable sequences that that have the ability to enhance expression in plants (in some cases, especially in monocots) of a downstream coding sequence; these spliceable sequences are naturally located in the 5′ untranslated region of some plant genes, as well as in some viral genes (e. g., the tobacco mosaic virus 5′ leader sequence or “omega” leader described as enhancing expression in plant genes by Gallie and Walbot (1992) Nucleic Acids Res., 20:4631-4638). These spliceable sequences or “expression-enhancing introns” can be artificially inserted in the 5′ untranslated region of a plant gene between the promoter but before any protein-coding exons. Examples of such expression-enhancing introns include, but are not limited to, a maize alcohol dehydrogenase (Zm-Adh1), a maize Bronze-1 expression-enhancing intron, a rice actin 1 (Os-Act1) intron, a Shrunken-1 (Sh-1) intron, a maize sucrose synthase intron, a heat shock protein 18 (hsp18) intron, and an 82 kilodalton heat shock protein (hsp82) intron. U.S. Pat. Nos. 5,593,874 and 5,859,347, specifically incorporated by reference herein, describe methods of improving recombinant DNA constructs for use in plants by inclusion of an expression-enhancing intron derived from the 70 kilodalton maize heat shock protein (hsp70) in the non-translated leader positioned 3′ from the gene promoter and 5′ from the first protein-coding exon.

### Ribozymes

[0161] In some embodiments, the recombinant DNA construct or polynucleotide of this invention includes DNA encoding one or more ribozymes. Ribozymes of particular interest include a self-cleaving ribozyme, a hammerhead ribozyme, or a hairpin ribozyme. In one embodiment, the recombinant DNA construct includes DNA encoding one or more ribozymes that serve to cleave the transcribed RNA to provide defined segments of RNA, such as silencing elements for suppressing a Diabrotica target gene.

### Gene Suppression Elements

[0162] In some embodiments, the recombinant DNA construct or polynucleotide of this invention includes DNA encoding additional gene suppression element for suppressing a target gene other than a Diabrotica target gene. The target gene to be suppressed can include coding or non-coding sequence or both.

[0163] Suitable gene suppression elements are described in detail in U.S. Patent Application Publication 2006/0200878, which disclosure is specifically incorporated herein by reference, and include one or more of:
[0164] (a) DNA that includes at least one anti-sense DNA segment that is anti-sense to at least one segment of the gene to be suppressed;
[0165] (b) DNA that includes multiple copies of at least one anti-sense DNA segment that is anti-sense to at least one segment of the gene to be suppressed;
[0166] (c) DNA that includes at least one sense DNA segment that is at least one segment of the gene to be suppressed;
[0167] (d) DNA that includes multiple copies of at least one sense DNA segment that is at least one segment of the gene to be suppressed;
[0168] (e) DNA that transcribes to RNA for suppressing the gene to be suppressed by forming double-stranded RNA and includes at least one anti-sense DNA segment that is anti-sense to at least one segment of the gene to be suppressed and at least one sense DNA segment that is at least one segment of the gene to be suppressed;
[0169] (f) DNA that transcribes to RNA for suppressing the gene to be suppressed by forming a single double-stranded RNA and includes multiple serial anti-sense DNA segments that are anti-sense to at least one segment of the gene to be suppressed and multiple serial sense DNA segments that are at least one segment of the gene to be suppressed;
[0170] (g) DNA that transcribes to RNA for suppressing the gene to be suppressed by forming multiple double strands of RNA and includes multiple anti-sense DNA segments that are anti-sense to at least one segment of the gene to be suppressed and multiple sense DNA segments that are at least one segment of the gene to be suppressed, and wherein the multiple anti-sense DNA segments and the multiple sense DNA segments are arranged in a series of inverted repeats;
[0171] (h) DNA that includes nucleotides derived from a plant miRNA;
[0172] (i) DNA that includes nucleotides of a siRNA;
[0173] (j) DNA that transcribes to an RNA aptamer capable of binding to a ligand; and
[0174] (k) DNA that transcribes to an RNA aptamer capable of binding to a ligand, and DNA that transcribes to regulatory RNA capable of regulating expression of the gene to be suppressed, wherein the regulation is dependent on the conformation of the regulatory RNA, and the conformation of the regulatory RNA is allosterically affected by the binding state of the RNA aptamer.

[0175] In some embodiments, an intron is used to deliver a gene suppression element in the absence of any protein-coding exons (coding sequence). In one example, an intron, such as an expression-enhancing intron (preferred in certain embodiments), is interrupted by embedding within the intron a gene suppression element, wherein, upon transcription, the gene suppression element is excised from the intron. Thus, protein-coding exons are not required to provide the gene suppressing function of the recombinant DNA constructs disclosed herein.

### Transcription Regulatory Elements

[0176] In some embodiments, the recombinant DNA construct or polynucleotide of this invention includes DNA encoding a transcription regulatory element. Transcription regulatory elements include elements that regulate the expression level of the recombinant DNA construct of this invention (relative to its expression in the absence of such regulatory elements). Examples of suitable transcription regulatory elements include riboswitches (cis- or trans-acting), transcript stabilizing sequences, and miRNA recognition sites, as described in detail in U.S. Patent Application Publication 2006/0200878, specifically incorporated herein by reference.

### Making and Using Transgenic Plant Cells and Transgenic Plants

[0177] Transformation of a plant can include any of several well-known methods and compositions. Suitable methods for plant transformation include virtually any method by which DNA can be introduced into a cell. One method of plant transformation is microprojectile bombardment, for example, as illustrated in U.S. Pat. No. 5,015,580 (soybean), U.S. Pat. No. 5,538,880 (maize), U.S. Pat. No. 5,550,318 (maize), U.S. Pat. No. 5,914,451 (soybean), U.S. Pat. No. 6,153,812 (wheat), U.S. Pat. No. 6,160,208 (maize), U.S. Pat. No. 6,288,312 (rice), U.S. Pat. No. 6,365,807 (rice), and U.S. Pat. No. 6,399,861 (maize), and U.S. Pat. No. 6,403,865 (maize), all of which are incorporated by reference for enabling the production of transgenic plants.

[0178] Another useful method of plant transformation is Agrobacterium-mediated transformation by means of Agrobacterium containing a binary Ti plasmid system, wherein the Agrobacterium carries a first Ti plasmid and a second, chimeric plasmid containing at least one T-DNA border of a wild-type Ti plasmid, a promoter functional in the transformed plant cell and operably linked to a polynucleotide or recombinant DNA construct of this invention. See, for example, the binary system described in U.S. Pat. No. 5,159,135, incorporated by reference. Also see De Framond (1983) Biotechnology, 1:262-269; and Hoekema et al., (1983) Nature, 303:179. In such a binary system, the smaller plasmid, containing the T-DNA border or borders, can be conveniently constructed and manipulated in a suitable alternative host, such as E. coli, and then transferred into Agrobacterium.

[0179] Detailed procedures for Agrobacterium-mediated transformation of plants, especially crop plants, include procedures disclosed in U.S. Pat. Nos. 5,004,863, 5,159,135, and 5,518,908 (cotton); U.S. Pat. Nos. 5,416,011, 5,569,834, 5,824,877 and 6,384,301 (soybean); U.S. Pat. Nos. 5,591,616 and 5,981,840 (maize); U.S. Pat. No. 5,463,174 (brassicas including canola), U.S. Pat. No. 7,026,528 (wheat), and U.S. Pat. No. 6,329,571 (rice), and in U.S. Patent Application Publications 2004/0244075 (maize) and 2001/0042257 A1 (sugar beet), all of which are specifically incorporated by reference for enabling the production of transgenic plants. U.S. Patent Application Publication 2011/0296555 discloses in Example 5 the transformation vectors (including the vector sequences) and detailed protocols for transforming maize, soybean, canola, cotton, and sugarcane) and is specifically incorporated by reference for enabling the production of transgenic plants. Similar methods have been reported for many plant species, both dicots and monocots, including, among others, peanut (Cheng et al. (1996) Plant Cell Rep., 15: 653); asparagus (Bytebier et al. (1987) Proc. Natl. Acad. Sci. U.S.A., 84:5345); barley (Wan and Lemaux (1994) Plant Physiol., 104:37); rice (Toriyama et al. (1988) Bio/Technology, 6:10; Zhang et al. (1988) Plant Cell Rep., 7:379; wheat (Vasil et al. (1992) Bio/Technology, 10:667; Becker et al. (1994) Plant J., 5:299), alfalfa (Masoud et al. (1996) Transgen. Res., 5:313); and tomato (Sun et al. (2006) Plant Cell Physiol., 47:426-431). See also a description of vectors, transformation methods, and production of transformed Arabidopsis thaliana plants where transcription factors are constitutively expressed by a CaMV35S promoter, in U.S. Patent Application Publication 2003/0167537 A1, incorporated by reference. Various methods of transformation of other plant species are well known in the art, see, for example, the encyclopedic reference, “Compendium of Transgenic Crop Plants”, edited by Chittaranjan Kole and Timothy C. Hall, Blackwell Publishing Ltd., 2008; ISBN 978-1-405-16924-0 (available electronically at mrw.interscience.wiley.com/emrw/9781405181099/hpt/toc), which describes transformation procedures for cereals and forage grasses (rice, maize, wheat, barley, oat, sorghum, pearl millet, finger millet, cool-season forage grasses, and bahiagrass), oilseed crops (soybean, oilseed brassicas, sunflower, peanut, flax, sesame, and safflower), legume grains and forages (common bean, cowpea, pea, faba bean, lentil, tepary bean, Asiatic beans, pigeonpea, vetch, chickpea, lupin, alfalfa, and clovers), temperate fruits and nuts (apple, pear, peach, plums, berry crops, cherries, grapes, olive, almond, and Persian walnut), tropical and subtropical fruits and nuts (citrus, grapefruit, banana and plantain, pineapple, papaya, mango, avocado, kiwifruit, passionfruit, and persimmon), vegetable crops (tomato, eggplant, peppers, vegetable brassicas, radish, carrot, cucurbits, alliums, asparagus, and leafy vegetables), sugar, tuber, and fiber crops (sugarcane, sugar beet, stevia, potato, sweet potato, cassava, and cotton), plantation crops, ornamentals, and turf grasses (tobacco, coffee, cocoa, tea, rubber tree, medicinal plants, ornamentals, and turf grasses), and forest tree species One of ordinary skill in the art has various transformation methodologies for production of stable transgenic plants.

[0180] Transformation methods to provide transgenic plant cells and transgenic plants containing stably integrated recombinant DNA are preferably practiced in tissue culture on media and in a controlled environment. “Media” refers to the numerous nutrient mixtures that are used to grow cells in vitro, that is, outside of the intact living organism. Recipient cell targets include, but are not limited to, meristem cells, callus, immature embryos or parts of embryos, and gametic cells such as microspores, pollen, sperm, and egg cells. Any cell from which a fertile plant can be regenerated is contemplated as a useful recipient cell for practice of this invention. Callus can be initiated from various tissue sources, including, but not limited to, immature embryos or parts of embryos, seedling apical meristems, microspores, and the like. Those cells which are capable of proliferating as callus can serve as recipient cells for genetic transformation. Practical transformation methods and materials for making transgenic plants of this invention (e. g., various media and recipient target cells, transformation of immature embryos, and subsequent regeneration of fertile transgenic plants) are disclosed, for example, in U.S. Pat. Nos. 6,194,636 and 6,232,526 and U.S. Patent Application Publication 2004/0216189, which are specifically incorporated by reference.

[0181] In general transformation practice, DNA is introduced into only a small percentage of target cells in any one transformation experiment. Marker genes are generally used to provide an efficient system for identification of those cells that are stably transformed by receiving and integrating a transgenic DNA construct into their genomes. Preferred marker genes provide selective markers which confer resistance to a selective agent, such as an antibiotic or herbicide. Any of the antibiotics or herbicides to which a plant cell is resistant can be a useful agent for selection. Potentially transformed cells are exposed to the selective agent. In the population of surviving cells will be those cells where, generally, the resistance-conferring gene is integrated and expressed at sufficient levels to permit cell survival. Cells can be tested further to confirm stable integration of the recombinant DNA. Commonly used selective marker genes include those conferring resistance to antibiotics such as kanamycin or paromomycin (nptII), hygromycin B (aph IV) and gentamycin (aac3 and aacC4) or resistance to herbicides such as glufosinate (bar or pat) and glyphosate (EPSPS). Examples of useful selective marker genes and selection agents are illustrated in U.S. Pat. Nos. 5,550,318, 5,633,435, 5,780,708, and 6,118,047, all of which are specifically incorporated by reference. Screenable markers or reporters, such as markers that provide an ability to visually identify transformants can also be employed. Examples of useful screenable markers include, for example, a gene expressing a protein that produces a detectable color by acting on a chromogenic substrate (e. g., beta glucuronidase (GUS) (uidA) or luciferase (luc)) or that itself is detectable, such as green fluorescent protein (GFP) (gfp) or an immunogenic molecule. Those of skill in the art will recognize that many other useful markers or reporters are available for use.

[0182] Detecting or measuring transcription of a recombinant DNA construct in a transgenic plant cell can be achieved by any suitable method, including protein detection methods (e. g., western blots, ELISAs, and other immunochemical methods), measurements of enzymatic activity, or nucleic acid detection methods (e. g., Southern blots, northern blots, PCR, RT-PCR, fluorescent in situ hybridization).

[0183] Other suitable methods for detecting or measuring transcription in a plant cell of a recombinant polynucleotide of this invention targeting a Diabrotica species target gene include measurement of any other trait that is a direct or proxy indication of the level of expression of the target gene in the Diabrotica species, relative to the level of expression observed in the absence of the recombinant polynucleotide, e. g., growth rates, mortality rates, or reproductive or recruitment rates of the Diabrotica species, or measurements of injury (e. g., root injury) or yield loss in a plant or field of plants infested by the Diabrotica species. In general, suitable methods for detecting or measuring transcription in a plant cell of a recombinant polynucleotide of interest include, e. g., gross or microscopic morphological traits, growth rates, yield, reproductive or recruitment rates, resistance to pests or pathogens, or resistance to biotic or abiotic stress (e. g., water deficit stress, salt stress, nutrient stress, heat or cold stress). Such methods can use direct measurements of a phenotypic trait or proxy assays (e. g., in plants, these assays include plant part assays such as leaf or root assays to determine tolerance of abiotic stress). Such methods include direct measurements of resistance to an invertebrate pest or pathogen (e. g., damage to plant tissues) or proxy assays (e. g., plant yield assays, or bioassays such as the Western corn rootworm (Diabrotica virgifera virgifera LeConte) larval bioassay described in International Patent Application Publication WO2005/110068 A2 and U.S. Patent Application Publication US 2006/0021087 A1, specifically incorporated by reference, or the soybean cyst nematode bioassay described by Steeves et al. (2006) Funct. Plant Biol., 33:991-999, wherein cysts per plant, cysts per gram root, eggs per plant, eggs per gram root, and eggs per cyst are measured.

[0184] The recombinant DNA constructs of this invention can be stacked with other recombinant DNA for imparting additional traits (e. g., in the case of transformed plants, traits including herbicide resistance, pest resistance, cold germination tolerance, water deficit tolerance, and the like) for example, by expressing or suppressing other genes. Constructs for coordinated decrease and increase of gene expression are disclosed in U.S. Patent Application Publication 2004/0126845 A1, specifically incorporated by reference.

[0185] Seeds of fertile transgenic plants can be harvested and used to grow progeny generations, including hybrid generations, of transgenic plants of this invention that include the recombinant DNA construct in their genome. Thus, in addition to direct transformation of a plant with a recombinant DNA construct of this invention, transgenic plants of this invention can be prepared by crossing a first plant having the recombinant DNA with a second plant lacking the construct. For example, the recombinant DNA can be introduced into a plant line that is amenable to transformation to produce a transgenic plant, which can be crossed with a second plant line to introgress the recombinant DNA into the resulting progeny. A transgenic plant of this invention can be crossed with a plant line having other recombinant DNA that confers one or more additional trait(s) (such as, but not limited to, herbicide resistance, pest or disease resistance, environmental stress resistance, modified nutrient content, and yield improvement) to produce progeny plants having recombinant DNA that confers both the desired target sequence expression behavior and the additional trait(s).

[0186] In such breeding for combining traits the transgenic plant donating the additional trait can be a male line (pollinator) and the transgenic plant carrying the base traits can be the female line. The progeny of this cross segregate such that some of the plant will carry the DNA for both parental traits and some will carry DNA for one parental trait; such plants can be identified by markers associated with parental recombinant DNA Progeny plants carrying DNA for both parental traits can be crossed back into the female parent line multiple times, e. g., usually 6 to 8 generations, to produce a homozygous progeny plant with substantially the same genotype as one original transgenic parental line as well as the recombinant DNA of the other transgenic parental line.

[0187] Yet another aspect of this invention is a transgenic plant grown from the transgenic seed of this invention. This invention contemplates transgenic plants grown directly from transgenic seed containing the recombinant DNA as well as progeny generations of plants, including inbred or hybrid plant lines, made by crossing a transgenic plant grown directly from transgenic seed to a second plant not grown from the same transgenic seed. Crossing can include, for example, the following steps:
[0188] (a) plant seeds of the first parent plant (e. g., non-transgenic or a transgenic) and a second parent plant that is transgenic according to the invention;
[0189] (b) grow the seeds of the first and second parent plants into plants that bear flowers;
[0190] (c) pollinate a flower from the first parent with pollen from the second parent; and
[0191] (d) harvest seeds produced on the parent plant bearing the fertilized flower.

[0192] It is often desirable to introgress recombinant DNA into elite varieties, e. g., by backcrossing, to transfer a specific desirable trait from one source to an inbred or other plant that lacks that trait. This can be accomplished, for example, by first crossing a superior inbred (“A”) (recurrent parent) to a donor inbred (“B”) (non-recurrent parent), which carries the appropriate gene(s) for the trait in question, for example, a construct prepared in accordance with the current invention. The progeny of this cross first are selected in the resultant progeny for the desired trait to be transferred from the non-recurrent parent “B”, and then the selected progeny are mated back to the superior recurrent parent “A”. After five or more backcross generations with selection for the desired trait, the progeny can be essentially hemizygous for loci controlling the characteristic being transferred, but are like the superior parent for most or almost all other genes. The last backcross generation would be selfed to give progeny which are pure breeding for the gene(s) being transferred, i. e., one or more transformation events.

[0193] Through a series of breeding manipulations, a selected DNA construct can be moved from one line into an entirely different line without the need for further recombinant manipulation. One can thus produce inbred plants which are true breeding for one or more DNA constructs. By crossing different inbred plants, one can produce a large number of different hybrids with different combinations of DNA constructs. In this way, plants can be produced which have the desirable agronomic properties frequently associated with hybrids (“hybrid vigor”), as well as the desirable characteristics imparted by one or more DNA constructs.

[0194] In certain transgenic plant cells and transgenic plants of this invention, it is sometimes desirable to concurrently express a gene of interest while also modulating expression of a Diabrotica target gene. Thus, in some embodiments, the transgenic plant contains recombinant DNA further including a gene expression element for expressing at least one gene of interest, and transcription of the recombinant DNA construct of this invention is preferably effected with concurrent transcription of the gene expression element.

[0195] In some embodiments, the recombinant DNA constructs of this invention can be transcribed in any plant cell or tissue or in a whole plant of any developmental stage. Transgenic plants can be derived from any monocot or dicot plant, such as, but not limited to, plants of commercial or agricultural interest, such as crop plants (especially crop plants used for human food or animal feed), wood- or pulp-producing trees, vegetable plants, fruit plants, and ornamental plants. Examples of plants of interest include grain crop plants (such as wheat, oat, barley, maize, rye, triticale, rice, millet, sorghum, quinoa, amaranth, and buckwheat); forage crop plants (such as forage grasses and forage dicots including alfalfa, vetch, clover, and the like); oilseed crop plants (such as cotton, safflower, sunflower, soybean, canola, rapeseed, flax, peanuts, and oil palm); tree nuts (such as walnut, cashew, hazelnut, pecan, almond, and the like); sugarcane, coconut, date palm, olive, sugarbeet, tea, and coffee; wood- or pulp-producing trees; vegetable crop plants such as legumes (for example, beans, peas, lentils, alfalfa, peanut), lettuce, asparagus, artichoke, celery, carrot, radish, the brassicas (for example, cabbages, kales, mustards, and other leafy brassicas, broccoli, cauliflower, Brussels sprouts, turnip, kohlrabi), edible cucurbits (for example, cucumbers, melons, summer squashes, winter squashes), edible alliums (for example, onions, garlic, leeks, shallots, chives), edible members of the Solanaceae (for example, tomatoes, eggplants, potatoes, peppers, groundcherries), and edible members of the Chenopodiaceae (for example, beet, chard, spinach, quinoa, amaranth); fruit crop plants such as apple, pear, citrus fruits (for example, orange, lime, lemon, grapefruit, and others), stone fruits (for example, apricot, peach, plum, nectarine), banana, pineapple, grape, kiwifruit, papaya, avocado, and berries; plants grown for biomass or biofuel (for example, Miscanthus grasses, switchgrass, jatropha, oil palm, eukaryotic microalgae such as Botryococcus braunii, Chlorella spp., and Dunaliella spp., and eukaryotic macroalgae such as Gracilaria spp., and Sargassum spp.); and ornamental plants including ornamental flowering plants, ornamental trees and shrubs, ornamental groundcovers, and ornamental grasses.

[0196] This invention also provides commodity products produced from a transgenic plant cell, plant, or seed of this invention, including, but not limited to, harvested leaves, roots, shoots, tubers, stems, fruits, seeds, or other parts of a plant, meals, oils, extracts, fermentation or digestion products, crushed or whole grains or seeds of a plant, or any food or non-food product including such commodity products produced from a transgenic plant cell, plant, or seed of this invention. The detection of one or more of nucleic acid sequences of the recombinant DNA constructs of this invention in one or more commodity or commodity products contemplated herein is de facto evidence that the commodity or commodity product contains or is derived from a transgenic plant cell, plant, or seed of this invention.

[0197] Generally a transgenic plant having in its genome a recombinant DNA construct of this invention exhibits increased resistance to a Diabrotica species infestation. In various embodiments, for example, where the transgenic plant expresses a recombinant DNA construct of this invention that is stacked with other recombinant DNA for imparting additional traits, the transgenic plant has at least one additional altered trait, relative to a plant lacking the recombinant DNA construct, selected from the group of traits consisting of:

[0198] (a) improved abiotic stress tolerance;

[0199] (b) improved biotic stress tolerance;

[0200] (c) modified primary metabolite composition;

[0201] (d) modified secondary metabolite composition;

[0202] (e) modified trace element, carotenoid, or vitamin composition;

[0203] (f) improved yield;

[0204] (g) improved ability to use nitrogen, phosphate, or other nutrients;

[0205] (h) modified agronomic characteristics;

[0206] (i) modified growth or reproductive characteristics; and

[0207] (j) improved harvest, storage, or processing quality.

[0208] In some embodiments, the transgenic plant is characterized by: improved tolerance of abiotic stress (e. g., tolerance of water deficit or drought, heat, cold, non-optimal nutrient or salt levels, non-optimal light levels) or of biotic stress (e. g., crowding, allelopathy, or wounding); by a modified primary metabolite (e. g., fatty acid, oil, amino acid, protein, sugar, or carbohydrate) composition; a modified secondary metabolite (e. g., alkaloids, terpenoids, polyketides, non-ribosomal peptides, and secondary metabolites of mixed biosynthetic origin) composition; a modified trace element (e. g., iron, zinc), carotenoid (e. g., beta-carotene, lycopene, lutein, zeaxanthin, or other carotenoids and xanthophylls), or vitamin (e. g., tocopherols) composition; improved yield (e. g., improved yield under non-stress conditions or improved yield under biotic or abiotic stress); improved ability to use nitrogen, phosphate, or other nutrients; modified agronomic characteristics (e. g., delayed ripening; delayed senescence; earlier or later maturity; improved shade tolerance; improved resistance to root or stalk lodging; improved resistance to “green snap” of stems; modified photoperiod response); modified growth or reproductive characteristics (e. g., intentional dwarfing; intentional male sterility, useful, e. g., in improved hybridization procedures; improved vegetative growth rate; improved germination; improved male or female fertility); improved harvest, storage, or processing quality (e. g., improved resistance to pests during storage, improved resistance to breakage, improved appeal to consumers); or any combination of these traits.

[0209] In another embodiment, transgenic seed, or seed produced by the transgenic plant, has modified primary metabolite (e. g., fatty acid, oil, amino acid, protein, sugar, or carbohydrate) composition, a modified secondary metabolite composition, a modified trace element, carotenoid, or vitamin composition, an improved harvest, storage, or processing quality, or a combination of these. In another embodiment, it can be desirable to change levels of native components of the transgenic plant or seed of a transgenic plant, for example, to decrease levels of an allergenic protein or glycoprotein or of a toxic metabolite.

[0210] Generally, screening a population of transgenic plants each regenerated from a transgenic plant cell is performed to identify transgenic plant cells that develop into transgenic plants having the desired trait. The transgenic plants are assayed to detect an enhanced trait, e. g., enhanced water use efficiency, enhanced cold tolerance, increased yield, enhanced nitrogen use efficiency, enhanced seed protein, and enhanced seed oil. Screening methods include direct screening for the trait in a greenhouse or field trial or screening for a surrogate trait. Such analyses are directed to detecting changes in the chemical composition, biomass, physiological properties, or morphology of the plant. Changes in chemical compositions such as nutritional composition of grain are detected by analysis of the seed composition and content of protein, free amino acids, oil, free fatty acids, starch, tocopherols, or other nutrients. Changes in growth or biomass characteristics are detected by measuring plant height, stem diameter, internode length, root and shoot dry weights, and (for grain-producing plants such as maize, rice, or wheat) ear or seed head length and diameter. Changes in physiological properties are identified by evaluating responses to stress conditions, e. g., assays under imposed stress conditions such as water deficit, nitrogen or phosphate deficiency, cold or hot growing conditions, pathogen or insect attack, light deficiency, or increased plant density. Other selection properties include days to pollen shed, days to silking in maize, leaf extension rate, chlorophyll content, leaf temperature, stand, seedling vigor, internode length, plant height, leaf number, leaf area, tillering, brace roots, staying green, stalk lodging, root lodging, plant health, fertility, green snap, and pest resistance. In addition, phenotypic characteristics of harvested seed can be evaluated; for example, in maize this can include the number of kernels per row on the ear, number of rows of kernels on the ear, kernel abortion, kernel weight, kernel size, kernel density and physical grain quality. The following illustrates examples of screening assays useful for identifying desired traits in maize plants. These can be readily adapted for screening other plants such as canola, cotton, and soybean either as hybrids or inbreds.

[0211] Transgenic maize plants having nitrogen use efficiency are identified by screening in fields with three levels of nitrogen fertilizer being applied, e. g., low level (0 pounds/acre), medium level (80 pounds/acre) and high level (180 pounds/acre). Plants with enhanced nitrogen use efficiency provide higher yield as compared to control plants.

[0212] Transgenic maize plants having enhanced yield are identified by screening the transgenic plants over multiple locations with plants grown under optimal production management practices and maximum weed and pest control. A useful target for improved yield is a 5% to 10% increase in yield as compared to yield produced by plants grown from seed for a control plant. Selection methods can be applied in multiple and diverse geographic locations and over one or more planting seasons to statistically distinguish yield improvement from natural environmental effects.

[0213] Transgenic maize plants having enhanced water use efficiency are identified by screening plants in an assay where water is withheld for period to induce stress followed by watering to revive the plants. For example, a useful selection process imposes 3 drought/re-water cycles on plants over a total period of 15 days after an initial stress free growth period of 11 days. Each cycle consists of 5 days, with no water being applied for the first four days and a water quenching on the 5th day of the cycle. The primary phenotypes analyzed by the selection method are the changes in plant growth rate as determined by height and biomass during a vegetative drought treatment.

[0214] Transgenic maize plants having enhanced cold tolerance are identified by screening plants in a cold germination assay and/or a cold tolerance field trial. In a cold germination assay trays of transgenic and control seeds are placed in a dark growth chamber at 9.7 degrees Celsius for 24 days. Seeds having higher germination rates as compared to the control are identified as having enhanced cold tolerance. In a cold tolerance field trial plants with enhanced cold tolerance are identified from field planting at an earlier date than conventional spring planting for the field location. For example, seeds are planted into the ground around two weeks before local farmers begin to plant maize so that a significant cold stress is exerted onto the crop. As a control, seeds also are planted under local optimal planting conditions such that the crop has little or no exposure to cold condition. At each location, seeds are planted under both cold and normal conditions preferably with multiple repetitions per treatment.

### EXAMPLES

### Example 1

[0215] This example illustrates non-limiting embodiments of sequences useful as target genes for controlling Diabrotica species and for making compositions and plants of this invention, and describes identification of such DNA sequences from Diabrotica virgifera virgifera. It is recognized that analogous sequences can be obtained from any other Diabrotica species referred to hereinabove.

[0216] cDNA libraries were generated from mid-guts of Diabrotica virgifera virgifera (Western corn rootworm, WCR) third instar larvae reared on corn plants, as follows. Disinfected WCR eggs were suspended in a 0.1% (w/v) agar solution and dispensed into petri dishes containing 2% (w/v) agar and filter paper. The WCR eggs were incubated first at 20 degrees Celsius and 60% relative humidity (“RH”) for 3 days and then at 25 degrees Celsius and 60% RH for 10 days. After 13 days of incubation, the eggs were washed from the dishes into sweater boxes containing soil (2 parts Metro-Mix 200:1 part Redi-Earth; steam-sterilized) and germinated corn mats, which were prepared by geminating corn seeds of Dekalb line DKC64-04 in sweater boxes containing germination paper wet with 1.0% (w/v) 3336F fungicide. Larvae were reared in sweater boxes in a growth chamber (25 degrees Celsius, 70% relative humidity, irrigated for 10 minutes every 2 days, and fertilized every 4 days). Third instar larvae were dissected to separate mid-guts from other body parts (cuticle, head, fore- and hind-gut, and fat body). The harvested mid-guts were placed in chilled microcentrifuge tubes with 25 millimolar Tris buffer (pH 7.4), thoroughly saturated with the buffer, and then centrifuged for 5 minutes at 14,000 g at 4 degrees Celsius. The supernatant was discarded and mid-gut pellets were immediately frozen in liquid nitrogen and stored at −80 degrees Celsius until used for total RNA preparation. Total RNA was purified, from which the cDNA library was obtained by high-throughput sequencing using commercially available 454 technology (454 Life Sciences, 15 Commercial St., Branford, Conn. 06405, USA), as described in Margulies et al. (2005) Nature, 437:376-380. This provided approximately 1.27 million ˜300 base-pair reads, which were supplemented with 17,800 publicly available ˜520 base-pair Sanger reads from NCBI. The combined sequence data were assembled into contigs de novo using the Newbler (version 2.3) software package (454 Life Sciences, 15 Commercial St., Branford, Conn. 06405, USA). Approximately 16,130 genes were identified from the assembled sequence data, including the genes having the sequences of SEQ ID NOs:1-15624.

### Example 2

[0217] The polynucleotides of this invention are generally designed to modulate expression by inducing regulation or suppression of a Diabrotica species target gene and are designed to have a nucleotide sequence essentially identical or essentially complementary to the nucleotide sequence of a Diabrotica species target gene (e. g., SEQ ID NOs:1-15624) or to the sequence of RNA transcribed from a Diabrotica species target gene, which can be coding sequence or non-coding sequence. These effective polynucleotide molecules that modulate expression are referred to herein as a “trigger”, or “triggers”. This example describes non-limiting techniques useful in the design and selection of polynucleotides as “triggers” to modulate expression of a Diabrotica species target gene.

[0218] Selection of Polynucleotide Triggers by “Tiling”

[0219] Polynucleotides of use in the invention need not be of the full length of a target gene, and in many embodiments are of much shorter length in comparison to the target gene. An example of a technique that is useful for selecting effective triggers is “tiling”, or evaluation of polynucleotides corresponding to adjacent or partially overlapping segments of a target gene.

[0220] Effective polynucleotide “triggers” can be identified by “tiling” gene targets in selected length fragments, e. g., fragments of 200-300 nucleotides in length, with partially overlapping regions, e. g., of about 25 nucleotides, along the length of the target gene. To suppress a single gene, trigger sequences are designed to correspond to (have a nucleotide identity or complementarity with) regions that are unique to the target gene; the selected region of the target gene can include coding sequence or non-coding sequence (e. g., promoter regions, 3′ untranslated regions, introns and the like) or a combination of both.

[0221] Where it is of interest to design a target effective in suppressing multiple target genes, the multiple target gene sequences are aligned and polynucleotide triggers designed to correspond to regions with high sequence homology in common among the multiple targets. Conversely, where it is of interest to design a target effective in selectively suppressing one among multiple target sequences, the multiple target gene sequences are aligned and polynucleotide triggers designed to correspond to regions with no or low sequence homology in common among the multiple targets.

[0222] In a non-limiting example, anti-sense single-stranded RNA triggers are designed for each of the target genes having a sequence selected from the group consisting of SEQ ID NOs:1-15624 as follows. Multiple anti-sense single-stranded RNA triggers, each of 200-300 nucleotides in length and with a sequence corresponding to (i. e., for anti-sense triggers, complementary to) a fragment of a target gene having a sequence selected from SEQ ID NOs:1-15624 are designed so that each trigger's sequence overlaps about 25 nucleotides of the next adjacent trigger's sequence, in such a way that the multiple triggers in combination cover the full length of the target gene. (Sense triggers are designed in an analogous fashion, where the trigger sequence is identical to a fragment of the target gene. Similarly, double-stranded triggers can be designed by providing pairs of sense and anti-sense triggers, each pair of triggers overlapping the next adjacent pair of triggers.)

[0223] The polynucleotide triggers are tested by any convenient means for efficacy in silencing the Diabrotica species target gene. An example of a suitable test is a diet bioassay such as the Western corn rootworm (Diabrotica virgifera virgifera LeConte) larval bioassay described in International Patent Application Publication WO2005/110068 A2 and U.S. Patent Application Publication US 2006/0021087 A1, specifically incorporated by reference. Another test involves the topical application of the polynucleotide triggers either directly to Diabrotica individuals or to the surface of a plant to be protected from a Diabrotica species infestation. One desired result of treatment with a polynucleotide of this invention is prevention or control of a Diabrotica species infestation, e. g., by inducing in a Diabrotica insect a physiological or behavioural change such as, but not limited to, growth stunting, increased mortality, decrease in reproductive capacity, decrease in or cessation of feeding behavior or movement, or decrease in or cessation of metamorphosis stage development. Another desired result of treatment with a polynucleotide of this invention is provision of a plant that exhibits improved resistance to a Diabrotica species infestation, such as a maize (Zea mays) plant that exhibits improved resistance to an infestation by Diabrotica virgifera virgifera (Western Corn Rootworm, WCR), Diabrotica undecimpunctata howardii (Southern Corn Rootworm, SCR), Diabrotica barberi (Northern Corn Rootworm, NCR), Diabrotica virgifera zeae (Mexican Corn Rootworm, MCR), Diabrotica balteata (Brazilian Corn Rootworm, BZR), or Brazilian Corn Rootworm complex (BCR) consisting of Diabrotica viridula and Diabrotica speciosa.

[0224] The tiling procedure can be repeated, if desired. A polynucleotide trigger found to provide desired activity can itself be subjected to a tiling procedure. For example, multiple overlapping anti-sense single-stranded RNA triggers are designed, each of 50-60 nucleotides in length and with a sequence corresponding to (i. e., for anti-sense triggers, complementary to) the fragment of a target gene having a sequence selected from SEQ ID NOs:1-15624 for which a single polynucleotide trigger of 300 nucleotides was found to be effective. Additional rounds of tiling analysis can be carried out, where triggers as short as 18 or 19 nucleotides are tested.

[0225] Effective polynucleotide triggers of any size can be used, alone or in combination, in the various methods of this invention. In some embodiments, a single polynucleotide trigger is used to make a composition of this invention (e. g., a composition for topical application, or a recombinant DNA construct useful for making a transgenic plant). In other embodiments, a mixture or pool of different polynucleotide triggers is used; in such cases the polynucleotide triggers can be for a single target gene or for multiple target genes.

[0226] Thermodynamic Considerations in Selecting Polynucleotide Triggers

[0227] Polynucleotide triggers can be designed or their sequence optimised using thermodynamic considerations. For example, polynucleotide triggers can be selected based on the thermodynamics controlling hybridization between one nucleic acid strand (e. g., a polynucleotide trigger or an individual siRNA) and another (e. g., a target gene transcript)

[0228] Methods and algorithms to predict nucleotide sequences that are likely to be effective at RNAi-mediated silencing of a target gene are known in the art. Non-limiting examples of such methods and algorithms include “i-score”, described by Ichihara et al. (2007) Nucleic Acids Res., 35(18): 123e; “Oligowalk”, publicly available at ma.urmc.rochester.edu/servers/oligowalk and described by Lu et al. (2008) Nucleic Acids Res., 36:W104-108; and “Reynolds score”, described by Khovorova et al. (2004) Nature Biotechnol., 22:326-330.

[0229] Permitted Mismatches

[0230] By “essentially identical” or “essentially complementary” is meant that the trigger polynucleotide (or at least one strand of a double-stranded polynucleotide) has sufficient identity or complementarity to the target gene or to the RNA transcribed from a target gene (e. g., the transcript) to suppress expression of a target gene (e. g., to effect a reduction in levels or activity of the target gene transcript and/or encoded protein). Polynucleotides of this invention need not have 100 percent identity or complementarity to a target gene or to the RNA transcribed from a target gene to suppress expression of the target gene (e. g., to effect a reduction in levels or activity of the target gene transcript or encoded protein, or to provide control of a Diabrotica species). In some embodiments, the polynucleotide or a portion thereof is designed to be essentially identical to, or essentially complementary to, a sequence of at least 18 or 19 contiguous nucleotides in either the target gene or the RNA transcribed from the target gene. In certain embodiments, an “essentially identical” polynucleotide has 100 percent sequence identity or at least about 83, 84, 85, 86, 87, 88, 89, 90, 91, 92, 93, 94, 95, 96, 97, 98, or 99 percent sequence identity when compared to the sequence of 18 or more contiguous nucleotides in either the endogenous target gene or to an RNA transcribed from the target gene. In certain embodiments, an “essentially complementary” polynucleotide has 100 percent sequence complementarity or at least about 83, 84, 85, 86, 87, 88, 89, 90, 91, 92, 93, 94, 95, 96, 97, 98, or 99 percent sequence complementarity when compared to the sequence of 18 or more contiguous nucleotides in either the target gene or RNA transcribed from the target gene.

[0231] Polynucleotides containing mismatches to the target gene or transcript can be used in certain embodiments of the compositions and methods of this invention. In some embodiments, the polynucleotide includes at least 18 or at least 19 contiguous nucleotides that are essentially identical or essentially complementary to a segment of equivalent length in the target gene or target gene's transcript. In certain embodiments, a polynucleotide of 19 contiguous nucleotides that is essentially identical or essentially complementary to a segment of equivalent length in the target gene or target gene's transcript can have 1 or 2 mismatches to the target gene or transcript (i. e., 1 or 2 mismatches between the polynucleotide's 19 contiguous nucleotides and the segment of equivalent length in the target gene or target gene's transcript). In certain embodiments, a polynucleotide of 20 or more nucleotides that contains a contiguous 19 nucleotide span of identity or complementarity to a segment of equivalent length in the target gene or target gene's transcript can have 1 or 2 mismatches to the target gene or transcript. In certain embodiments, a polynucleotide of 21 continuous nucleotides that is essentially identical or essentially complementary to a segment of equivalent length in the target gene or target gene's transcript can have 1, 2, or 3 mismatches to the target gene or transcript. In certain embodiments, a polynucleotide of 22 or more nucleotides that contains a contiguous 21 nucleotide span of identity or complementarity to a segment of equivalent length in the target gene or target gene's transcript can have 1, 2, or 3 mismatches to the target gene or transcript.

[0232] In designing polynucleotides with mismatches to an endogenous target gene or to an RNA transcribed from the target gene, mismatches of certain types and at certain positions that are more likely to be tolerated can be used. In certain exemplary embodiments, mismatches formed between adenine and cytosine or guanosine and uracil residues are used as described by Du et al. (2005) Nucleic Acids Res., 33:1671-1677. In some embodiments, mismatches in 19 base-pair overlap regions are located at the low tolerance positions 5, 7, 8 or 11 (from the 5′ end of a 19-nucleotide target), at medium tolerance positions 3, 4, and 12-17 (from the 5′ end of a 19-nucleotide target), and/or at the high tolerance positions at either end of the region of complementarity, i. e., positions 1, 2, 18, and 19 (from the 5′ end of a 19-nucleotide target) as described by Du et al. (2005) Nucleic Acids Res., 33:1671-1677. Tolerated mismatches can be empirically determined in routine assays, e. g., in in vitro dietary assays on Diabrotica species larvae.

[0233] Embedding Active Triggers in Neutral Sequence

[0234] In an embodiment, a bioactive trigger (i. e., a polynucleotide with a sequence corresponding to the target gene and which is responsible for an observed suppression of the target gene) is embedded in “neutral” sequence, i. e., inserted into additional nucleotides that have no sequence identity or complementarity to the target gene. Neutral sequence can be desirable, e. g., to increase the overall length of a polynucleotide. For example, it can be desirable for a polynucleotide to be of a particular size for reasons of stability, cost-effectiveness in manufacturing, or biological activity.

[0235] It has been reported that for Diabrotica virgifera virgifera dsRNAs greater than or equal to approximately 60 base-pairs (bp) are required for biological activity in artificial diet bioassays; see Bolognesi et al. (2012) PLoS ONE 7(10): e47534. Thus, in one embodiment, a 21-base-pair dsRNA trigger corresponding to a target gene having a sequence selected from the group consisting of SEQ ID NOs:1-15624 and found to provide control of a Diabrotica infestation is embedded in neutral sequence of an additional 39 base pairs, thus forming a polynucleotide of about 60 base pairs. In another embodiment, a single 21-base-pair trigger is found to be efficacious when embedded in larger sections of neutral sequence, e. g., where the total polynucleotide length is from about 60 to about 300 base pairs.

### Example 3

[0236] This example illustrates a non-limiting assay useful for evaluating the Diabrotica-controlling efficacy of a polynucleotide of this invention including at least 18 contiguous nucleotides that are essentially identical or complementary to a segment of equivalent length of a DNA having a sequence selected from the group consisting of SEQ ID NOs:1-15624, or including at least 18 contiguous nucleotides that are essentially identical or complementary to a segment of equivalent length of a DNA of a target gene having a sequence selected from the group consisting of SEQ ID NOs:1-15624, or compositions including such polynucleotides.

[0237] Double-stranded RNA (dsRNA) triggers for each of the target genes with a sequence selected from SEQ ID NOs:1-15624 are designed and selected as described in Example 2 and are tested in a bioassay. Each trigger is about 500 base pairs in length with a sequence of contiguous nucleotides corresponding to an open reading frame of a target gene with a sequence selected from SEQ ID NOs:1-15624; where the open reading frame is shorter than 500 nucleotides, a shorter trigger is used. At least one trigger for each of the 450 target genes is tested; for selected target genes multiple triggers are tested. The triggers are chemically synthesized by in vitro transcription using a T7 RNA polymerase, using standard methodology. The RNA transcription products are purified from the T7 reaction mixture and are used either directly in the bioassay or are modified prior to the bioassay by digestion with RNAse III (Ambion Corporation, Austin, Tex.) or DICER (Stratagene, La Jolla, Calif.) to produce twenty-one and twenty-two nucleotide duplexes containing 5′ phosphorylated ends and 3′ hydroxyl ends with 2-3 base overhangs. The dsRNA triggers for suppressing each of the 450 target genes are tested in a diet bioassay using Diabrotica virgifera virgifera larvae, wherein mortality or stunting of the larvae due to contact with or ingestion of the polynucleotide triggers is assayed, is carried out as follows.

[0238] Diabrotica virgifera virgifera (WCR) eggs are obtained from Crop Characteristics, Inc., Farmington, Minn. The non-diapausing WCR eggs are incubated in soil for about 13 days at 24 degrees Celsius, 60% relative humidity, in complete darkness. On day 13 the soil containing WCR eggs is placed between #30- and #60-mesh sieves and the eggs are washed out of the soil with water from a hose. The eggs are surface-disinfected by soaking in a LYSOL® (Reckitt Benckiser LLC, Parsippany, N.J.) solution for three minutes, rinsed three times with sterile water, washed one time with a 10% formalin solution and then rinsed three additional times in sterile water. The eggs are then dispensed onto sterile coffee filters and hatched overnight at 27 degrees Celsius, 60% relative humidity, in complete darkness.

[0239] Insect diet is prepared essentially according to Pleau et al. (2002) Entomologia Experimentalis et Applicata, 105:1-11, with some modifications. 9.4 grams of Serva agar is dispensed into 540 milliliters of purified water and agitated until the agar is thoroughly distributed. The water/agar mixture is heated to boiling to completely dissolve the agar, and poured into a Waring blender. The blender is maintained at low speed while 62.7 grams of Bio-Sery mix (F9757), 3.75 grams lyophilized maize root, 1.25 milliliters of green food coloring, and 0.6 milliliters of formalin are added to the hot agar mixture. The mixture is then adjusted to pH 9.0 with the addition of a 10% potassium hydroxide solution. The approximately 600 milliliter volume of liquid diet is continually mixed at high speed and maintained at from about 48 to about 60 degrees Celsius using a sterilized Nalgene-coated magnetic stir bar on a magnetic stirring hot plate while being dispensed in aliquots of 200 microliters into each well of FALCON 96-well round bottom microtiter plates. The diet in the plates is allowed to solidify and air dry in a sterile biohood for about ten minutes.

[0240] Thirty (30) microliter volumes of test samples, containing either control reagents or the polynucleotide (dsRNA triggers) to be tested in varying quantities, are overlayed onto the surface of the solidified insect diet in each well. The plates are allowed to stand in a sterile biohood for up to one half hour after application of test samples to allow the reagents to diffuse into the diet and to allow the surface of the diet to dry. One WCR neonate larva is deposited in each well with a fine paintbrush. Plates are then sealed with Mylar and ventilated using an insect pin. From 12 to 72 larvae are tested per dose, depending on the design of the assay. The bioassay plates are incubated at 27 degrees Celsius, 60% relative humidity, in complete darkness for 12-14 days. Mortality or stunting of the larvae is observed at the last (12-14) day time point: the number of surviving larvae per dose is recorded and larval mass is determined by weighing each surviving larva with an analytical balance. Data are analyzed using JMP©4 statistical software (SAS Institute, 1995) and a full factorial ANOVA is conducted with a Dunnett's test to look for treatment effects compared to the untreated control (P<0.05). A Tukey-Kramer post hoc test is performed to compare all pairs of the treatments (P<0.05).

[0241] It is anticipated that the combination of certain recombinant RNAs of this invention (e. g., the dsRNA triggers described herein) with one or more non-polynucleotide pesticidal agents will result in a synergetic improvement in prevention or control of Diabrotica species infestations, when compared to the effect obtained with the recombinant RNA alone or the non-polynucleotide pesticidal agent alone. Routine insect bioassays such as the bioassay employing an artificial diet described here are useful for defining dose-responses for larval mortality or growth inhibition using combinations of the polynucleotides of this invention and one or more non-polynucleotide pesticidal agents (e. g., a patatin, a plant lectin, a phytoecdysteroid, a Bacillus thuringiensis insecticidal protein, a Xenorhabdus insecticidal protein, a Photorhabdus insecticidal protein, a Bacillus laterosporous insecticidal protein, and a Bacillus sphearicus insecticidal protein). One of skill in the art can test combinations of polynucleotides and non-polynucleotide pesticidal agents in routine bioassays to identify combinations of bioactives that are synergistic and desirable for use in protecting plants from Diabrotica species infestations.

### Example 4

[0242] This example illustrates non-limiting embodiments of the use of polynucleotides of this invention in topically applied compositions for preventing or controlling Diabrotica species infestations.

[0243] Compositions containing one or more polynucleotides of this invention are useful as topical treatments of plants, animals, or environments wherein prevention or control of a Diabrotica species infestation is desired. In embodiments, a polynucleotide of this invention (e. g., a dsRNA trigger for each of the target genes with a sequence selected from SEQ ID NOs:1-15624, as described in Examples 2 and 3 above) is included in an effective amount in a composition designed to be provided directly (e. g., by contact or ingestion) to a Diabrotica species, or a plant or environment wherein prevention or control of infestation by that Diabrotica species is desired. Such compositions are formulated and manufactured according to the art and can be in any convenient form, e. g., a solution or mixture of solutions, an emulsion, a suspension, a dispersible powder, a solid or liquid bait, a seed coating, or a soil drench. Embodiments of such compositions include those where the polynucleotide of this invention is provided in a living or dead microorganism such as a bacterium or fungal or yeast cell, or provided as a microbial fermentation product, or provided in a living or dead plant cell, or provided as a synthetic recombinant polynucleotide. In an embodiment the composition includes a non-pathogenic strain of a microorganism that contains a polynucleotide of this invention; ingestion or intake of the microorganism results in stunting or mortality of the Diabrotica species; non-limiting examples of suitable microorganisms include E. coli, B. thuringiensis, Pseudomonas sp., Photorhabdus sp., Xenorhabdus sp., Serratia entomophila and related Serratia sp., B. sphaericus, B. cereus, B. laterosporus, B. popilliae, Clostridium bifermentans and other Clostridium species, or other spore-forming gram-positive bacteria. In an embodiment, the composition includes a plant virus vector including a polynucleotide of this invention; feeding by a Diabrotica species on a plant treated with the plant virus vector results in stunting or mortality of the Diabrotica species. In an embodiment, the composition includes a baculovirus vector including a polynucleotide of this invention; ingestion or intake of the vector results in stunting or mortality of the Diabrotica species. In an embodiment, a polynucleotide of this invention is encapsulated in a synthetic matrix such as a polymer or attached to particulates and topically applied to the surface of a plant; feeding by a Diabrotica species on the topically treated plant results in stunting or mortality of the Diabrotica species. In an embodiment, a polynucleotide of this invention is provided in the form of a plant cell (e. g., a transgenic maize plant cell of this invention) expressing the polynucleotide; ingestion of the plant cell or contents of the plant cell by a Diabrotica species results in stunting or mortality of the Diabrotica species.

[0244] Such compositions can include the appropriate stickers and wetters required for efficient foliar coverage as well as UV protectants to protect polynucleotides such as dsRNAs from UV damage. Such additives are commonly used in the bioinsecticide industry and are known to those skilled in the art. Compositions for soil application can include granular formulations that serve as bait for Diabrotica species larvae. Such compositions can include a carrier agent, a surfactant, an organosilicone, a polynucleotide herbicidal molecule, a non-polynucleotide herbicidal molecule, a non-polynucleotide pesticide, a safener, and an insect growth regulator. In embodiments, the composition further includes at least one pesticidal agent selected from the group consisting of a patatin, a plant lectin, a phytoecdysteroid, a Bacillus thuringiensis insecticidal protein, a Xenorhabdus insecticidal protein, a Photorhabdus insecticidal protein, a Bacillus laterosporous insecticidal protein, and a Bacillus sphearicus insecticidal protein.

[0245] Such compositions are applied in any convenient manner, e. g., by spraying or dusting the Diabrotica species directly, or spraying or dusting a plant or environment wherein prevention or control of infestation by that Diabrotica species is desired, or by applying a coating to a surface of a plant, or by applying a coating to a seed in preparation for the seed's planting, or by applying a soil drench around roots of a plant for which prevention or control of infestation by that Diabrotica species is desired.

[0246] An effective amount of a polynucleotide of this invention is an amount sufficient to provide control of the Diabrotica species, or to prevent infestation by the Diabrotica species; determination of effective amounts of a polynucleotide of this invention are made using routine assays such as those described in Example 3 above. While there is no upper limit on the concentrations and dosages of a polynucleotide of this invention that can be useful in the methods and compositions provided herein, lower effective concentrations and dosages will generally be sought for efficiency. The concentrations can be adjusted in consideration of the volume of spray or treatment applied to plant leaves or other plant part surfaces, such as flower petals, stems, tubers, fruit, anthers, pollen, leaves, roots, or seeds. In one embodiment, a useful treatment for herbaceous plants using 25-mer polynucleotides of this invention is about 1 nanomole (nmol) of polynucleotides per plant, for example, from about 0.05 to 1 nmol polynucleotides per plant. Other embodiments for herbaceous plants include useful ranges of about 0.05 to about 100 nmol, or about 0.1 to about 20 nmol, or about 1 nmol to about 10 nmol of polynucleotides per plant. In certain embodiments, about 40 to about 50 nmol of a ssDNA polynucleotide of this invention is applied. In certain embodiments, about 0.5 nmol to about 2 nmol of a dsRNA of this invention is applied. In certain embodiments, a composition containing about 0.5 to about 2.0 mg/mL, or about 0.14 mg/mL of a dsRNA or an ssDNA (21-mer) of this invention is applied. In certain embodiments, a composition of about 0.5 to about 1.5 mg/mL of a dsRNA polynucleotide of this invention of about 50 to about 200 or more nucleotides is applied. In certain embodiments, about 1 nmol to about 5 nmol of a dsRNA of this invention is applied to a plant. In certain embodiments, the polynucleotide composition as topically applied to the plant contains at least one polynucleotide of this invention at a concentration of about 0.01 to about 10 milligrams per milliliter, or about 0.05 to about 2 milligrams per milliliter, or about 0.1 to about 2 milligrams per milliliter Very large plants, trees, or vines can require correspondingly larger amounts of polynucleotides. When using long dsRNA molecules of this invention that can be processed into multiple oligonucleotides (e. g., multiple triggers encoded by a single recombinant DNA molecule of this invention), lower concentrations can be used. Non-limiting examples of effective polynucleotide treatment regimes include a treatment of between about 0.1 to about 1 nmol of polynucleotide molecule per plant, or between about 1 nmol to about 10 nmol of polynucleotide molecule per plant, or between about 10 nmol to about 100 nmol of polynucleotide molecule per plant.

[0247] Embodiments of compositions of this invention include a “transfer agent”, i. e., an agent that, when combined with a composition including a polynucleotide of this invention that is topically applied to the surface of an organism, enables the polynucleotide to enter the cells of that organism. Such transfer agents can be incorporated as part of the composition including a polynucleotide of this invention, or can be applied prior to, contemporaneously with, or following application of the composition including a polynucleotide of this invention. In embodiments, a transfer agent is an agent that improves the uptake of a polynucleotide of this invention by a Diabrotica species. In embodiments, a transfer agent is an agent that conditions the surface of plant tissue, e. g., seeds, leaves, stems, roots, flowers, or fruits, to permeation by a polynucleotide of this invention into plant cells. In embodiments, the transfer agent enables a pathway for a polynucleotide of this invention through cuticle wax barriers, stomata, and/or cell wall or membrane barriers into plant cells.

[0248] Suitable transfer agents include agents that increase permeability of the exterior of the organism or that increase permeability of cells of the organism to polynucleotides of this invention. Suitable transfer agents include a chemical agent, or a physical agent, or combinations thereof. Chemical agents for conditioning or transfer include (a) surfactants, (b) an organic solvent or an aqueous solution or aqueous mixtures of organic solvents, (c) oxidizing agents, (d) acids, (e) bases, (f) oils, (g) enzymes, or combinations thereof. In embodiments, application of a composition of this invention and a transfer agent optionally includes an incubation step, a neutralization step (e. g., to neutralize an acid, base, or oxidizing agent, or to inactivate an enzyme), a rinsing step, or combinations thereof. Suitable transfer agents can be in the form of an emulsion, a reverse emulsion, a liposome, or other micellar-like composition, or can cause the polynucleotide composition to take the form of an emulsion, a reverse emulsion, a liposome, or other micellar-like composition. Embodiments of transfer agents include counter-ions or other molecules that are known to associate with nucleic acid molecules, e. g., inorganic ammonium ions, alkyl ammonium ions, lithium ions, polyamines such as spermine, spermidine, or putrescine, and other cations. Embodiments of transfer agents include organic solvents such as DMSO, DMF, pyridine, N-pyrrolidine, hexamethylphosphoramide, acetonitrile, dioxane, polypropylene glycol, or other solvents miscible with water or that dissolve phosphonucleotides in non-aqueous systems (such as is used in synthetic reactions). Embodiments of transfer agents include naturally derived or synthetic oils with or without surfactants or emulsifiers, e. g., plant-sourced oils, crop oils (such as those listed in the 9^{th} Compendium of Herbicide Adjuvants, publicly available on-line at herbicide.adjuvants.com), paraffinic oils, polyol fatty acid esters, or oils with short-chain molecules modified with amides or polyamines such as polyethyleneimine or N-pyrrolidine.

[0249] Embodiments of transfer agents include organosilicone preparations. For example, a suitable transfer agent is an organosilicone preparation that is commercially available as Silwet® L-77 surfactant having CAS Number 27306-78-1 and EPA Number: CAL.REG.NO. 5905-50073-AA, and currently available from Momentive Performance Materials, Albany, N.Y. In embodiments where a Silwet L-77 organosilicone preparation is used as transfer agent in the form of a spray treatment (applied prior to, contemporaneously with, or following application of the composition including a polynucleotide of this invention) of plant leaves or other plant surfaces, freshly made concentrations in the range of about 0.015 to about 2 percent by weight (wt percent) (e. g., about 0.01, 0.015, 0.02, 0.025, 0.03, 0.035, 0.04, 0.045, 0.05, 0.055, 0.06, 0.065, 0.07, 0.075, 0.08, 0.085, 0.09, 0.095, 0.1, 0.2, 0.3, 0.4, 0.5, 0.6, 0.7, 0.8, 0.9, 1.0, 1.1, 1.2, 1.3, 1.4, 1.5, 1.6, 1.7, 1.8, 1.9, 2.0, 2.1, 2.2, 2.3, 2.5 wt percent) are efficacious in preparing a leaf or other plant surface for transfer of a polynucleotide of this invention into plant cells from a topical application on the surface. One embodiment includes a composition that comprises a polynucleotide of this invention and a transfer agent including an organosilicone preparation such as Silwet L-77 in the range of about 0.015 to about 2 percent by weight (wt percent) (e. g., about 0.01, 0.015, 0.02, 0.025, 0.03, 0.035, 0.04, 0.045, 0.05, 0.055, 0.06, 0.065, 0.07, 0.075, 0.08, 0.085, 0.09, 0.095, 0.1, 0.2, 0.3, 0.4, 0.5, 0.6, 0.7, 0.8, 0.9, 1.0, 1.1, 1.2, 1.3, 1.4, 1.5, 1.6, 1.7, 1.8, 1.9, 2.0, 2.1, 2.2, 2.3, 2.5 wt percent). One embodiment includes a composition that comprises a polynucleotide of this invention and a transfer agent including Silwet L-77 in the range of about 0.3 to about 1 percent by weight (wt percent) or about 0.5 to about 1% by weight (wt percent).

[0250] Organosilicone compounds useful as transfer agents for use in this invention include, but are not limited to, compounds that include: (a) a trisiloxane head group that is covalently linked to, (b) an alkyl linker including, but not limited to, an n-propyl linker, that is covalently linked to, (c) a polyglycol chain, that is covalently linked to, (d) a terminal group. Trisiloxane head groups of such organosilicone compounds include, but are not limited to, heptamethyltrisiloxane. Alkyl linkers can include, but are not limited to, an n-propyl linker Polyglycol chains include, but are not limited to, polyethylene glycol or polypropylene glycol. Polyglycol chains can comprise a mixture that provides an average chain length “n” of about “7.5”. In certain embodiments, the average chain length “n” can vary from about 5 to about 14. Terminal groups can include, but are not limited to, alkyl groups such as a methyl group. Organosilicone compounds useful as transfer agents for use in this invention include, but are not limited to, trisiloxane ethoxylate surfactants or polyalkylene oxide modified heptamethyl trisiloxane. An example of a transfer agent for use in this invention is Compound I:

[chemical structure]

[0251] Organosilicone compounds useful as transfer agents for use in this invention are used, e. g., as freshly made concentrations in the range of about 0.015 to about 2 percent by weight (wt percent) (e. g., about 0.01, 0.015, 0.02, 0.025, 0.03, 0.035, 0.04, 0.045, 0.05, 0.055, 0.06, 0.065, 0.07, 0.075, 0.08, 0.085, 0.09, 0.095, 0.1, 0.2, 0.3, 0.4, 0.5, 0.6, 0.7, 0.8, 0.9, 1.0, 1.1, 1.2, 1.3, 1.4, 1.5, 1.6, 1.7, 1.8, 1.9, 2.0, 2.1, 2.2, 2.3, 2.5 wt percent).

[0252] Embodiments of transfer agents include one or more salts such as ammonium chloride, tetrabutylphosphonium bromide, and ammonium sulfate, provided in or used with a composition including a polynucleotide of this invention. In embodiments, ammonium chloride, tetrabutylphosphonium bromide, and/or ammonium sulfate are used at a concentration of about 0.5% to about 5% (w/v), or about 1% to about 3% (w/v), or about 2% (w/v). In certain embodiments, the composition including a polynucleotide of this invention includes an ammonium salt at a concentration greater or equal to 300 millimolar. In certain embodiments, the composition including a polynucleotide of this invention includes an organosilicone transfer agent in a concentration of about 0.015 to about 2 percent by weight (wt percent) as well as ammonium sulfate at concentrations from about 80 to about 1200 mM or about 150 mM to about 600 mM.

[0253] Embodiments of transfer agents include a phosphate salt. Phosphate salts useful in a composition including a polynucleotide of this invention include, but are not limited to, calcium, magnesium, potassium, or sodium phosphate salts. In certain embodiments, the composition including a polynucleotide of this invention includes a phosphate salt at a concentration of at least about 5 millimolar, at least about 10 millimolar, or at least about 20 millimolar. In certain embodiments, the composition including a polynucleotide of this invention includes a phosphate salt in a range of about 1 mM to about 25 mM or in a range of about 5 mM to about 25 mM. In certain embodiments, the composition including a polynucleotide of this invention includes sodium phosphate at a concentration of at least about 5 millimolar, at least about 10 millimolar, or at least about 20 millimolar. In certain embodiments, the composition including a polynucleotide of this invention includes sodium phosphate at a concentration of about 5 millimolar, about 10 millimolar, or about 20 millimolar. In certain embodiments, the composition including a polynucleotide of this invention includes a sodium phosphate salt in a range of about 1 mM to about 25 mM or in a range of about 5 mM to about 25 mM. In certain embodiments, the composition including a polynucleotide of this invention includes a sodium phosphate salt in a range of about 10 mM to about 160 mM or in a range of about 20 mM to about 40 mM. In certain embodiments, the composition including a polynucleotide of this invention includes a sodium phosphate buffer at a pH of about 6.8.

[0254] Embodiments of transfer agents include surfactants and/or effective molecules contained therein. Surfactants and/or effective molecules contained therein include, but are not limited to, sodium or lithium salts of fatty acids (such as tallow or tallowamines or phospholipids) and organosilicone surfactants. In certain embodiments, the composition including a polynucleotide of this invention is formulated with counter-ions or other molecules that are known to associate with nucleic acid molecules. Non-limiting examples include, tetraalkyl ammonium ions, trialkyl ammonium ions, sulfonium ions, lithium ions, and polyamines such as spermine, spermidine, or putrescine. In certain embodiments, the composition including a polynucleotide of this invention is formulated with a non-polynucleotide herbicide e. g., glyphosate, auxin-like benzoic acid herbicides including dicamba, chloramben, and TBA, glufosinate, auxin-like herbicides including phenoxy carboxylic acid herbicide, pyridine carboxylic acid herbicide, quinoline carboxylic acid herbicide, pyrimidine carboxylic acid herbicide, and benazolin-ethyl herbicide, sulfonylureas, imidazolinones, bromoxynil, delapon, cyclohezanedione, protoporphyrinogen oxidase inhibitors, and 4-hydroxyphenyl-pyruvate-dioxygenase inhibiting herbicides. In certain embodiments, the composition including a polynucleotide of this invention is formulated with a non-polynucleotide pesticide, e. g., a patatin, a plant lectin, a phytoecdysteroid, a Bacillus thuringiensis insecticidal protein, a Xenorhabdus insecticidal protein, a Photorhabdus insecticidal protein, a Bacillus laterosporous insecticidal protein, and a Bacillus sphearicus insecticidal protein.

[0255] All of the materials and methods disclosed and claimed herein can be made and used without undue experimentation as instructed by the above disclosure. Although the materials and methods of this invention have been described in terms of preferred embodiments and illustrative examples, it will be apparent to those of skill in the art that variations can be applied to the materials and methods described herein without departing from the concept, spirit and scope of this invention. All such similar substitutes and modifications apparent to those skilled in the art are deemed to be within the spirit, scope and concept of this invention as defined by the appended claims.

The application's sequence listing, which the Patent Office published only in electronic form, follows.

SEQUENCE LISTING (15624 sequences)

SEQ ID NO: 1 - DNA, 2183 bp, Diabrotica virgifera
  SmartBlast Evalue=0; Info=Heat shock 70 kDa protein cognate 4 n= 18 Tax=Endopterygota RepID=HSP7D_MANSE
cggatttgactttttattttattcatgaacgaacataattattgcagtaatttttgaactgttaccaaaaacgttgtctaacaattgaaaaattgtgtaaaaaaagtaattttaaaaagctttgtctgcaagtaatactgcacaacggttaacaaaagtttaaaaaatggaatgaatagtttaatcgacttcttcaatggttggtccagcacctccagcggcgcctgcagctcctggagctgctccacctgggaaaccaccgggcatgccacctggagctccaccggcaccttggtacaacttggtgatgatggggttgcagatgttttcgagctccttttgtttgtgttcatattcttccttgtcggctaattggttagcatccaaccaagcaataacctcgttgcatttctccatgacggtagttttgtcactttcgctgatcttgtccttgattttgtcatcttccatggtgctcttgatgttgaaacagtatgattcgaggacgttcttggcagagatggtagccttttgcttatcatcttcgttacggtatttttctgcatcgttgaccattctttcaatgtcttctttgctgagacgacctttatcattggtgatggtgatcttgttttctttgttggtggatttttcaatagctgtgacgttcaagataccgttggcatcaatgtcgaaggttacttcaatctgagggacaccacggggcgcaggaggaatgccggtaagttcgaattttcccaagaggttgttgtccttggtcatggcacgttcaccttcatatacctgaataagtactccgggttggttgtcagagtaagtagtgaaggtctgggtttgcttggtgggaatggtagtgttacgtttgatgagggcagtcataacacctccggcagtttcaatacccaatgaaagtggagtgacatcgagcaagagcaagtcctgtacttcctcagacttatctccgtgcaagatggcggcttggacggctgcaccataagcaacagcttcatcggggttgatcgacttgttcaattctttaccattgaagaaatcttgcaacagtttttgtacctttggaatacgggtagatccaccaaccaacacaatatcgtgaacttgagatttgtccatcttggcatccctgatggccttttctacaggttccatggtagatctgaacaaatcagcgttcagttcttcaaatctagccctggtgattgaggtgtagaagtcaataccctcaaatagagaatcgatttcaatgctggcttgggttgatgaggaaagggtacgcttagctctttcacagcttgttctcaaacgacggagggcacgtttgtttgtggtaaggtccttcttgtatttcctcttgaattctccaacaaagtgattgaccattctgttgtcgaagtcttcacctcccaagtgagtgtctccagcagttgatttgacttcaaagataccatcttcaattgttaagattgatacatcaaaagtaccaccacccagatcgaaaatgaggacgtttctttcaccttggccctttttgtctaaaccataggcgatggcagcagcagtgggttcgttaataatacgtaatacctggagtccagcaatggttccagcatctttggtagcttgacgttgtgagtcattgaaatatgcaggtactgtgatgacagcgttggtgacattctttcctaagtatgcttctgctgtttccttcatttttgtaaggaccatggaactgacttcttctgggtagaaggatttgtcttcgcccttgtatgcaactttaatctttggtttacctgcatcatttactacttcaaatggccaatgtttcatgtcagactgtacagcactgtcatcaaagcgacgcccaataagacgtttggcatcaaaaattgtgttattggggttcatggctacctggttcttggcagcatctccgatgagacgttctgtgtctgtgaaggccacatatgatggtgtggttctgttaccttggtcgttggcaataatttcaactttgccatgttggaaaactcctacacaggagtatgtggttcctaaatcaatacctacagctggggctttagccatcttataattaattatttgcagacaattcttaaataaatacttaaattacgtgtgca

SEQ ID NO: 2 - DNA, 522 bp, Diabrotica virgifera
tatatatgcctttttttattttaaatcatatgcttagaacagaatactttttaatatactaagggcatattttgccccaagagaggataatgattctcttgtccaaccaagttttgggtccattcttggttccaccatccgggttgttccatggcttcataatgttgtgggtattgttgtccgtatctctggttccagtattgggacaatggcatttgttgttggtggagattgtagttgtattgggactctaggttcatgttgttttgtgcggaatactggcgggtccatggtaaaacggtttcatagttcaatggaagaagttgtctgtaggcccatgggagtacttgtccttggttccatgaaagtacttgttcacggttccagggttgaacttgttcaagttgttggtaatgtaaaggagtaagttcgtattgaatgtggagtacgaattctaccaattgttggagttgttgttgggataaggttgtaccgtagaggtattggtgttgcatgatctgg

SEQ ID NO: 3 - DNA, 826 bp, Diabrotica virgifera
  SmartBlast Evalue=1E-125; Info="Cathepsin L-like proteinase"" n= 1 Tax=Diabrotica virgifera virgifera RepID=Q70EX2_DIAVI"
acacaatgctaaatacgaaaagggagaagaaacctactacatggctgttaacaaattcgccgattggtccagcgcagaattccaagccatgttggaccgccagatggctaacaagccaaaacaatccttcattgcaaaacacgtagtcgatcccaatgtccaagctgtagaagaagttgattggagagaaactgctgttttgggagtcaaagatcaaggacagtgtggatcatgctgggctttcagtaccaccggagctatcgaaggtcaactcgctattcacaaaaacgaacgtgttcctctcagtgaacaagaattggtagactgtgataaggtaaaccttggttgtgacggaggtttgatgacagatgccttcttttatgttgaacatcatggtctttcatcagaagaacaatacccctatacaggcgtaggtggtcattgcaaccatgtaaaaaacaaacaagtctcttcgatcaatggttacgtcgaacttgatgaaactgaaagtgctctagctgatgctctcgctactgttggtccagtgtcaatagctgtcgacgctgatacatggcaattctattcaggtggagttttcaacaataaaaattgtggaaacgctcttaaccatggtgttcttgctgtgggatacactaaagatgccttcgtcgttaaaaactcatggggaacaagctggggtgaacaaggttacatcagagttgcccgtggtagcaacctatgtggtattaacctcatgaactcttaccccaagttgtaaataacagttaataaaaagttatatatattaataaatgatataaattac

SEQ ID NO: 4 - DNA, 540 bp, Diabrotica virgifera
  SmartBlast Evalue=2E-32; Info=Chromodomain-helicase-DNA-binding protein 1 n=1 Tax=Harpegnathos saltator RepID=E2BBM7_9HYME
aaagattatgaaaaagcaattagatctaaagaagggggttcaaaaaccaaaaagacagagaaaaaaagaacaaaaagttcttactaaggaaattattgatgacgatgaaagctcaaatgatgtttcatcattaccaagttccgctccagttacagtatcagtagctccggttgttaaaaaggtaaagaaagaagtgaaaaaagaaaaggaggataaagaagaatcctcgcccgagaaaaaggaaaaaaagaaggataagaaaaaagagaaaaagacgtctggtccaatgcatttctctacaaatgaacctgttgccttaaacgttttgggtgatctagaccctttgatatttaatgaatgtaaagaaaaaatgagaccagtcaaaaaagctttgaaagcgttggacaatcctgacgaatctttgcccgaggcggaacaagtccagcatacacgagactgtttacttcaaattggcgagcagattaacacctgccttttaaaatacaccgatccagagaagatcaaggagtggagaagcaa

SEQ ID NO: 5 - DNA, 890 bp, Diabrotica virgifera
  SmartBlast Evalue=1E-24; Info="Cathepsin L-like proteinase"" n= 1 Tax=Diabrotica virgifera virgifera RepID=Q70EX2_DIAVI"
tgccacaagtaggaccattttctcatcattttatgttttgatgtgtttatttgttcatccgtagttaattcgcaatgtatctgttcctgttcccccatttctatgctttctttggcaattttatctccaatttcattatttgttattcctacgtgtgttttaacccagaagaattttataaatttattttgatcttgtaattttttaataataattgtttgggtgataccaagataataccatttgttgtatttgagttgcattttaaaattttaagaacttaaagtgaatcggagaagataatggcattctgtttctcttcctgttgtacatattctagtgcttttagaattgctattacctcagctgtgaagatagatgtgtttttatgtagcttataatgtttttgtacacgtttaggtattacgaaggaacaacctgtgccgtatggccgtagttagccttcgggccgcataaaaattctagagggccgctggttgagtatcactgatggaccgtagaggtgtagggaaaaaacaagtttcttggttaaaaacattcgttaatggactcagatatcaaatgtaggacaattatgtcatatttcagaagatcgagattttgattggtcttcaatgttgctgtttaaaataaatccaaatcattagttttttatttatctttatttttgaattctatttggtgtttcatttgcattaaatcatttacaatttagggtaagagttcatgaggttaataccacacaagttttcaccacgggcaactctgatgtaaccttgttcaccccagctagttccccatgagttcttgacaatgaatgcatctttagtgtatccaacagcaagaacaccgtgattgaggttggttct

SEQ ID NO: 6 - DNA, 553 bp, Diabrotica virgifera
agaataaatctacccttatacgagacttatttacacaaagtttttgcaaacttatttttaataatcactttgtacaacagttgaagagttcttggattttatcgatatttttgatcccttcataataacagtatttatggtgataatcggttaataaaataaacaatggcagtaataatgaagtcactagaccaaacataaatatgtcacttttgatacactctccgataagcaataaaatagtaagcattgattttgtattacagacatttggatagaggatagatcaatttttaacttaacagagagtggatcagacaacatactatgtctatcccatgtgaccgaatatctgcctttaattttgacattctcaatattcttcgaccagatcaatttagatcagaaccaaaatagcttcgacataatggttccgtcgcttttaaaaacgattcctacggtacatcgtctagtctataagtgcggcgagtaaagacttaaacacaacataacaatttcatccaaaaaaatattgcattcgcttgaattttct

SEQ ID NO: 7 - DNA, 1182 bp, Diabrotica virgifera
gtaagtattaatattaaagtagcatcgttttaagaatggcattatacaaaataaaagtaataccgttatcacactaaaaagataagtagtagcgattcatatcttaatgtattgttgacagagcacttgaactttttagattttaaaaaaggatgtgatccaattaatacattttctcacatacataggtatgacgtagcagtatatataatataatatgataaatcactaaaccaatataacaaaatatcgaactcaacaaaacttttgaatgtagcatcaacagaaactcatgcacctaccaagctctaagcttcttggtattttacttcaagaaaatggaaaacgataagactacgagaagaataacaaaggaattatccacaaaaagagagtctttccttatatcaagatggacctatgaaccaagttgcaagactacggtttttatttttactcacggaaaaataaaataaatgaaaatactagtttttcacttctaagacgatataaggcagagcattgtcgtgcagaaaagtgacaagcttttctggaccttttggtcatattgcttgataaaccttgtttaaaatttgcctataaaggttttccttaatatgtaccctagtttccgaaaactacatgagaaagggtttttcaaggttgaaaaaacatgttaacatgagcttgcccacagaaggttgaaatttgtatggctgcacgctgattatatgaccaacgccattttgaagtcactttactttgacttttgtagttaaatacaaatgatagaaactgatcagtgtgacgtgtacgcgtacaaacataactaacatttcagaacatcagttgagccattacaattgtttccaaggctaacctgaccaaatatatgtttcaattattgaacaagtttatatcttcctgacttcaagagaaatacctgtactaattttaaagactctaaaatggaccgatagaaagataacgacatgagttcaataagatcggtcggattcttcataagtactggttataaaatatacatataaaaaatactggacaataattataaaaaaaaacacaacaaagatatatcactcctacgtggtgacataggcagaaacacttcaaaatatatcaattgtatcgacgtactcgataaaaattaaattaataaaa

SEQ ID NO: 8 - DNA, 884 bp, Diabrotica virgifera
  SmartBlast Evalue=2E-60; Info=Zinc finger CCCH-type with G patch domain-containing protein n=1 Tax=Camponotus floridanus RepID=E2ARD4_9HYME
ctcctgtatagtcatactcttaatatttaagtctctagatgattctttctttatgtcttgtctggtttctaatctgttgttctggctactggttgcctgaacggttttgttgataaatgtgaaaaggtcttttttctgatctctctcgtatgcttttctgctttgattttcttgttttcgttggatacgtttcatttttcgttcgacgctgaagagatctttatctccacctgatcgttccctgaggttcatgcaataatctatagattttcctgctggaaatataacagcattaacaggattgattataccttctgcacgttttcctaaaccagttcctacgatgtatcccattttcatcattagttttgaccccatgccctttgtgtgtttttcccaatcacccattcgctgatccattggtttgacagtcaggctcatattgataatatcttcctgaatactttcatcttctaaattttcagtatcatcttcatcattatcatcatcactacttccattacagttatccaacggacaaatatgttctaaaaccacttcttgttcctttcgattactgtcaaattggactaaacatttatctccatgtatactcttaatacgggctctataccataagttgttatttcgttttgccaatactgaattacctacttccagctggtcaaaatttggttctacatagtcttgaagacttgaatagggtactatttctccgtgagaaaatttacattgctcctctgagaatttacaatctgagttgtaatagaaaggacatggtagcatttcttggtgggtggggtttataaaaaggacccttaccttaagttcttcgttttcgttagaaaccactgaacaaatca

SEQ ID NO: 9 - DNA, 593 bp, Diabrotica virgifera
ttcattatttgttcgtgggaccatggggcttgaccgaagtgctggtataattcagacataacgtggaacataagttgttggtgagcccatggggtttgcataacttcatgcataatgtcgttgtatttcattgggtattggttgaagtagttcatcatgtatggtacaatttgctcgttggagctccataagtgttcaggaaggtgttgatacaacatattctgaagacgttcattggcagttacatcatgagtccattggttccattgttggtgaagtctgacgtagttgagtagcaactgaacacgttgaacgggagttaagttttgcacatcctggacatcccaagagtgatacatccaaggtaaatcgacattttcagcttggttgctgcgttgcacgtactgcctccagtagttaccgggttggttctggacaccatattgtacccattggttccatggttcttgtccatagtgttgctgattccaagtcctccagaagttgtagacgggatgagcgttgtagctgttgtagtctacatcaacgtattgttgatttctggatgctggtaagcagctgctcaaggcaac

SEQ ID NO: 10 - DNA, 551 bp, Diabrotica virgifera
  misc_feature (37)..(37): n is a, c, g, or t
  SmartBlast Evalue=2E-62; Info="Cathepsin L-like proteinase"" n= 1 Tax=Diabrotica virgifera virgifera RepID=Q70EX2_DIAVI"
gtgtgtccttggtctagttctctttagtttttttttnttttttttttttttgtaatttatatcatttattattataaatatatcacttttcattaactgttatctacaacttggggtaagagttcatgaggttaataccacataagttgctaccacgggcaactctgatgtaaccttgttcaccccagcctgttccccatgagtttttaacgatgaagacatctttagtgtatcccacagcaagaacaccgtggttaagagcgtctccacaatttttattgttgaaaactccacctgaatagaattgccatgtatcagcttcgacagctattgacactggaccaacattagcgagagcatcagctagagcactttcagtttcatcaagttcgacgtaaccactgatcgaagagacttgtttgtcttttacatgattgcaatgaccatctacgcctgtataggggtattgttcttctgatgaaagaccatgatgttcaatataaaagaaggcatctgtcatcaaacctccgtcacaaccatcgtttacctta

SEQ ID NO: 11 - DNA, 755 bp, Diabrotica virgifera
  SmartBlast Evalue=5E-98; Info="Cathepsin L-like proteinase"" n= 1 Tax=Diabrotica virgifera virgifera RepID=Q70EX2_DIAVI"
atttatttatttctttatgcaaacttacatatttataatgtatattatttatttattctcatttacaatttgggataactgttcatttggttaagaccgcataagttgtgaccgcgactaattctgatgtaaccaagttcaccccagctggttccccatgagtttttaacgatgaagacgtcattagtgtatcccacagcaagaactccgtgattaaggctagttccacaatttttattgttgaaaattccacctccataaagctgccatgtatctgcatctacagctatggatactggacctacgctagaaagagcactagccagtgcagcttcagttttggcaagatttacatatccactgatagtagaaagtgttcttgatcctcttttgcagctaccatctctgccggtgtaagcatattgcttttctgatgcaagtccgtggctcttaacatatgcaaaggcatttgtcattaaaccgccattgcaaccagagtttgatgagtcacagtctaccaattcttgttcacttagtgggaccttttgatttttgtgaatggcaagttgaccttcgagagcacctgtggcactgaaagcccagcaagatccacaacttccttgatttttgactcccaaaacagctttgtttctccagtcaacagaacttgcaagttcaacattgggatctgcttcgtatgtttcgataaaggatagttctggtctgttgataatttgagaattcaacaaagcttt

SEQ ID NO: 12 - DNA, 1895 bp, Diabrotica virgifera
  SmartBlast Evalue=1E-118; Info=RNA-binding protein CUGBP1/BrUNO (Fragment) n=1 Tax=Glossina morsitans morsitans RepID=D3TKQ4_ GLOMM
aaaagctctctggccatgaacaacaacaacaacattaccaaccagactaacaacaataacaacaacgttagtagcaacaacaataatttgttaaatgcgacaaacgcaaacgtcgtggcgttgacgcaaaccaaaaacgagcaagaacaacctgataacgacacgataaagatgttcgtgggacaagtgcctcgttcgatggacgagaacgacttaaggagaatgtttgaggaatacggcagggtacactcaataaacgtacttcgggataaagcaacgggagccagtaaaggttgctgttttgtgacgttcttcacaagaaaagctgccctactggctcaagatgctctgcacaacgtgaagactttaaatgggatgcatcatcccattcagatgaagccggccgacagcgagaataggaacgaaagaaaattattcgttggaatgttgagtaaaaagttgtgcgaaaacgatgtacgtgcccttttcaacggatacgggacaatcgaagagtgcaccgtgttaagagatccggcgggaaattctcgcggttgcgcgttcgtcaccttcgcctccaaacaatctgccttaagtgctatcaaaggccttcatcaatcacaaacgatggaaggctgttcagcgcctttagtagtcaaattcgccgatacgcaaaaagaaaaagaactgaaacggcaacaacagatgcaagccaatgtctggaatgccttagcagcaccaacgttagcttcaccacctcagcaattctcccccgttctacccaccgaagcaacgtcgctacagcttcttcaagcgatgggaggagccggcttgttgcaacagcaattccttagtgggactgaaaaccttttagcacccatcggggtacaaaatctggtgaccttggcggccatgtcgcaaccggctaccgcggctacagcgcctttcatggctaatttgttgggaaagggcgcgggggttgaaaggacgcttaacgcgagtttgcatccaacggcgcttacgacgtcggatttgtcgtcttacggatcgttaattagtaatgctacaataaatgctgcggcgatggctgcagcgggaaaacagattgagggtccagatggttgtaatctgttcatataccacctcccgcaagaattcaccgatacggatcttgcgtcaacatttctccccttcggtccagtcatatccgccaaggtgttcatagataaacagacaaatctgtccaaatgttttggttttgtttcatttgataacgcgcattcagctcaacaagccatatcagctatgaacggctttcagataggcaccaaaaggctgaaagtacaactaaaaagggccaaagatgcctccaaaccttactagccaaagaagcgagagagccaattagacgcaggtctgcccaggtacatagcaggcctctgtgatcatcaatatctatttttctcctgcgcaaacgagccacaccgattttcctttattttacttcaggtcaagaagcgtgtgatgctgctgccggcctcgtccgattggtccaaaatccagcacagtgccagtgcagtgcaatctcaggatctagctgctatttttatgaactgtgagatatttttactagttaactgcggtcgttaggccactttgtaaattcaaaatgatgtatatgacgaggatgttcgactctgtttagaaaaggcgaagtttttgaccaaaaatttaggaaataaaatattaatcttaccgtgtaactgataccaccttcttgtatagggaagtatgcaaacggcccaaataataatctgtatagtttgaagatagtttttgaacacttttagttcaagcagctaaatcgtaaagcgtcttgtgatatgattgaattaaag

SEQ ID NO: 13 - DNA, 1496 bp, Diabrotica virgifera
acaatatctagctgcggaaggctcgaaacagaagtggaagatcaagtgaatagagcaaacagagccgcaggttgcctgaatgacacaatatggagaaataaaaatatcggaaaagaaatgaaaggcagaatttacaaaacagtcatcagaccaataatgacatacgcggcagaaacacgacccgacacagagaggacaaaaagattgctcgaaacagcggagatgaaaacccttcgaaaaatcgatggtaagactctatgggacagagctagaagtacagatatacgacagaagacagggtaagaaatgaccacataagccgaatgacaacagagtagtcaggacagcgagagacggtttcccaataggcagacgatcagtggtaagaccacgaaaacgatggaacgacaacttactagaggcgcattgaaaaaacagacagtaatgtctatacaaaaaggagaagaataatttatgaaaattttgataataaataaacaaaatggcatcaacaatccattgcttttgtgcttatttttatttatacaatgagttaacttgttacaattttcaaataaaattggttataactttgtaaaatactctgtataacataacagtcctttatgcatttgtaatggcgaagttaagaagattttgaatataaaataaaatacagggtattccaataaataaaaataagtttggtctgccactatgttatcgaacaccctctgtaacattctaattaattttataaatgtgaatctcaaagttagctacaatttgtgctattaactcttattgctatctattactataacggatctacgtagctttaccccactaatcaatcaccctgtacatttaattggatatgtaaataaattctaattcggtaagattctcctaaattgatgcaacccaactccaatgataaatcgctgtaccgtttaggtacgacgataaattaaaacaactcgatccttgtgataagttgatgcaatccgataccaacttcaacccaactctaactttgataagtcgtgcgatgcaccgtttacacacaatgataagttgcaacaattcgattgatattgataagttgtttgatttatcgctgtgtctaaacgccgcttaatattggtcgattccaacggttatcagcttaatttatttatgtaaaaataaaattttatttacaaaattaattttacaaaaattataatttaattcgaaatgactttacaactatattcatttacaatcgtgcataaatacaaaaatatttattttgatttaacttacattaagaagtaatttaaaaccacgattacaaatgtagccataaaatatttcgtgcctgtaaataaacttgcagctgaacctttcgtagttgactcaggtgttgcaccagttgagtcacttgataaatctgtcgatgaaccagatgacgaagcagttgttgagtcagatggagaatctgtaggtgaggc

SEQ ID NO: 14 - DNA, 601 bp, Diabrotica virgifera
tattctataatcttacttattatccgttttcaagtgtgtggtgaattttacaaatattcaacataacttgataaaaactaaggggcttatggaaaagcactaaggggccaaaaagtgttaaaaacatcgtgtttaactgatggtgccataataataatgtaattagaacatacacaaacatttgggggaggtttaagggaacaaaaaagggttaatggggtgtacaaatttcactgttattttattttaagatgttcgtgtcataagcgggccacatgtccagtttcaatgtaaaatctgtaataattttcgagacccagtaatgggtgcactaagaatcagcaaaataacgccaaagacagaaaacatacgttgtgaaataaaaagatataaaactagtggaggtgggaaattatcaatagtaacctataaatttacattatattgatagtttcccacctttagatgtatcggaggagtttggcaactgccactaggacaggagaattttataaaattctgtgaccgtttgactccggaaaaactatgtcaaatacctgactatcgtgaagtccttaaaacagttaaatttccctggggc

SEQ ID NO: 15 - DNA, 1608 bp, Diabrotica virgifera
taccattctaagcgccgaatattatgctgtgatgtctgtgcaggacgacgcttcaccaatggtaaaaggacctggtgaatatctcttgtccttcacacaagaggggaaccagcttctatagtggttgatataataattaaactctgatattctttgtcgagtcgaagcaaggtgtaaatcggtgttgaatgattcaaaaacgtgtgggataattatttgatttaatacaatcactattatttacaagttctatccaatataattattattgggtttactacaacaaaaaacatacaacatacatacatttgctatgtacttagaattgatagtaaagtaaacagcgatttaagagccgagtatgtgattaataaagagtgagagaattaattcgcgtgaaaaaccgagtaatgataatgagaaaatgcgagccgtgaagtgagaagtcatcattcgaaagaaattctgagtagagttataaacacgagcgtctagtcatcaggatggctcacaagttactggggggagactaaaaaccgaccgaagcataaggattcctttttccttcgggttcaaaaagcaaaaagaaggggaactcatttatcaaagtcctatgcgtgtctaatttacgtttcagaaagaaacagaagctttaattttgtccgacagggacaaagctccttattgattttaggaaacataaatctgaacagcgagacagtttaaatcacacatggttgagttaaagatatagaaattgttcttaatttcgaccgaaaccctgggaaacaggatgtatcttaaaatcgagtgttttcatagtgcaaacaagggtgcttgtatccccgactaaacgggaagccaccctcgagaagcagtgttttctcggaattagttaattaggaagctacaaagggcagatatgttcgttttcaaataatcaaggattcgacgaatttgattaagattcttatataagtagaaatgataattagctttatgttagaaaatctaacagtgtcaaaggtaacaccaaaagctgacggtaagctctcggccccattccaagtggtctttgattaaattttcttcttgagactaaccttcctgtagctttaactaaatcatctcttacttgatgtacactgtcccatctatttctgaaagcacggctttgctatattctagaacgtccagaccctccatgacgccgataagtctcgttattggatcacctcctccaaactcttaacatcgttgatggattagcttaaactttttgttaaatttcccgtaaaccaaaacctgcatctttcatgcctacaattcgtccattttcgaagtcgtttaaatgacgaaattgccaaaaaccgcggacttaaggctgtatgacactatgcattttcttgtatcatttctaatatcgtttctgatatgtcaaaaaaatgtatagtgtcatacacagatacaagaaacgatacaagaatttgtgtcaggcacagattcttgtacaagaactgcgccaatttctgcgcaaagagcaaaaacgtaaaacctgctggtaaaacttctaatgtcataatggcggctgaaaatgagatcatatga

SEQ ID NO: 16 - DNA, 538 bp, Diabrotica virgifera
agtataattctttcatacagctgatttttgcaagattgtttgataaaaatatttacaattgactggtagtattgttcgacaaatttttaagggtaccacagttgttggatgcaccaaagtttggaaacctatatatttacgaggacgtctccctcccgaaaattttccgaaatagaaaagttgtccgacgtgacatgaataactgtggtaataatttttttcttaagtgtgggcccaagacctatagcctgctccaacttacacatccataatgtttgcctttgcaacatgtcacaatacaggcagaatctttaattgcaaataatattgatttcagaactaattaagtaaaataataaaaatatttatagattaatagatcagtggtagctaaaaattgtgatagatgactgatattaaatatgtttttaatactcattccagaaatttacactgtatatatataatcggttaggattttatacattttcaacaattttcagaaaattctctgtacaagaattgcaagagaatgtaa

SEQ ID NO: 17 - DNA, 2810 bp, Diabrotica virgifera
  SmartBlast Evalue=0; Info=Glucosamine--fructose-6-phosphate aminotransferase [isomerizing] 2 n=1 Tax=Harpegnathos saltator RepID=E2BPW7_9HYME
tacttcatgaaggtcgttattatatcggtatacctatacaaaatacctacctacggagaaatacgattctcgatatgattaccggtactcaaatacaaaagtaatcatagtaatcaaattatttttatctcttaaacaggtcggtgaaggtctttgttacatcggaatacctatacaaaatacctacctactgagaaatacgattctcgatataattgttggtactcaaataaaaaagtaacaaaagtaatcatagtaatcaaatcatttttatcccttaaacagatctgtgaaggtcgttgttatatcgaatacttatacaaaatacctacctactgagaaatacgattctcgatatgattaccggtactcaaatacaaaagtaatcatagtaatcaaagtaacgaatactgtaaatgattactttatacaaaatacctacctactgcgaaatacgattttcgatatgattaccggtactcaatacaaaagtaacaaaagtaatcatagtaatgaaagtaacgaatactataaatgattactttatacaaaagtaacgatttgtaacgaatactcgaaagtaactataatcaacatcactagtaaaaaatgccgaacctaaatgtacaatacttttaattctggtcccatcagaactatatgatttgatcttaaaaataatataaaagcactattcaacagtaacactcttggctaaatttcgggggcagtctacgttgcatcctttaagtacggcgatgtggaaagaaagaagttgcattggaataacggtgaggattccttggaggcagtccactgttttcggaatttcgaggtatttttggctgaaggccattgtttccttgtctccttcttggcagattaaaattggtttaccctcgcgagcagtaacctgttgcagagcattcatgcatttagtataaacatgatctctcatcatgatcatcattacgggcatggtttcatcgacaagagccagaggtccatgcttcaattcgccggccataataccctcactgtgcatgtaagttaattcttttactttcaaagctccctccagacaagtagcgaagttaaatccacgacccataataagcagagatttctttttgtacaagtcttcagcgagtcttttcactttgtcgtccaatttaagtacttcacggatttgactctgcaaatttcttaagccatcgattatctcttctcttctttgtctaagagataatctatcttcgctcatgactagtgcgaacataaccaatgaaataaactgacttgtgtatgctttagtggaagccacaccgatttctggaccagcattaatgtggacaccgcagtgtgattctctgcaaatggaactaccgacagtgttggtaataccgacaattaaggcacctctttgtttacagtatctcaaggccatgagtgtatctgccgtttccccagattgtgaaataaagaagcaaacgtcatctctgaacacaggtgtggtacgatctaaaaagtcactcgccaattccaccatgacgggtaattcagtcaattcttccagcaactgccttgtggcgatggcactgtggtaactggttccgcaaccgatcaacattagtcttctacatctttttacttctggaatgtagtcttttattccacccagagttacagtcccgttttcaaagtttacacgtcctctcatagtgttgatgacagattcgggttgttcaaaaatttctttctgcatgaagaaatcataatttcctttcattatctgttgcaactccatctttaaagtggtaatttctcgtttttgtggatcatctcccgctcttcggattctgtggatgctaagggaaccatttttaacagctgccacatcgtcatcttcaaaataaatcaccctgttggtatgctcaataattgcggaagcatctgaagcaaagaaatattcgacttgtttgtcttcaagaggttcgaattcggatgttgaccctgttcttggtaatgtagggtattctcctcgtccatgaggtctgaattctttctgagttggtgacgatggatcttcttttccgtataaaataggtacatggtcggtggctaaacgagtggcggttttgatgccaactagaagaggagaacctcttcttgtagccacgcattctccgggaaagaactttgatttgaaacaaagagcgaaagcgccttccaactgctgcacaacattctccacgagttctctaaacgaataagtaggatgcagcttgtaaaaatgataaatcaattttgcgattatctcggtatcagtgtcactctcgaatttgtgtcctttcttctcaaggaaaaccttgacttctttgtagttcgtgatgataccattgtggacgactacgaacccattttcgacatctgatctttgtggatggctgtttacctcactggggacaccatgagtggcccaacgggtgtgagcaataccgcaatggatgtccatcgacttttgcatgtctaagacatcacttttattttttatttcttcggcgagcagagcgaccttgccggtttttttaattatgaagatatccttggtttcgggggagtcgacagctacaccagctgagtcatatccacggtattccattcgtttgataccatttaccaataattctaaaatttcttccctcttcttgggggtcaagtagttcaaataaccgaaaattccgcacattgttaacacgctttacaccttagttacaatatcaaagaaacctcctcaacctatttaaaag

SEQ ID NO: 18 - DNA, 755 bp, Diabrotica virgifera
atttgcatttttttatattcatttcctctctactatatgttaagtaggagtacttttcagatgtgcatttaattaaaataattttcagatttaatatgtttgcaacaaacaccttgcattgaaactaatgtagaaaagataacatgttaattagcattttgtactatgattatttattttaaattcctcagtttcctttctacaaaattgaagatgtctaaaaacttcattagcattcaaaatataaattcctaatttttaaaatattctcagtaacaatttacaatactgctgttttcaaaatatactgataataacatcaaaacaatacacaatgaatttatattttatttattgtaccaggaaaacttacagaaaagtatacagtaaccaaaaaacaatcagatattattagttttcctttccatattagtccatgtgtgaggccactttcgtctgaaaaatgtttctgactcgatttctttgcggattcctgttcaaaagtgtcctctttaaacaaatcagaagggtgccgggtgaaacaattttttgagcaagttcaaaattacttttttgcctcgaaagatgtatttttgggtttcttgggtaattataaacaataaaggtctctcgtcatatttctgaaaagttgatagttttcgagttataagcgattaaaatctgaaaaatgcgaaaatatgcatttgcgatgcttgaaaactcttaagctttaataaaatgacagatctttttta

SEQ ID NO: 19 - DNA, 656 bp, Diabrotica virgifera
tgactatttattgctttaaaaccagttgagatatgcaaatcaaatttggtgggttttaagacgtagttattgcacattttttgacatacaattaagaattttatattcaccattggcgtgcgtacgggtaatattatgggtcataatacccgtcagtttgtaaaaaaatattggaacatcccgtatctcggaatggaagcgtttgcggacattatgattataaagcaaattgtgattattttctcatgtaaaattaccccctaaagattgtcacacttatttagaaacaccctgtactgatgacgaacatggccagttgttaaagtaccaaactttttcattatccaatataagcgaataaatcgaaagacaaaatgttaagaaaacctgaggctatagttgggttttaatttcagtattttataaatgctagaataatccacagggtgatgcgaactttgagaaagaagcacagtttgattcgtacacccggtatacaatcacagtttgactgtctagcaacaatattattacagcgatattgtcaatgaataaggctataacgtggtaaaaaatcacttaaatcggacaacaggtttaggaaattcgaaacttcaaaaatgacaaaatttttagtggatcgatttttttgcacc

SEQ ID NO: 20 - DNA, 993 bp, Diabrotica virgifera
ccccgatatcttctgtgatagctatacttatcttccggttttctagcgtcttaacgccccctgctaggatgtgaagtccctatcccttagcgggaacaaggaattttaaataatgctcttgttggaaatattaaattgtttgtgtaaatagggaacttgcataaatttttaaattcgaaaaaaatgttataaatcacaacagaacataatttaaaacatgtatcaaagataaaaaaagttttgtttgtctttcgtttggcccctaaagacgattaaaaattcaaattaaaacaggtggtccaaaacgcatattgacgtcatatagttgtgcatgtacattctgcaccaacaaagtaaacaaaattgtatataattttaaattagacactataaacgtcagtagaaaatacagtaatgtaacgtcacaagcgtttttgatagtttgaactattttacattggctaagggttcttctaaaccaaggccagaaaacagaaaaaaatatatagattttaaattatcttctaagttattatgaggttttaccgcgtgaaagtttggaaatattatttttaaaggaaactgaataatattacgtaataaaaaaatgtgtaagttccctcataggtttggcattcgttttgacactgacactaagttttataaatatatttgataatttctatttctgatatatttgagtgtttttaagatatattttttaaaatgacggaagagggtttttgtaaagggcagtctgataacttacctatagttgatatgtgtatggtggctacatattttcaaaagagtgaaaatttttccgtcggagaagttcggggagttaaagcagataagtaagtacatatattatgtatattatactcccattatacctactaattttatactgtgattttattctgattattattctcataagtatttaacgataaaacttagtaggtacacacttcctattaagtatagtgg

SEQ ID NO: 21 - DNA, 828 bp, Diabrotica virgifera
tgggaaagtctcgtactttataaaatatatttatatgttgtaattcatattaaataatttaaaaaaaatcgtataattgtccatataaaaaaaactgaatgtttttataatctttgtatataattaaaaaaagttaaatcacttcgtttgagagggggtccgattgccccatcgctcccccttggatccaccgctgttttcaagtttgttttctagacagtaaaatatttggtatctatgcacacgaaactccgattttaaaagaacccatcttagcgacatgggttaagtaaatagtagcactaaaacagtattttgtacaaatctatgtgaatatcagataacacgaactaagtgtgacaatttgcactaactacctaaatatttcaaaggtacgccactgaatgaatttcgagcttcctaacgtttcgtcgctctgcagaatcgggtaacacaagccaaaaatacgtaatttcgcacgccacgcatcacatacttgaacgtcaagaagtaatactcaatagggaacttgcatacaattttaaattcgacaaaaaaattataaatcacaacagaacatgtaatttaaaacatatatcaaaggtaaaaaagttttgtttggcttgcgtttggcccctaaagacgattcaaaattcaaattattccagccaggtcaaaacgcgttgtgacgtcatctgtttatatgtttacattcttccaacaaagtaaacagaattttaaattagacgttataaacgtcagtagaaaatacagttatgtgacgttacaagtgtttttgatcgtttgaactattcatagaaaacttgt

SEQ ID NO: 22 - DNA, 615 bp, Diabrotica virgifera
cgcactgaaaaatgatcatgagaacaagaatacctcgaacagcaactggatgaatttcagttttccagtcaagctggagttctaaaactacaggccgataagtttacttccagcaatcattaatatatcaaataatgattctctaatgactacaaggagaaacggaaagattaggagtaatccctgaagctcaattatgatgatgatttcattcataggagattctgaccaatagaaagctacagaaataaaaattacagcgataatttttgataatatcccgtcgtcaagtattacatcaggtgtccttcgttactatgcaaaaattaacattcagtgacgttaacgacaattaatgttttaaaacttgtcacaaagaataataagaaatacgtttagcaaatattcaggtgaagatatcaataaaatattagttaaaatgatttaaaaaagagttttattcatgaaataatctgagcgaattaccctcgatctctaaaattattatcggcttgttgccctcgtgccactttgatctaatttctaaattaaaactgtcaaagtgtcactcgggaaacaaatcgataattttagagctctcgtgcaattactact

SEQ ID NO: 23 - DNA, 757 bp, Diabrotica virgifera
  SmartBlast Evalue=1E-31; Info=Mariner transposase n=1 Tax= Bombyx mori RepID=Q1HPJ3_BOMMO
agaaagataggatgaacatactggaaacagaaatcactaaacagaagcgaatggaggaatcctatattcaaaattggacgaattaaagggcaaaaagaagaagaaagaagaagatacatgcgaggtttgtctttttagttttgcatataaacgctaagagagcgccaccaataaaatataattctcgtatcaacaaagttacgcgtgaagttagtggtattgatgacagttggagaaacatggacgacccccttctgacacaaatgtaacctcaatctttggttgagataaatccagagtttcattgcgatacgacaagtcgtgtggatagattagatagagatcattttcgagaaattttttacaattttcggagaggattatcccaacagcaatgtgtcgctgaaatggtttctgagtttgagaatgaagcatcacaccagtcaactatttcccgctggtattgcgaatttcaacgtggtcgctccagtctcagcgacccaggccaggtctacccaaaacagcagtcacacagcgattcttcagctaattaaggatgaccgccctataacataccgggagatagaggcatctttgggcatttcaaagacctcgatccaaaagatcctacatgaagaactgggtgttacgaagttggtctcccgttggatccctaatttgcccacagaagagcaaaaagcggttcgcgtcaattggtgtcgaaaaacattggaacggttcaataaaggaagctcaa

SEQ ID NO: 24 - DNA, 3809 bp, Diabrotica virgifera
  SmartBlast Evalue=0; Info=Alanine aminotransferase n=1 Tax= Aedes aegypti RepID=Q16UK8_AEDAE
taacttttgatgtgataatcctctaaaaatcaccacttgttatctttagaaattattttattttgtctttgaaattatagttgttttcttggcatttgtagaaatagattcagattcagttgtggttgaagacgtgtagaggtaggatcgtgtatcgttaaaacaattctgcgcgcttataacgcaaggcgaaataatttttatacctaagtaattctttctaatttaaccactgattatctttattgatattgtgacatcacgataataatgtcgactacacggctattatctccccttcataattatgggaaatttcagtccactgcgtcactcacaaggcagaagtcagctgttggtggtgtcggttcgcgatcagtgttgataaaacagaatatcagaagaatggcgacatataaaccaacgttgactatcgagaatttaaatccttgtatcaaggtgatggaatatgctgtcagaggacctttggttacaagggccggcgaaatcgaaaaagagttggaaaagggagcaagcaaaccattcaaggaagtcataaaagccaacattggtgattgccatgctatgggccaagttccaatcaccttcatccggcaagtgctggctttggtaggttatccgaaacttttagatgatcctcactttccagaagatgctaaagagcgcgcaagaactatattgaagggttgcaggggtagctctctaggatcttataccgattcgcctggtattgaagttatcagaagacacgtagctcagtatatcgagaacagggatggtattccaagcgattggcagaacattgtgattagtgggggtgccagtgacgctatcaaaaacgttctgaaactcttcatatgccgtgtaaatggaaagaaacccggtgtgatgattcccattccacagtacccactatattccgcaactttatctgaatttgacattgaccaagtcgggtattatctagatgaatctaagaactggggactttctttacaagaactagagaggtcgataaatgaagctaaaaagcaatgtaatgtaagagctattgtagttatcaatccaggaaatccaacaggacaggttttgaccaaagaaaatatccaagagattgtcaagttcgcacagaaagaaaagctgttcattttggccgatgaagtataccagcacaacatatacgaccccaactcacaattccattctttcaaaaaggttatgtatgaaatgggagaaccctacagaagcatggagcttgccagtttcatgtcttgttccaaaggttacatgggcgagtgtggtcttagaggaggttatgcggaagtggtcaatatggatccagcagttaaagctcaatatttcaaagcgattagcgctatgttgtgttcgactactttcggtcaatccaccttagatgttattgtgaatcctcccaaaccaggagaacccagttacgaacaattcgaaaaggataaggcttcagtcttggaatctcttaagttaagagccaaaatggtagccgacacattcaattccatcgaaggcttcagctgcaacccagtccaaggtgccatgtacgctttcccccaattcaagctcccacccaaagccatagaagcagcaaagaagaagggtcaagcccccgacgcattctacgctttcgatttattagaatccacaggtatttgcatcgtcccaggatcaggattcgggcagcaacccggcacccaccacttcagaaccaccatcctaccccaacccgacaaactaaagagcatgctggacaaattcgccgaattccacacccaatttttgaaaaagtatagttaagttggatgcgttttttacgatgagttgactgtgatcaattgtactaacgtaattgtagcatttggcgctagattgagattgagatccatcagattttagacaatatgttgtatttctatgtgaaaaatgtaattggcaaatattttattactttttttaactatttcgctacttaagacgcttgctatacagattccacgtgaccatcatcatcaatcagccctttgcatccattgctgtatatagacctcccctatttccgtccactgtcttttatcctgggcgctttgaatccaatttgtggtcattctttttatattgtccatcgcgtgcatggtcttcctctacttcttttatcggctcttggtttccactcgagcaacctctttgtccatcttccatctgtcagacgggccacatgaccggcccagtgccgtttaagtttagtcacctgacatacaacatatgtgactcctgttctcaatcgtagttcttcgtttgttgtatattcccgcaatgacaccgaattcttagcttcttaacagatgcggttgttaatgttagagttagagtttcagcaccataggtcataagcggcaaacgcattggttaaagaccttccgtttcaagcaaattggaagatcacttttgaatacgtatctgagtttaccgtacgcggcccaggagaggataattcttttcaattagcacgtttgattgtctcacgtgattcgtatttcgtgaccaaaatatttgtacttttccgcaaactccatttcgcagtcgttgatgacaacgttttcacttggaactagatttgtcattagctttgtcttagatatgttactgttccgatggtaggttacggaatcaattaaaaataagtgtaaacaatgaacaataacatatttatttgtgtcaataaaaaaaaggcgtgtcttacttatatctcgacctatggtatatacctacacggtatgttgttgacctattccgactaccgctgcgttgtgtctctcgacgggagactgtgaatcgacccgtagttatatatcgactgactgtggctgaaaaaaaaaaccacaaacgctactatgtttgtgtttctacaatttggctagaaaaggcaataaattactacatctggcgttttaaaagttgagagcctttctgtattttaagaagttgacataaagtctgataaggtaattaatttatggggaattcagtttgttaaactgaacacaccaaaaacattatggttagggataccgtttcgtaaaacttattagcatctggtttgtatattagatgtgaatttatatgacagttttgagaaaagttattaaaaaataaaattagcaaaaatagtaattaaagcgtgtcgccacattaatttttaacccaacctgatccccatgaccgattcataataaaaaggagattttagttgatttaaagatccaaaaaactctaaacaactatctgtagaaaaaacttagcttaaataaacaagtcactacaaatgctaagactacaattttcctgccattctacttctttatataccacgtcctttcagaacgttgattaccaccatagctatcttaattttattcactgccaccctaattagcatgattgtatcaataccataccaatctcgcaagagaaccatgaagtctttgtttgtcctgaactgagtttgcctatttcctgtcattgggaatctgtattctaaaaatactcaactatgtctacaaccaattgatatggtgtttttataatatttaataagctacaactgaggactgggcaccaataaagagccatgtgacaaaaagtttatttttagatatattttttttacgttccatcatcatcatcatcatcttggtgctacagcccttagagggcctcgaccttctcaagctttctacgctattctgttctgtccc

SEQ ID NO: 25 - DNA, 837 bp, Diabrotica virgifera
ccacaatattgatatgatatgcaatagggaacttgcacatttttttaattacataataatgttcagttttgtataaaaatgagatttccaaaatttcacgcttcaaaataacgcgtcataataacttgaagtacaaatttaaagtcttctgtatcttaaaatagttcaaacgacccgtgacgtcacagagtttaactatgtggttccgtttatggttatatttatgtatattcgtcttctgcttctttagtttattagcctccacctacttgggtatttggccactagtcgtcggggaataaaggaaaaatatttatattctaatgacatttatcgtatgtcgttgtaataatatataccagtttgttgagattggagtttgatacagtttttgaaggaaaggaaagaaggtttactattaaaaataaaaccattttgtaaaagtacaaattttctatgaatagttcaaacaatcaaaaacacctttagcgtcacataactgtattttctactgacgtttataatgtctaatttaaaattatatatacaattggtgtagaatgtaaacatataatcccgtgacgtcacggcgcgttttggggtggctggtataagttgaatttttagtgaatatttagttttgaatctttaggggccaaacgaaagacaaacagaacttttttatctttgatacaggttctaaattatgttctgttgtgatttataaccatttttttcgaatttaaaattttatgcaagttccctattattatataaaataaatttaattaattgcattctgcttgcagtaggtactacattttaataactaatttt

SEQ ID NO: 26 - DNA, 507 bp, Diabrotica virgifera
agcaacatataatttttcttcttcaatttagacagtaggtatgcaatatacgtcaatttgacattttcaattgacaatatgaattatttaagaaagttgcaatatttctccgctattcacgcacgatcgtttctcgcatcccctccaagtacttgcacaccgcgaatagaaaatcaaggaagagccactcattgaaaatgacgttgcaaatttgtttataatgttatcaaataataagaatattataatgtatacttccgtacatgaatattaaaaaaaaatttgtccttttaggtggttgcgtttttttttggccatcagtataaaatttcaactacaaaacgctgcatttacacacaaaaaatcaacatttgcgtttgacgcctaaaattttgtaaaaaggtaaaaaatagtgatgttgaaaaagtaactattccttacaaagtactcgttacttacgaatacctaaagtaacgattactatacagagaggaaaatcgttacttt

SEQ ID NO: 27 - DNA, 510 bp, Diabrotica virgifera
gcgtacagaaaaaggttgattggtaccaggctgaaagtttgttaatggcttggcggtgtctggtcggacaggtttgatgtatgggaacacttgaacaggggaagttttcagactacgaaaacgtcctgtgtattttgtcggacagaacttccaattgatgtgttgccctttcattaaactctcatgcaaaaattagactggtatttatcaccaaccgggcattttaataagtccgacacgtagaacatgtcaaatgacagcaattatgacaggtgataaatagcggtctgatttttgcatgagagtttggtgaaggcgtagcaggtcaattggtgttctgtccgacaaaataaatgggacgttttcgtagtctgacgttccaaatttctaacccgttccacaattaaaacttccagtgttcccatacatcaaagtttgtccgactagacaccgttgggctgttaacaagttttcggcttgctattaatcaacatttttttggtacgcggg

SEQ ID NO: 28 - DNA, 567 bp, Diabrotica virgifera
ttttgtaggttttgcctttcaaagtatgcattttgctactacgaccacccttaatgtctttgtgaccatgtgttgaacgattgtataccgtgagtttttttgtcaacggggtttttggtcgaataattcctcagaaccccagaaacacacgaaccactctgtggcgccacaaagtagattccgataattagccgaaacttcttatgtaaataattcaatgtgccattccagacgagcgacagtggccagccacttagtgatgttgattatagttactttcgagtattcgttacaaatagttactttactaattattagtaataatttacagtattctttactttgattactatgattacttttgttatttgagtaccggtaatcatatcgagaatcgtatttctcagtaggtaggtattttgtataggtattccgatataacaacgaccttcaccgatctgtttaagggataaaaatgatttgattactatgattacttttgtatttgagtaccggtaatcatatcgagaatcgtatttctcagtaggtaggtattttgtataggta

SEQ ID NO: 29 - DNA, 1098 bp, Diabrotica virgifera
  SmartBlast Evalue=2E-25; Info=Endonuclease-reverse transcriptase n=1 Tax=Bombyx mori RepID=D5LB38_BOMMO
ttgcttgcattttctagttaccgactccgatcttctcggcatcttgtgttacccacccgtgttcatccacctcgcctttggtctacgccgtcttctcattcccacgggttgagcagttagaatcttttttatcatgttcgattcaggggcccgggctacatgtcctgcccactgcaggcgatttcgcttaattacagttataatatcttttccaccaaacgtatgcttgtagatataaagtttaccacttacttaaaattaggctctattcactgtccaagtgcttatacagaggtgcaggtatgccaactgtgacgtatatatttgttttatcgtctacaaaaaggcattttatagagtaaaacatgataagctcacaaccatcttagaaaaagcgggattagatgatagagacttgaaaaccatatataatttatattacaatcaaactgccaccattaaagtggatgaccagttgatagaggcagtctccatagatagagtgagataaggatgcattctgtccccggtgttatttaatatgtacgctgagcatgtgcgcctaaacaacgttagatatgccgacgacgcagtactttttgcagatagcttagatggtttgcaaagaataatgtcgcgcagatattaatcagacatatgtagagaacatggatttgatctcaatacgaaaaaaaaccaaagtatgtggtagacggtaagtgcgaaatattaaatacaatagcagcaagcaaaggataaccacgttgatcgtcaacattcgaaacggatcggcaccttaagaagaagaagcaatggtccaattgtctgtttgtggcacatagctctttactaatgcccactcctcaactttattttatttattatacatttatactaaaacaaaaatattgtgcatgtatttttataattatttattgatacattttatttatctttatatggttcttttcatgaggatttttcagtgcgtcacaaatgatagaaaaaaaggtaagtccgtgataatacacatttataacatttattctaacatgacattttagttaaatctgaccgttgtcaaattttatttgcaat

SEQ ID NO: 30 - DNA, 572 bp, Diabrotica virgifera
ttcaaatttgtatatgtcatgctccgaaacgtactcagtggtttccgaacgtcgtggtaatgttaggtgcttcaggatggttctcagtcttgcagaaacattttttatcttggagtacttatactcgcggtcatacggaacaggtcgcgaaagctgtccaagcttaaaattaacaacggtttcagcaggacgaggcacctgctacatggcctgggagtctcttcgaatactgctcgatcatttttgggagaccgccactcaccagtcctaatgccacctgatgcgtacatatggggaatactgaaggaggcataccgatccaccatctgacattacggaattgcagagtcaagatatttttttcgaaaaattgtaaaatctttcatatttattattttatattttttcgcgtcagagggcatttgaaacatctgttttatcgggaactttggagtgaataatgacgtttgcaaagctatatcatttctactaaattatgtaaataagcatagacatttcaatattcatttcagtacttactgtttagtttgacgcatactgtataactaagt

SEQ ID NO: 31 - DNA, 512 bp, Diabrotica virgifera
ttaatatagaattgtttgctctcgtgacactttgacataatttcactcgccttcggctcgtgaaattaaaactgtcaaagtgtcactcgggaaaaattcaataatttcagagctcttgtgcaattactactgataattcgatgaaataaaattattttgacataatatttaaaagtcagatcagtagacaattacaatggttttgaatcgtcgtcatggaaaccaatatcgtcgtcgtggtaacccattatattgaaagtttggttttgacaaccttgtcaaagaattaatttgtgtattttcacttctaaataaaaattgatataactctattttttgtggcttttttccaaacgtacggccctagaaaaaatattgttcctaactcatgcggaaagtgtcttccccgcactcgactgcttgcccgaactccgctatcgcgtcgttcgggtcaacggcagtctcgtgcgtgaaagtatcactttccgcactagttaggaaaataactattt

SEQ ID NO: 32 - DNA, 785 bp, Diabrotica virgifera
gtagactactgatctgtttttctgtgattacagcaccatcttttgcgaattgaaataaattcagatgaaacttgtttactttctcatgcagaatcttaatctgcaataaaaaatgggtgttcccatttaagatttgaaagttcctgctctaggggtcgtataatttggtgttattcgataaatttttgaaaaatattgaacacgtgtttcagtttttttgaacccatgttaatttctccaaatattcgattgtcctgcttcttttggaacacactatatagtgcacagtattgaattcatcatatctttgtatttcctgataaagagacctgtaatgaaaatatataaataaatgaaggaaaagatatgagataagaaatgaatgtaaattaaatagtaatctgtagttgtagtttgaatgtttttattggttcaaaaacattacttttctagtataataatgtttgcaatgtacctattgttcatacttaattctttcaaaattcaatattgatgcttatgaggcactatctaatttgatttatgataatggttgaacactatcactcaacaatatgttgaaacatgataatctaatgagaattgaggatatatttacctttcagttactaacaaatcaagaataagtatgatattttcttgaccattggaaaaggaaagttgtatagttcctattggtatattcctttatggctagatttacaggcatacagataacacaatttcaataaaaacctattagttccataataacattgtatcat

SEQ ID NO: 33 - DNA, 550 bp, Diabrotica virgifera
  SmartBlast Evalue=3E-10; Info=Glutathione S-transferase n=1 Tax= Chironomus tentans RepID=C5IC91_CHITE
ttttaaaatacagaagactttaaatttgtacttctaagttattatgagtttttgaagcgtgaaattttggaaatctcatttttatacaaaactgaacattattatgtaataaaaaaaatgtgcaagttccctattggtagggtattatctaaatatagagtaaagccaatcagtgatatctcaggaatttggtaagcgtacggtataaaacatcagagtaacagtatattctatcagttcatttgaaaaattttgcatgtaatttatatgacttccgtcgatttaagaatccattttatacttcatcataagctggttctacaccatcaatttttgcttttgcaattatccaaaacctctcaccactaatatataactccttgcaaactggttcattcatcatatcttttctccatttccttaaaagtggaatgtctgagtctttcaaaggaagtttctgttgtaatttaattcctatacatcctgctctctctgcccatggccaaatcatgtaatcagccatgccaggtttatctccaccaaagaaagg

SEQ ID NO: 34 - DNA, 1454 bp, Diabrotica virgifera
  SmartBlast Evalue=1E-73; Info=Endonuclease-reverse transcriptase n=1 Tax=Bombyx mori RepID=D7F159_BOMMO
gctgtccacgagaaaggaagattgcctgggaaattaatcatacaaagttgttacgatcctttggtaacaactttatgtacgaaaccctcgagagtttttataagtaccagtcaaaagtcgccccccccccctcgtatgttttgaacgattatacttataatagtgaaatagcgacgcagaaatctagaagaaaaccaacggctattgaccatagcagaataagacaaaacgcagaagaatatagacagactttaagggaaaactataatcaacaagtagcaaaggaagagtcagaaattaataagatcaatgaagaaatgaaagaaaaactcttggaagcgggaatgaaaactgccaaaaaactaacaacaaaagaaaatagattaagtagcgggacagttaaattaatggaaagtagacgaaaactaataagcgaaaacaaaagaaacacagtagaatacgtagaactaaacaaacttattagaagaaaaaccagagaggatctaagaaaacacactgaaaatgaaatcgagaaagtaattaagagaaataagggcctaaaatgcttacgaccaaatttagggaaaccactactcatttcaataaaggatgaagcaggacgggaagagaggagaaaagataagatatcagaagaagtagaaaggttttataaagaactatacacctcaaagaaagacgcaaacttcaacactcaggaatatatcaagaaaacaatcacgaatgtaaactcagaaacactaccaaaaatagaaaattatgaaatagaagcagcactatcacaattaaagaacaacaaagcaccaggaccagatggaatccttgctgaaatgttgaaagaagggaaagaagaaatcttacaaacattaagaaatctgtttaatcagtgtctacataaaggagaaatacccgacgaatggaacgaaagtcttacaatcctgctatttaagaaaggcgacagaaaggacataaaaaattaacagacccatctcactgctgtcgcaaacgtataaactattcatgaggattatcaacaacaggctaacacacaaattaactcgtatcaaccagtagagcaggcaggattccgaaagggatatagcaccactgaccatcttctaacaattaggacattaatagaaaaagctaacgaataccatatagatctgcacttagcgttcgttgactacgaaaaagcatttggcagcgtggaaatgtgggcaatagaaaaagctataaacaactgtagaatagattccagatacagaatgctaatacataatatatataagaaagcaacaatgacagtacaattggaagaatccacaaaacccataccaattaacagaggagtgcgacagggagatgttatttctcctaaactatttacattagcactggaagatgttcaaaacaatggaatggacaaacatggg

SEQ ID NO: 35 - DNA, 611 bp, Diabrotica virgifera
gaatactttggtaattattctagttcggtgattattctagttgtcgatagatggcgccataatcaaaaaagaattatttattaaataaaataataatattatcaatataatctgtacaatttataagactatacaaatgaaagaaaataccattttataaatgcaatagacacaattgatttggttttattccaaattgaaaataaaatttgacaactgtcagatttaactaaaatgtcacgttagaataaatgtcataaatgtgtattatcacggacttacctttttttctataatttgtgacgcactgaaaaatgttcatgaaaaggagaataccatgttgtttactttggagtttaatacacttttcgaagagatagttattagggaacttgcattaatttttaaattcgaaaaaaatgttataaatcccaacagaacataatttaaaacatgtatcaaagataaaaaagttttgtaggtctttcgtttgacgtcactccgttgtacatttacatttttccaacaaagtaaacagaattttaaattagacgttataaacgtcagtagaaaatacatttatttgacgttacaagtgttttgatcgtttg

SEQ ID NO: 36 - DNA, 822 bp, Diabrotica virgifera
tgacaaacaaagtttcgaccaatcacgtgccgaatttcatacagttttcgatacaagaacttgcatagtgtcacacagggcacaaatgtacgtacaataaatgatacaagaaaatgtatacaagacacgatatcagaaacgatattagaaatgatacaagaaaatgcatagtttcatacagcctttaggcatttaatttttttggataaatcaaaaacaaaaaatttaagtaaaatcctttataaaaagctatatgttttattaaaattccctaaaaagtgctacatcacatattatgcagaacgtttttgtttaattacatatcatcatcagtgctgaacaggatgctcacatgctaagccaccaaaattgaaaatatttgggtaaaaaccctttacagttatagtcatggaaacattgaataaaattattataagtaacatgaatgttgtaaatattacgcgagtaatattacatgattgcaaatgactaaaaattgcaaataaactaaaattaaatacacagaaataatcttttttgttttcacgaaaaacaaaaaagaaaaaaaataatcagttaaagaaaagatagcgaagtaaaaactttatcacatatatatttttagataagacttacaaagaaatacttttgatccaaataaataactttatacaaagtgttgcatttttttggccatcagtatatttacaatcgttccaaataattagaaaaccatgttaataacagttaccccaactaatctaaaaagtatattgtaaatttagatttaaacaatacatttttataataggcctgcaaccc

SEQ ID NO: 37 - DNA, 879 bp, Diabrotica virgifera
  SmartBlast Evalue=3E-62; Info=Peritrophic matrix protein 5-B n= 1 Tax=Tribolium castaneum RepID=D1MAJ6_TRICA
gcgactttggaacggaaaacagaattaacttttggtatttttttatttatcggatcttctttaatctcactagatatttgctaatataaaaggatacatccattcttcattaatagacaattttagatttgaacctagtttttgcttgtatagtagaacgatggttccagttctgattttattctttttttgtgttagtgtccattctggattggctaacgtagaatgcccgaaagttgatggtccggactcagtttactatcctcacgaagactgtgcaaaattctatcaatgttcaaacggagttccttacgtacacaactgctcgtcaggtctacacttcaattcgaagttgaacgtttgtgattatccattagaagcaggctgtgaagaaattacaattgattatccgtctagtccgcctagtgatgataatggagataaaaatttctgcttacttaaaagttttctttgtcctcctattgatggatcgacttccgtatatttcccacaacaaaattgtaccaaattctgtcaatgttcaaatggcgttccatatgaacacacatgtcgagacggtcttcattttaatcccacattaaacgtttgtgactggcctgaaaatgcaggatgcagaggctcagaaactcatacatgccctactattactacaccatttacaccaacagattcaaccactccgaattccaattcatgccaaaaagaaggaattgtctgcccagcagtagatggacccgactcagtttattttcctctcagcgattgtactaaattctgccaatgttctaacggtgtgccatatgaacatgattgtcctgctggtcttcactttaacccaaaattgaacgtttgcgactg

SEQ ID NO: 38 - DNA, 5351 bp, Diabrotica virgifera
  SmartBlast Evalue=8E-59; Info=Probable RNA-directed DNA polymerase from transposon X-element n=1 Tax=Drosophila melanogaster RepID=RTXE_DROME
tggttctttgatgtacccagtacaatttaatgttataagtcttgctgtgtaacagcttttatcgatgtggtgctataaagataattttagcgaatcttgcataacataagtctttatttccaattttttctttgtttttctctctctctcttgagcagtattcatagggttaccataatttattaaggccaaatccggacaggggtagtccatggggttgtaggaaagctaaaatgtgaatttgactgtgtgtggctacctctacattgtacatacagtgtgttccaacgaaaatttgacccctcctccaaactcagaaactaagagtttcttcacaaaaacacgtcaatttgtattggaggggggacgaattttcatgcaaaattcatgctctcaaatgtaaccccctactgaccccagtgttttttaattagcaagtgtgtcgagttgcacatcatttgaaaggtagtttttttttctctacacgaccctctatttttttaatttgcgaaataactttaaagacagttttggatttaactaatttataatacatttgttaagttcaaaattgtcttcaaacttgttatgtaaattaaaaaaaaaatagtgtcgtgtagagaaaaaaattacctttcaaatgatgtgccactcgatcacacttgctatttaaaaaaaaagtgggggttgatgcggggcagtggagggttacatttgagggcatgaagtttgcatgaaagttcgttcccctcccattataaattgacgtatttttaaaatttttaagaagctcttggtttctgagtttctggggtggtcagattttcgatggaacagactgtatatgcgaaatgcatatggcacaattaaaagtacagctgtttcgctacaatatgcaactaacatcgaaaatatttgcaagtttaaaatacatatacacctatgttttaacatactttagacctagaacttaactaggtgctgcgcagaatgaaatttcccaccgttgggccaagtgttttccatttttttagtaaagcaaaaaatccggacatttctcatatccggacgccaatccggacatgccgttcaaatccggactgtccggatgaaatccggacgtatggtaaccctaagtattcatcaactgattcatgggttttgttcttttagacttgttttttcttcttgtgaagccctttgtagtcccatcaatagtattggactatcgcgtgctattaaatttaggatgtcatatgtgtaatattctcttggtgtagttggaactcttcttagaagtttgcctcaaaaatttgtatttcttgtcagcttcacgattctagaaatggtgagtctgatttaaagatcttgttaagctaccaagattatgaatttgcacgtgatttccacaggacttccacaaagtagccagcaaactatatttctactatatttctggctagtgctttgatttcagccagggtttccccatttctttctcttcgtccagtattgcccttttccaagtttttaagtctgcatactttctgtcagccttcagaattccaatccagcactgttcttacaatgtcatctgttgtgtcaatgttgtgtacggagtgtgtggtccaggcatctcgataattttcttcgccttatttgctttatggcatttttttggttggcttgggtctccacaaattttcatttaaaattcgatgaggccaaaatatcatcatcaatggtgctacagcactatgaaagagcctcgaccttctcaagtctattacgccagtcagtcctatccattgccaactgttgccagtttgctgcgcgatttttctaccatcgtctacaccatccttccatctgagttttggcctacccctatttctacttcccacaggttgtgacataaggattcttcaaggagggttgttatgctgtgatcttgctagatgttctgcccacttagtcttcctattttataagagatactacgtctttaccaccaaatatatgtttatatctgtggtatacctcgtagttgtacctcctcctccaaataccattttcacagatgccaccgaatattcctctcaggatccttcgttcaaatataagcagaaggttttcatctgccttggagatggtccatgtctccgatccatatgtcaacactggttgtataagggttttgtatatggttatttttgttttttggcttaagtttctgcttctcatatgtctactcagtccaaaatagcatttgttgctaggattatccttcgcttgatttcttcgtcataacgttctccttggtgatcagggagcctaagtatgtgaatttgtccaccacttcaacggtagagttatcaaccgtgaattggtgaccgatgtttctggcactattgttggatgttgatgctatcatcttagttttctcctcgtttactttcaggcccatattttttgaggcatttgagaaggtggtatacatttcttctagtttgcgtgttgtgcgggcaactaggtccacgtcatctgcatatgccaaaatttggtatgatttattaaaaatatttcctctgttgtctatttggtcatctataattagttattttaaagccttaatgttctacaagtaagttttgttgccaaataatgaaaatctatatatttttataataggtaattaattatttcgaatcgcaagaaaccaagatattgttttattacttattttgattaaaaacaatcaaaataaaattgcttgatttaactattttaataagaaactttttcagagagtttcagaagcttcgaattccaaaactggatcccagaacaccaatttggattccgacaagctcattctacagtgcaacaatgccatcgcatatcaaatgtaattaatagagcattggacaataaacaatattgcacagcagcctttctggacatcagccaagcatttgataaggtatggcacccaggattactttataaaatcaaaaaatctctacacaacaaatactttgacttattaaaatcatatccaaatcacagagaatttgaaactaaagtggaggatgaactatcaaaccgtaacaaaattcaatcaggagtcccacaaggtagtatactgggtccacttctttatgtactgtacacatccgatttaccaacctttccacaaaccacaattggagctttcgctgatgacacagcaatatttgcaactgaagagaattaaacagctgcagtcttaaaacttcaagaacacctagaccaaattggacagtggttaaagaaatggaagataaaagctaatgaaactaagtcaacacatataactgtcacactaagaaaagaccaatgcccaaatattagccttaatcaagtcaacataccccaacagaatatcgtcaaatacctggggcttcatcttgattctaaataaactggaaacaacgcattttaaagatgaataaacaaattgagttgagagtgaaagaaattaattggcttataggtcgaaaatcttgactctcaattgagaacaaactgctaatttataaaacagtcatcaaacttatatggacgtacggcatagaactatggagttgtgccagcaaatcaattacaaaaattatccaaagaactcaatcaaaaattctacgcaccatcgcaaatgccccgtggtacatctccaaccaaacccttcatagagacctaaacatcccgttagtcagcacagtattcaagaaagagccaacagacaccacgagaaattagaaggccaccccaaccaattaatattaccattactgcagccactaaacaacagaagattgcgaagattaaagttattgtacttgttatcaaattaactcatagaatatgtaattctgattgttaataaatgcttacaaaaaaaaaagaagcttcgaggccaaatatttcaacatccaccaaagtttctagacaaataaagaatattccaagaaaaaatacaatactatacatttttttttaaaatgctttcaaatatttcttattttctaattaatgaaatatacaaaattcacacaggtataaacataaatgatgaaaacagatattacttaattaatacgtttataacgataatttccacctccactagtttcatctctttttgtttcgcaatgtgttatgttttccatcttttgagctattttgcgggtaattagcgcgctcatcactgtataaaaaaaaacagttgtttttagaactctttagcgacgtattagtataaaataatatttatggattactgtcgaaggccatcatgataccaaaaaagaaaatgaatctgctgatttttctagtgacaatattgggtatgaatccagtatgaatctgtctgttgagtttattccgcctaagttaaaacaggttatagtgtgaattaataaaacttacactctaatattcatgtcctacaaataaacaaaactatcttgagctgacaactaggaaaacatgacctgcaacttttattgcaaccaatgttgtttaaacgtggtattccccaccatccaacttctcatcagaaataatattaaacaaccacttagcagtgctgtcttcaacccacaacaaatctatcagtaatccattgaagattcctaagacaacaccaccaagaacatccattatgtaatgtctgttcattaagatcctgctgaccgaaactgatatgctccaaacccagagaaaaggtattaaaagaaagtttaaaggccatagtttggtgtaaaagtatgctacaaatatagccctactagcatggcctgaaggaaaactaaatacgtccacatatttggcgagaggatcatctttgatgttttttggtggccgcttgcgcctgaagtaagctttggctactgctactagtattatatcagtagtaagacctaaaagcatgtttacttgcatttggactagattaggattattaaatagccagctaaaggcaatccaaaatgcaaaccatggaattccatggcaggaaatttctaaagctttacaatgaactctataagcatctaaatctaagattttgttagcccatgtaagaaactcgtttgtaatatatgcatcgtatttcaatattttttgtaatgctggtggaactctacttttaccctccgacattttgcagtatataatgtaaagtccagccaagacttatcttataatcttttacaaacttccaaaaatatataggtccgaaatgttgatgacacacttgtctattggaataaactgtttcgggatctattatattgttttttttaatgtgg

SEQ ID NO: 39 - DNA, 5357 bp, Diabrotica virgifera
  SmartBlast Evalue=8E-59; Info=Probable RNA-directed DNA polymerase from transposon X-element n=1 Tax=Drosophila melanogaster RepID=RTXE_DROME
tggttctttgatgtacccagtacaatttaatgttataagtcttgctgtgtaacagcttttatcgatgtggtgctataaagataattttagcgaatcttgcataacataagtctttatttccaattttttctttgtttttctctctctctcttgagcagtattcatagggttaccataatttattaaggccaaatccggacaggggtagtccatggggttgtaggaaagctaaaatgtgaatttgactgtgtgtggctacctctacattgtacatacagtgtgttccaacgaaaatttgacccctcctccaaactcagaaactaagagtttcttcacaaaaacacgtcaatttgtattggaggggggacgaattttcatgcaaaattcatgctctcaaatgtaaccccctactgaccccagtgttttttaattagcaagtgtgtcgagttgcacatcatttgaaaggtagtttttttttctctacacgaccctctatttttttaatttgcgaaataactttaaagacagttttggatttaactaatttataatacatttgttaagttcaaaattgtcttcaaacttgttatgtaaattaaaaaaaaaatagtgtcgtgtagagaaaaaaattacctttcaaatgatgtgccactcgatcacacttgctatttaaaaaaaaagtgggggttgatgcggggcagtggagggttacatttgagggcatgaagtttgcatgaaagttcgttcccctcccattataaattgacgtatttttaaaatttttaagaagctcttggtttctgagtttctggggtggtcagattttcgatggaacagactgtatatgcgaaatgcatatggcacaattaaaagtacagctgtttcgctacaatatgcaactaacatcgaaaatatttgcaagtttaaaatacatatacacctatgttttaacatactttagacctagaacttaactaggtgctgcgcagaatgaaatttcccaccgttgggccaagtgttttccatttttttagtaaagcaaaaaatccggacatttctcatatccggacgccaatccggacatgccgttcaaatccggactgtccggatgaaatccggacgtatggtaaccctaagtattcatcaactgattcatgggttttgttcttttagacttgttttttcttcttgtgaagccctttgtagtcccatcaatagtattggactatcgcgtgctattaaatttaggatgtcatatgtgtaatattctcttggtgtagttggaactcttcttagaagtttgcctcaaaaatttgtatttcttgtcagcttcacgattctagaaatggtgagtctgatttaaagatcttgttaagctaccaagattatgaatttgcacgtgatttccacaggacttccacaaagtagccagcaaactatatttctactatatttctggctagtgctttgatttcagccagggtttccccatttctttctcttcgtccagtattgcccttttccaagtttttaagtctgcatactttctgtcagccttcagaattccaatccagcactgttcttacaatgtcatctgttgtgtcaatgttgtgtacggagtgtgtggtccaggcatctcgataattttcttcgccttatttgctttatggcatttttttggttggcttgggtctccacaaattttcatttaaaattcgatgaggccaaaatatcatcatcaatggtgctacagcactatgaaagagcctcgaccttctcaagtctattacgccagtcagtcctatccattgccaactgttgccagtttgctgcgcgatttttctaccatcgtctacaccatccttccatctgagttttggcctacccctatttctacttcccacaggttgtgacataaggattcttcaaggagggttgttatgctgtgatcttgctagatgttctgcccacttagtcttcctattttataagagatactacgtctttaccaccaaatatatgtttatatctgtggtatacctcgtagttgtacctcctcctccaaataccattttcacagatgccaccgaatattcctctcaggatccttcgttcaaatataagcagaaggttttcatctgccttggagatggtccatgtctccgatccatatgtcaacatcggttgtataagggttttgtataaatatggttatttttgttttttggcttaagtttctgcttctcatatgtctactcagtccaaaatagcatttgttcgctagaattatccttcgcttgatttcttccgtcatgacgttctccttggtgatcagggagcctaagtatgtgaatttgtccaccagttcaaaggtagagttatcaacagtgaattggtgaccgatgtttctggctctattgttgggtgttgatgccaacatcttagttttctcctcgtttactttcaggcccatattttttgaggcatttgagaaggtggtatacatttcttctagtttgcgtgttgtgcgggcaactaggtccacgtcatctgcatatgccaaaatttggtatgatttattaaaaatatttcctctgttgtctatttggtcatctataattagttattttaaagccttaatgttctacaagtaagttttgttgccaaataatgaaaatctatatatttttataataggtaattaattatttcgaatcgcaagaaaccaagatattgttttattacttattttgattaaaaacaatcaaaataaaattgcttgatttaactattttaataagaaactttttcagagagtttcagaagcttcgaattccaaaactggatcccagaacaccaatttggattccgacaagctcattctacagtgcaacaatgccatcgcatatcaaatgtaattaatagagcattggacaataaacaatattgcacagcagcctttctggacatcagccaagcatttgataaggtatggcacccaggattactttataaaatcaaaaaatctctacacaacaaatactttgacttattaaaatcatatccaaatcacagagaatttgaaactaaagtggaggatgaactatcaaaccgtaacaaaattcaatcaggagtcccacaaggtagtatactgggtccacttctttatgtactgtacacatccgatttaccaacctttccacaaaccacaattggagctttcgctgatgacacagcaatatttgcaactgaagagaattaaacagctgcagtcttaaaacttcaagaacacctagaccaaattggacagtggttaaagaaatggaagataaaagctaatgaaactaagtcaacacatataactgtcacactaagaaaagaccaatgcccaaatattagccttaatcaagtcaacataccccaacagaatatcgtcaaatacctggggcttcatcttgattctaaataaactggaaacaacgcattttaaagatgaataaacaaattgagttgagagtgaaagaaattaattggcttataggtcgaaaatcttgactctcaattgagaacaaactgctaatttataaaacagtcatcaaacttatatggacgtacggcatagaactatggagttgtgccagcaaatcaattacaaaaattatccaaagaactcaatcaaaaattctacgcaccatcgcaaatgccccgtggtacatctccaaccaaacccttcatagagacctaaacatcccgttagtcagcacagtattcaagaaagagccaacagacaccacgagaaattagaaggccaccccaaccaattaatattaccattactgcagccactaaacaacagaagattgcgaagattaaagttattgtacttgttatcaaattaactcatagaatatgtaattctgattgttaataaatgcttacaaaaaaaaaagaagcttcgaggccaaatatttcaacatccaccaaagtttctagacaaataaagaatattccaagaaaaaatacaatactatacatttttttttaaaatgctttcaaatatttcttattttctaattaatgaaatatacaaaattcacacaggtataaacataaatgatgaaaacagatattacttaattaatacgtttataacgataatttccacctccactagtttcatctctttttgtttcgcaatgtgttatgttttccatcttttgagctattttgcgggtaattagcgcgctcatcactgtataaaaaaaaacagttgtttttagaactctttagcgacgtattagtataaaataatatttatggattactgtcgaaggccatcatgataccaaaaaagaaaatgaatctgctgatttttctagtgacaatattgggtatgaatccagtatgaatctgtctgttgagtttattccgcctaagttaaaacaggttatagtgtgaattaataaaacttacactctaatattcatgtcctacaaataaacaaaactatcttgagctgacaactaggaaaacatgacctgcaacttttattgcaaccaatgttgtttaaacgtggtattccccaccatccaacttctcatcagaaataatattaaacaaccacttagcagtgctgtcttcaacccacaacaaatctatcagtaatccattgaagattcctaagacaacaccaccaagaacatccattatgtaatgtctgttcattaagatcctgctgaccgaaactgatatgctccaaacccagagaaaaggtattaaaagaaagtttaaaggccatagtttggtgtaaaagtatgctacaaatatagccctactagcatggcctgaaggaaaactaaatacgtccacatatttggcgagaggatcatctttgatgttttttggtggccgcttgcgcctgaagtaagctttggctactgctactagtattatatcagtagtaagacctaaaagcatgtttacttgcatttggactagattaggattattaaatagccagctaaaggcaatccaaaatgcaaaccatggaattccatggcaggaaatttctaaagctttacaatgaactctataagcatctaaatctaagattttgttagcccatgtaagaaactcgtttgtaatatatgcatcgtatttcaatattttttgtaatgctggtggaactctacttttaccctccgacattttgcagtatataatgtaaagtccagccaagacttatcttataatcttttacaaacttccaaaaatatataggtccgaaatgttgatgacacacttgtctattggaataaactgtttcgggatctattatattgttttttttaatgtgg

SEQ ID NO: 40 - DNA, 4603 bp, Diabrotica virgifera
  SmartBlast Evalue=0; Info=Endonuclease-reverse transcriptase HmRTE-e01 n=1 Tax=Heliconius melpomene RepID=C6Y4D5_9NEOP
aggcgcctttcaggattatatatattttgatccttggactgtccactgcttgttctcgggctttcgagcaaatcgatccattctgtaaaaattgcgaggtgaaaagcttcggttcctggacgacaacgtgcaatagcgttattaccctcaatatttgagatttgcaatgcttgggctaggacagaactatttatggtcggcgtggatctgcgcgaagtcttctgtcgtttatcggtaaatgaacatggttcaaaggaagtcagaagctgatacagactaggtacatactcctccaacccttttaactctgctaggaacaatcagtgccttggtaattttactatggagtggtctagcgaccgacgttctgtttgaatttttatcatcgtgtaaattaaccaactaactaaaatttctaccgccaacactggtggtgcaccctcgatattagaggggatacgttccatcgaaatggtccgatcatatttatcaaaatgtaaatgtttattaatctcagaataatatggggcgttaactgtgctctcttttcttttcaccattatctattttctatttctctttgccaacgtgaactggcaaagagtgccacgccacattctatgggatcccgtcttaatgcagattattatttttcttatgcaaacatatttattttaatagtatttaaggtaggtttaataataacagcaatgactattgtattacgtagatatataatatattctttaagttctgtagatacaatacgaaatgtgcaggtagctattattgttttttgttttttggtacaaaatattttaaattacttctaacaacataaatatataatgaggattccttttagagaaaagaagtaaaaagaaatacttcgcacagatttataggtgtgctttatcagttcttcatcaattatacgttaatggtctcgatttaacaatgatgtaagtactctttcagactaagacagtctgagaccgatgtgcgcccccggttttcaattgccccaaagcattggtaagccactaaaatcagccagacactaggaagtggctcgtctgtagtcgttcatttaaaaccatgctttgctgcaatttggcggacaccggtgtcagacaccagtgtcttagtcagaaagggtactaaatctccatacctattcaaaagtagataatacaaatatttcatcatcattctctttgccttattcctatgcggggccggcttccctagttgcatttctccacacaattctatcttgggtcatatcaatgttaatcccctttaccaacatgtcctgccttatcgtctccccccaggtcttctttggtcttcctctcctactccttccaggaatctgcacttcagctattcttcgtattgggtgattaacgtctcgacgttgaacatgaccaaaccatcttaacctatgctctctcattttggcatcaattggtgccacacctagacttcccctaatatactcatttctaattttatccttctttgtcactccactcatccatctaagcattctcatttccgccacatgcattcgttgttcctctttctttttcactgcccaacattcagttccgtacatcatagccggtcttatggctgttttatagaattttcccttcagcttcattggaatttttctgtcacacaacacaccactcgcttctttccacttcatccatccagccctaattctactgcatgcatctccatctatttctccattactctgtaataccgatcctaggtacttaaaactattgcttttcacaatcatttcaccatccaaagataccattttatttgtagtagctccatctttaaatgaacattccaaatactctgtttttgtcctactaagttttaaacctttttcctccagagcttgtctccactgttccagtttttgttctaagtctctttcactatttcctactaacacgacatcatcagcatacattaagcaccatggaatgttaccctgtagtttcgctgttatctggtccaaaactaatgagaataaatacggactaagcacagagccttggtgcaatcctactttcacatgaaatttatcagtctctcccacacctgtcctaacactagtcgttactccctcatacatatccctcacaatctttacatattcaccagggactcctttcttattgagtgcccaccacagaatctctcgaggaactctatcatatgctttctcaagatcaatgaataccatatgagcgtttgtttctttactcctgtatttttccatcaactgccttataatgaaaattgcatctgttgttgatctaccctgcataaagccaaattgattctcggatatttcggtctcttcacgtatccgtctatcaattactctttcccatattttcatggtgtggctaagcagttttatagccctgtagtttgtacattgttgtatatctcccttgtttttgtaaacaggtaccagtatactgcttctccattcgtctggcatttgtccaacttccataattctattaaatagacctgctagccaccttgttcctgtctctcccaatgctctccatacttccccaggaatatcatctggtcctaccgcttttcctttctttattttttgaagcgcttgagccacttcctcgttggttattttggtgaccattgctgctactgtctccgttgactctacaggctgtctgtcaaattcttcatttaataagctgtcaaagtactttctccatctctttttgacatccctttcgtgaactagtattttattattttcatctcggatacatctaatctgattaaaatcttttgctttctttgctctctgtttggctattttatatatcttcgtttcgccttccctggtatcaagttgatcgtataggtttgaatacgcttctgctttggcttttgctactgctactttcgcttcctttttggcgaccatatagttttgaagatctatgtcgatctggtttcttgccactttttatataattttcccttctcttttatttttccttgtacttcatttgaccaccaccaagtctctttatcctcaaacttctttcctgacgttttcccaagtatttcaatagccgtctctctaataatattggccatttttctccaaattgtgttagggcttcctttcatgttccaacatattttttctactattctttccctgaatagaccttctttctcatcttttagcatccaccacttgattttttgtggtcctctccgatatttttgtttagtttcgctttttacttcgatgtccagaacaagcagcttatgttgttggcttactgtctcactaactattaccttgcagtccttgcattcacgtatgtcttctttccttatcatgaagtagtctatttgggattgatgttgtccacttttgtaggtaataagttgagtttctctctttttaaagaatgtgttaacaatcgccatatccaatgctgttgctaattctagcatgtcatctccagcttcatttctagttccaaagcctaatcccccatgtattgtttcatatcctgtcttggcttggcccacatgtgcattgaaatcacctcctattataactttctcctctgctggaatatcactcagtacgtctcctaattggtcatagaaagctcttctttcattctcacccagacctgtttgaggagcatacacacacacaacattcaatacctctttatcaattacaaatttcactgacatcattctatcactcgttcttacaacttctactacgttatctttcatttcactatcagcaattataccaactccatttctagtgttactactccctacataccacaatttatatccatcacctagttctttcgccctttgtcctttccacctagtttcttgaatacaagcaatttgaactcttcttcgtttgagcgcatccactaactccagactcttacctgtaagactaccaagattccaagaccctatcctgatttttctaacctgtaatggtgttccccctgagatagtcctcacccggagatccgaatggaggctcattttacttccggaacattttacctcaggagatgccatcatttcagtataagtttttatttcgtttggagaaggtcttttcattattatggcctgaaaagatttttggatatttgatgcctgaatgccttttctatcagcaccataccctgccctgtcctgcacgtttagccaatacaccaccaatgcaaccaaagtgcagtattaccccacacccgcctgcatttttctgtataggccaggatccctactgtaaggactgccctataagccaatgtattgttgcccgtatcccgccactaggaggcacgtacttcattcgggatacaatttcagtattttataaatgctagaatgttccacacggtgatgtgagctttgagaaaaaaaaacactttttaattcgtacatccggtatacaatgaggatgtacctatttggcagcaatattattacagcgatattgttaaggaatgaggctacggca

SEQ ID NO: 41 - DNA, 4604 bp, Diabrotica virgifera
  SmartBlast Evalue=0; Info=Endonuclease-reverse transcriptase HmRTE-e01 n=1 Tax=Heliconius melpomene RepID=C6Y4D5_9NEOP
aggcgcctttcaggattatatatattttgatccttggactgtccactgcttgttctcgggctttcgagcaaatcgatccattctgtaaaaattgcgaggtgaaaagcttcggttcctggacgacaacgtgcaatagcgttattaccctcaatatttgagatttgcaatgcttgggctaggacagaactatttatggtcggcgtggatctgcgcgaagtcttctgtcgtttatcggtaaatgaacatggttcaaaggaagtcagaagctgatacagactaggtacatactcctccaacccttttaactctgctaggaacaatcagtgccttggtaattttactatggagtggtctagcgaccgacgttctgtttgaatttttatcatcgtgtaaattaaccaactaactaaaatttctaccgccaacactggtggtgcaccctcgatattagaggggatacgttccatcgaaatggtccgatcatatttatcaaaatgtaaatgtttattaatctcagaataatatggggcgttaactgtgctctcttttcttttcaccattatctattttctatttctctttgccaacgtgaactggcaaagagtgccacgccacattctatgggatcccgtcttaatgcagattattatttttcttatgcaaacatatttattttaatagtatttaaggtaggtttaataataacagcaatgactattgtattacgtagatatataatatattctttaagttctgtagatacaatacgaaatgtgcaggtagctattattgttttttgttttttggtacaaaatattttaaattacttctaacaacataaatatataatgaggattccttttagagaaaagaagtaaaaagaaatacttcgcacagatttataggtgtgctttatcagttcttcatcaattatacgttaatggtctcgatttaacaatgatgtaagtactctttcagactaagacagtctgagaccgatgtgcgcccccggttttcaattgccccaaagcattggtaagccactaaaatcagccagacactaggaagtggctcgtctgtagtcgttcatttaaaaccatgctttgctgcaatttggcggacaccggtgtcagacaccagtgtcttagtcagaaagggtactaaatctccatacctattcaaaagtagataatacaaatatttcatcatcattctctttgccttattcctatgcggggccggcttccctagttgcatttctccacacaattctatcttgggtcatatcaatgttaatcccctttaccaacatgtcctgccttatcgtctccccccaggtcttctttggtcttcctctcctactccttccaggaatctgcacttcagctattcttcgtattgggtgattaacgtctcgacgttgaacatgaccaaaccatcttaacctatgctctctcattttggcatcaattggtgccacacctagacttcccctaatatactcatttctaattttatccttctttgtcactccactcatccatctaagcattctcatttccgccacatgcattcgttgttcctctttctttttcactgcccaacattcagttccgtacatcatagccggtcttatggctgttttatagaattttcccttcagcttcattggaatttttctgtcacacaacacaccactcgcttctttccacttcatccatccagccctaattctactgcatgcatctccatctatttctccattactctgtaataccgatcctaggtacttaaaactattgcttttcacaatcatttcaccatccaaagataccattttatttgtagtagctccatctttaaatgaacattccaaatactctgtttttgtcctactaagttttaaacctttttcctccagagcttgtctccactgttccagtttttgttctaagtctctttcactatttcctactaacacgacatcatcagcatacattaagcaccatggaatgttaccctgtagtttcgctgttatctggtccaaaactaatgagaataaatacggactaagcacagagccttggtgcaatcctactttcacatgaaatttatcagtctctcccacacctgtcctaacactagtcgttactccctcatacatatccctcacaatctttacatattcaccagggactcctttcttattgagtgcccaccacagaatctctcgaggaactctatcatatgctttctcaagatcaatgaataccatatgagcgtttgtttctttactcctgtatttttccatcaactgccttataatgaaaattgcatctgttgttgatctaccctgcataaagccaaattgattctcggatatttcggtctcttcacgtatccgtctatcaattactctttcccatattttcatggtgtggctaagcagttttatagccctgtagtttgtacattgttgtatatctcccttgtttttgtaaacaggtaccagtatactgcttctccattcgtctggcatttgtccaacttccataattctattaaatagacctgctagccaccttgttcctgtctctcccaatgctctccatacttccccaggaatatcatctggtcctaccgcttttcctttctttattttttgaagcgcttgagccacttcctcgttggttattttggtgaccattgctgctactgtctccgttgactctacaggctgtctgtcaaattcttcatttaataagctgtcaaagtactttctccatctctttttgacatccctttcgtgaactagtattttattattttcatctcggatacatctaatctgattaaaatcttttgctttctttgctctctgtttggctattttatatatcttcgtttcgccttccctggtatcaagttgatcgtataggtttgaatacgcttctgctttggcttttgctactgctactttcgcttcctttttcgccaccatatagttttgaagatctgtgtcggatctggtttcttgccactttttatataattttctcttctcttttatttttccttgtacttcgtttgaccaccaccaagtctctttatcctcaaacttttttcctgacgttttcccaagtatttcaatagcagtctctctaatactactggccatttttctccaaattgtattagggcttcctttcatgttccaacatattttttctactattcttctcctgaatagaccttctttctcatcttttagcatccaccacttgattttttgtggtcctctccgatatttttgtttagtttcgctttttacttcgatgtccagaacaagcagcttatgttgttggcttactgtctcactaactattaccttgcagtccttgcattcacgtatgtcttctttccttatcatgaagtagtctatttgggattgatgttgtccacttttgtaggtaataagttgagtttctctctttttaaagaatgtgttaacaatcgccatatccaatgctgttgctaattctagcatgtcatctccagcttcatttctagttccaaagcctaatcccccatgtattgtttcatatcctgtcttggcttggcccacatgtgcattgaaatcacctcctattataactttctcctctgctggaatatcactcagtacgtctcctaattggtcatagaaagctcttctttcattctcacccagacctgtttgaggagcatacacacacacaacattcaatacctctttatcaattacaaatttcactgacatcattctatcactcgttcttacaacttctactacgttatctttcatttcactatcagcaattataccaactccatttctagtgttactactccctacataccacaatttatatccatcacctagttctttcgccctttgtcctttccacctagtttcttgaatacaagcaatttgaactcttcttcgtttgagcgcatccactaactccagactcttacctgtaagactaccaagattccaagaccctatcctgatttttctaacctgtaatggtgttccccctgagatagtcctcacccggagatccgaatggaggctcattttacttccggaacattttacctcaggagatgccatcatttcagtataagtttttatttcgtttggagaaggtcttttcattattatggcctgaaaagatttttggatatttgatgcctgaatgccttttctatcagcaccataccctgccctgtcctgcacgtttagccaatacaccaccaatgcaaccaaagtgcagtattaccccacacccgcctgcatttttctgtataggccaggatccctactgtaaggactgccctataagccaatgtattgttgcccgtatcccgccactaggaggcacgtacttcattcgggatacaatttcagtattttataaatgctagaatgttccacacggtgatgtgagctttgagaaaaaaaaacactttttaattcgtacatccggtatacaatgaggatgtacctatttggcagcaatattattacagcgatattgttaaggaatgaggctacggca

SEQ ID NO: 42 - DNA, 4618 bp, Diabrotica virgifera
  SmartBlast Evalue=3E-75; Info=Reverse transcriptase family member n=1 Tax=Glycine max RepID=Q1AKH8_SOYBN
ataaggtgcatgcaatgcatcactagattttagttttttttgttagtaggaactgctaatttagaattatttgctgcggtaaacttttattatctttttaggataatagggtaatttaaagacaatttaaatattgcctttaaattgttctttaacattatggttatttcgatgcgtcccctaacttttaagcatcagatccaggcatttttccgattttcaaaacaataattattttcgatatatttcatcatcatcatcatcattctctttgccttatccctatgcggggtcggcttccctaattgcatttctccacacaattctatcttgggtcatatcaatgttaatcccctttaccaacatgtcctgccttatcgtctccccccaggtcttctttggtcttcctctcctactccttccaggaatctgcacttcagctattcttcgtattgggtgattaacgtctcgacgttgaacatgaccaaaccatcttaacctatgctctctcattttggcatcaattggtgccacacctagacttcccctaatatactcatttctaattttatccttctttgtcactccactcatccatctaagcattctcatttccgccacatgcattcgttgttcctctttctttttcactgcccaacattcagttccgtacatcatagccggtcttatggctgttttatagaattttcccttcagcttcattggaatttttctgtcacacaacacaccactcgcttctttccacttcatccatccagccctaattctactgcatgcatctccatctatttctccattactctgtaataccgatcctaggtacttaaaactattgcttttcacaatcatttcaccatccaaagataccattttatttgtagtagctccatctttaaatgaacattccaaatactctgtttttgtcctactaagttttaaacctttttcctccagagcttgtctccactgttccagtttttgttctaaacttctttccctatttcctattaacactttcccaagtctattacaccagtcagtcctatccattgccaaccgttgccagtttgctgcgcctatttttctcccatcctcatctacaccatccttccatctaagttttggcctacccgtatttctacttcccacaggttgtgacataaggattcttctaggagggttgttatgctgtgatcttgctagatgtcctgcccatcttagtcttcctattttataagagatactacgtctttaccaccaaatatatgtttatatctgtggtatacctcgtagttgtacctcctcctccaaataccattttcacagatgccaccgaatattcctctcaggatccttcgttcaaatataagcagaaggttttcatctgccttggagatggtccatgtctccgatccatatgtcaacactggttgtataagggttttgtatatggttatttttgttttttggcttaagtttctgcttctcatatgtctactcagtccaaaatagcatttgttgctaggattatccttcgcttgatttcttcgtcataacgttctccttggtgatcagggagcctaagtatgtgaatttgtccaccacttcaacggtagagttatcaaccgtgaattggtgaccgatgtttctggcactattgttggatgttgatgctatcatcttagttttctcctcgtttactttcaggcccatattttttgaggcatttgagaaggtggtatacatttcttctagtttgcgtgttgtgcgggcaactaggtccacgtcatctgcatatgccaaaatttggtatgatttattaaaaatatttcctctgttgtctatttggtcatctataattagttattttaaagccttaatgttctacaagtaagttttgttgccaaataatgaaaatctatatatttttataataggtaattaattatttcgaatcgcaagaaaccaagatattgttttattacttattttgattaaaaacaatcaaaataaaattgcttgatttaactattttaataagaaactttttcagagagtttcagaagcttcgaattccaaaactggatcccagaacaccaatttggattccgacaagctcattctacagtgcaacaatgccatcgcatatcaaatgtaattaatagagcattggacaataaacaatattgcacagcagcctttctggacatcagccaagcatttgataaggtatggcacccaggattactttataaaatcaaaaaatctctacacaacaaatactttgacttattaaaatcatatccaaatcacagagaatttgaaactaaagtggaggatgaactatcaaaccgtaacaaaattcaatcaggagtcccacaaggtagtatactgggtccacttctttatgtactgtacacatccgatttaccaacctttccacaaaccacaattggagctttcgctgatgacacagcaatatttgcaactgaagagaattaaacagctgcagtcttaaaacttcaagaacacctagaccaaattggacagtggttaaagaaatggaagataaaagctaatgaaactaagtcaacacatataactgtcacactaagaaaagaccaatgcccaaatattagccttaatcaagtcaacataccccaacagaatatcgtcaaatacctggggcttcatcttgattctaaataaactggaaacaacgcattttaaagatgaataaacaaattgagttgagagtgaaagaaattaattggcttataggtcgaaaatcttgactctcaattgagaacaaactgctaatttataaaacagtcatcaaacttatatggacgtacggcatagaactatggagttgtgccagcaaatcaattacaaaaattatccaaagaactcaatcaaaaattctacgcaccatcgcaaatgccccgtggtacatctccaaccaaacccttcatagagacctaaacatcccgttagtcagcacagtattcaagaaagagccaacagacaccacgagaaattagaaggccaccccaaccaattaatattaccattactgcagccactaaacaacagaagattgcgaagattaaagttattgtacttgttatcaaattaactcatagaatatgtaattctgattgttaataaatgcttacaaaaaaaaaagaagcttcgaggccaaatatttcaacatccaccaaagtttctagacaaataaagaatattccaagaaaaaatacaatactatacatttttttttaaaatgctttcaaatatttcttattttctaattaatgaaatatacaaaattcacacaggtataaacataaatgatgaaaacagatattacttaattaatacgtttataacgataatttccacctccactagtttcatctctttttgtttcgcaatgtgttatgttttccatcttttgagctattttgcgggtaattagcgcgctcatcactgtataaaaaaaaacagttgtttttagaactctttagcgacgtattagtataaaataatatttatggattactgtcgaaggccatcatgataccaaaaaagaaaatgaatctgctgatttttctagtgacaatattgggtatgaatccagtatgaatctgtctgttgagtttattccgcctaagttaaaacaggttatagtgtgaattaataaaacttacactctaatattcatgtcctacaaataaacaaaactatcttgagctgacaactaggaaaacatgacctgcaacttttattgcaaccaatgttgtttaaacgtggtattccccaccatccaacttctcatcagaaataatattaaacaaccacttagcagtgctgtcttcaacccacaacaaatctatcagtaatccattgaagattcctaagacaacaccaccaagaacatccattatgtaatgtctgttcattaagatcctgctgaccgaaactgatatgctccaaacccagagaaaaggtattaaaagaaagtttaaaggccatagtttggtgtaaaagtatgctacaaatatagccctactagcatggcctgaaggaaaactaaatacgtccacatatttggcgagaggatcatctttgatgttttttggtggccgcttgcgcctgaagtaagctttggctactgctactagtattatatcagtagtaagacctaaaagcatgtttacttgcatttggactagattaggattattaaatagccagctaaaggcaatccaaaatgcaaaccatggaattccatggcaggaaatttctaaagctttacaatgaactctataagcatctaaatctaagattttgttagcccatgtaagaaactcgtttgtaatatatgcatcgtatttcaatattttttgtaatgctggtggaactctacttttaccctccgacattttgcagtatataatgtaaagtccagccaagacttatcttataatcttttacaaacttccaaaaatatataggtccgaaatgttgatgacacacttgtctattggaataaactgtttcgggatctattatattgttttttttaatgtgg

SEQ ID NO: 43 - DNA, 4624 bp, Diabrotica virgifera
  SmartBlast Evalue=3E-75; Info=Reverse transcriptase family member n=1 Tax=Glycine max RepID=Q1AKH8_SOYBN
ataaggtgcatgcaatgcatcactagattttagttttttttgttagtaggaactgctaatttagaattatttgctgcggtaaacttttattatctttttaggataatagggtaatttaaagacaatttaaatattgcctttaaattgttctttaacattatggttatttcgatgcgtcccctaacttttaagcatcagatccaggcatttttccgattttcaaaacaataattattttcgatatatttcatcatcatcatcatcattctctttgccttatccctatgcggggtcggcttccctaattgcatttctccacacaattctatcttgggtcatatcaatgttaatcccctttaccaacatgtcctgccttatcgtctccccccaggtcttctttggtcttcctctcctactccttccaggaatctgcacttcagctattcttcgtattgggtgattaacgtctcgacgttgaacatgaccaaaccatcttaacctatgctctctcattttggcatcaattggtgccacacctagacttcccctaatatactcatttctaattttatccttctttgtcactccactcatccatctaagcattctcatttccgccacatgcattcgttgttcctctttctttttcactgcccaacattcagttccgtacatcatagccggtcttatggctgttttatagaattttcccttcagcttcattggaatttttctgtcacacaacacaccactcgcttctttccacttcatccatccagccctaattctactgcatgcatctccatctatttctccattactctgtaataccgatcctaggtacttaaaactattgcttttcacaatcatttcaccatccaaagataccattttatttgtagtagctccatctttaaatgaacattccaaatactctgtttttgtcctactaagttttaaacctttttcctccagagcttgtctccactgttccagtttttgttctaaacttctttccctatttcctattaacactttcccaagtctattacaccagtcagtcctatccattgccaaccgttgccagtttgctgcgcctatttttctcccatcctcatctacaccatccttccatctaagttttggcctacccgtatttctacttcccacaggttgtgacataaggattcttctaggagggttgttatgctgtgatcttgctagatgtcctgcccatcttagtcttcctattttataagagatactacgtctttaccaccaaatatatgtttatatctgtggtatacctcgtagttgtacctcctcctccaaataccattttcacagatgccaccgaatattcctctcaggatccttcgttcaaatataagcagaaggttttcatctgccttggagatggtccatgtctccgatccatatgtcaacatcggttgtataagggttttgtataaatatggttatttttgttttttggcttaagtttctgcttctcatatgtctactcagtccaaaatagcatttgttcgctagaattatccttcgcttgatttcttccgtcatgacgttctccttggtgatcagggagcctaagtatgtgaatttgtccaccagttcaaaggtagagttatcaacagtgaattggtgaccgatgtttctggctctattgttgggtgttgatgccaacatcttagttttctcctcgtttactttcaggcccatattttttgaggcatttgagaaggtggtatacatttcttctagtttgcgtgttgtgcgggcaactaggtccacgtcatctgcatatgccaaaatttggtatgatttattaaaaatatttcctctgttgtctatttggtcatctataattagttattttaaagccttaatgttctacaagtaagttttgttgccaaataatgaaaatctatatatttttataataggtaattaattatttcgaatcgcaagaaaccaagatattgttttattacttattttgattaaaaacaatcaaaataaaattgcttgatttaactattttaataagaaactttttcagagagtttcagaagcttcgaattccaaaactggatcccagaacaccaatttggattccgacaagctcattctacagtgcaacaatgccatcgcatatcaaatgtaattaatagagcattggacaataaacaatattgcacagcagcctttctggacatcagccaagcatttgataaggtatggcacccaggattactttataaaatcaaaaaatctctacacaacaaatactttgacttattaaaatcatatccaaatcacagagaatttgaaactaaagtggaggatgaactatcaaaccgtaacaaaattcaatcaggagtcccacaaggtagtatactgggtccacttctttatgtactgtacacatccgatttaccaacctttccacaaaccacaattggagctttcgctgatgacacagcaatatttgcaactgaagagaattaaacagctgcagtcttaaaacttcaagaacacctagaccaaattggacagtggttaaagaaatggaagataaaagctaatgaaactaagtcaacacatataactgtcacactaagaaaagaccaatgcccaaatattagccttaatcaagtcaacataccccaacagaatatcgtcaaatacctggggcttcatcttgattctaaataaactggaaacaacgcattttaaagatgaataaacaaattgagttgagagtgaaagaaattaattggcttataggtcgaaaatcttgactctcaattgagaacaaactgctaatttataaaacagtcatcaaacttatatggacgtacggcatagaactatggagttgtgccagcaaatcaattacaaaaattatccaaagaactcaatcaaaaattctacgcaccatcgcaaatgccccgtggtacatctccaaccaaacccttcatagagacctaaacatcccgttagtcagcacagtattcaagaaagagccaacagacaccacgagaaattagaaggccaccccaaccaattaatattaccattactgcagccactaaacaacagaagattgcgaagattaaagttattgtacttgttatcaaattaactcatagaatatgtaattctgattgttaataaatgcttacaaaaaaaaaagaagcttcgaggccaaatatttcaacatccaccaaagtttctagacaaataaagaatattccaagaaaaaatacaatactatacatttttttttaaaatgctttcaaatatttcttattttctaattaatgaaatatacaaaattcacacaggtataaacataaatgatgaaaacagatattacttaattaatacgtttataacgataatttccacctccactagtttcatctctttttgtttcgcaatgtgttatgttttccatcttttgagctattttgcgggtaattagcgcgctcatcactgtataaaaaaaaacagttgtttttagaactctttagcgacgtattagtataaaataatatttatggattactgtcgaaggccatcatgataccaaaaaagaaaatgaatctgctgatttttctagtgacaatattgggtatgaatccagtatgaatctgtctgttgagtttattccgcctaagttaaaacaggttatagtgtgaattaataaaacttacactctaatattcatgtcctacaaataaacaaaactatcttgagctgacaactaggaaaacatgacctgcaacttttattgcaaccaatgttgtttaaacgtggtattccccaccatccaacttctcatcagaaataatattaaacaaccacttagcagtgctgtcttcaacccacaacaaatctatcagtaatccattgaagattcctaagacaacaccaccaagaacatccattatgtaatgtctgttcattaagatcctgctgaccgaaactgatatgctccaaacccagagaaaaggtattaaaagaaagtttaaaggccatagtttggtgtaaaagtatgctacaaatatagccctactagcatggcctgaaggaaaactaaatacgtccacatatttggcgagaggatcatctttgatgttttttggtggccgcttgcgcctgaagtaagctttggctactgctactagtattatatcagtagtaagacctaaaagcatgtttacttgcatttggactagattaggattattaaatagccagctaaaggcaatccaaaatgcaaaccatggaattccatggcaggaaatttctaaagctttacaatgaactctataagcatctaaatctaagattttgttagcccatgtaagaaactcgtttgtaatatatgcatcgtatttcaatattttttgtaatgctggtggaactctacttttaccctccgacattttgcagtatataatgtaaagtccagccaagacttatcttataatcttttacaaacttccaaaaatatataggtccgaaatgttgatgacacacttgtctattggaataaactgtttcgggatctattatattgttttttttaatgtgg

SEQ ID NO: 44 - DNA, 4720 bp, Diabrotica virgifera
  SmartBlast Evalue=2E-85; Info=Probable RNA-directed DNA polymerase from transposon X-element n=1 Tax=Drosophila melanogaster RepID=RTXE_DROME
gtttcaaagtgcggtactatcggtttcattttatatctctttataacggtgtcgcgagttttcttgtgaaaaatgatgtccaaagcagacacacaggaagatgcctccttcgccaaattggaaaatcagattgctatcatcaaatacgtaatactctttaccaacgttttgcaatgggctctcggtgcagcaatcttcgctctttgcctttggctacgattcgaggagggcattcaagaatggctccagaaattggattcagaacaattttacatcggagtatatgtacttatagtcgcttcactgatcgtcatgattgtgtcctttataggatgtattagtgccctgcaggagagtaccatggcccttttagtgtacatcggcacccaagtgctcagttttatattcggtttatccggttcggcggttcttctggataacagcgccagagattcccacttccaaccgaggatccgagagagtatgcgacgtcttatcatgaatgctcatcacgaccaatccagacaaacactagccatgattcaggaaaatgttggttgctgcggagctgatggcgcaacagactacctctctcttcagcagccccttccaagtcagtgcagagacaccgttactggaaacccattcttccacggatgtgtagatgaactcacctggttcttcgaagaaaaatgtggttggatagcaggtttagctatggcgatatgcatgattaacgtccttagtattgttttatctacggtactcatccaggcattgaaaaaagaagaagaagcatccgattcatacaggagatagatttagtgagatagagatataatgtagtaattagaatttaatgtatcttcaactaaattacttttttttagagatatacctgaaattgtaaagaacaggaaaattaaataagaaccaaaaactaaagtgaaccaacaataattgaacattccaaaatacactttttttgttaagttaactaaacgacataaatttttcattttttaagttttttattgtttttttagtattataatttggataaggtgtttttatattaagtgtgtaattataaagtttttttataggacggaacctaaattatatagaatcatacaataaactattgtctgctcattgaatttggaaaataaacatttggtatattaaaaataataatatatggcttagtgaggaactaatgaaaacgtctatacatttttgaatttaataccaacagatattgtaattattaattttaattaatcaactccaagtcaacatctagaaagcaatagaaattaaagtaattgactaactaataacattctagcaacctgtacatgtggttgtattactctgttttgacattgacaaaactagctatgtgatcagttatctctagcagtaataaactctagctgtattttgttttatatatttgtccaacaaaaaaaaattttcaaccaacattcctcttgaaataaaaagactagtagcagaaaaacgaaaagccagatcaatttggcaaagaactcacagaccagacgacaggacagtttataataacaaaacaagaaacttaaaaacagctctagaacagatgagaaacaactcatttgaaaactatgtatcaaacctttcgcgtcaagataactctatctggaaaccaatcaaaaacaaaaataaaccaataaatacttcacctccaattcggaaaaacacattaccaccaggaccatgggcaaaaagcaacaaagaaaaagctgatttatttgctgaacatctaactgaagtcttcgaccaagtacaagaagtagagcaggaactagccttaccaattaatcaacgagagcgactaactttaattacaccgaaggagatcaaagatgaaattaatcatttgaatgaaaagaaggcaccaggcactgatctcataacagcaacaatgctaaaacaacttcctaaaaaaggtatcatgaagttattgtacatattaaatgcaatcttaagacttaattattggcctatatcactaaaaattgcccaagtaattatgataccgaaacctggtaaagctttaacggatgtttcatcataccgcccaataagtctactgccaataatgtcaaaacttcttgaaaagctgttacttaaaaaattatgagcgacctagaattccaaaactggatcccagaacaccaatttggattccgacaagctcattctacagtgcaacaatgccatcgcatatcaaatgtaattaatagagcattggacaataaacaatattgcacagcagcctttctggacatcagccaagcatttgataaggtatggcacccaggattactttataaaatcaaaaaatctctacacaacaaatactttgacttattaaaatcatatccaaatcacagagaatttgaaactaaagtggaggatgaactatcaaaccgtaacaaaattcaatcaggagtcccacaaggtagtatactgggtccacttctttatgtactgtacacatccgatttaccaacctttccacaaaccacaattggagctttcgctgatgacacagcaatatttgcaactgaagagaattaaacagctgcagtcttaaaacttcaagaacacctagaccaaattggacagtggttaaagaaatggaagataaaagctaatgaaactaagtcaacacatataactgtcacactaagaaaagaccaatgcccaaatattagccttaatcaagtcaacataccccaacagaatatcgtcaaatacctggggcttcatcttgattctaaataaactggaaacaacgcattttaaagatgaataaacaaattgagttgagagtgaaagaaattaattggcttataggtcgaaaatcttgactctcaattgagaacaaactgctaatttataaaacagtcatcaaacttatatggacgtacggcatagaactatggagttgtgccagcaaatcaattacaaaaattatccaaagaactcaatcaaaaattctacgcaccatcgcaaatgccccgtggtacatctccaaccaaacccttcatagagacctaaacatcccgttagtcagcacagtattcaagaaagagccaacagacaccacgagaaattagaaggccaccccaaccaattaatattaccattactgcagccactaaacaacagaagattgcgaagattaaagttattgtacttgttatcaaattaactcatagaatatgtaattctgattgttaataaatgcttacaaaaaaaaaagaagcttcgaggccaaatatttcaacatccaccaaagtttctagacaaataaagaatattccaagaaaaaatacaatactatacatttttttttaaaatgctttcaaatatttcttattttctaattaatgaaatatacaaaattcacacaggtataaacataaatgatgaaaacagatattacttaattaatacgtttataacgataatttccacctccactagtttcatctctttttgtttcgcaatgtgttatgttttccatcttttgagctattttgcgggtaattagcgcgctcatcactgtataaaaaaaaacagttgtttttagaactctttagcgacgtattagtataaaataatatttatggattactgtcgaaggccatcatgataccaaaaaagaaaatgaatctgctgatttttctagtgacaatattgggtatgaatccagtatgaatctgtctgttgagtttattccgcctaagttaaaacaggttatagtgtgaattaataaaacttacactctaatattcatgtcctacaaataaacaaaactatcttgagctgacaactaggaaaacatgacctgcaacttttattgcaaccaatgttgtttaaacgtggtattccccaccatccaacttctcatcagaaataatattaaacaaccacttagcagtgctgtcttcaacccacaacaaatctatcagtaatccattgaagattcctaagacaacaccaccaagaacatccattatgtaatgtctgttcattaagatcctgctgaccgaaactgatatgctccaaacccagagaaaaggtattaaaagaaagtttaaaggccatagtttggtgtaaaagtatgctacaaatatagccctactagcatggcctgaaggaaaactaaatacgtccacatatttggcgagaggatcatctttgatgttttttggtggccgcttgcgcctgaagtaagctttggctactgctactagtattatatcagtagtaagacctaaaagcatgtttacttgcatttggactagattaggattattaaatagccagctaaaggcaatccaaaatgcaaaccatggaattccatggcaggaaatttctaaagctttacaatgaactctataagcatctaaatctaagattttgttagcccatgtaagaaactcgtttgtaatatatgcatcgtatttcaatattttttgtaatgctggtggaactctacttttaccctccgacattttgcagtatataatgtaaagtccagccaagacttatcttataatcttttacaaacttccaaaaatatataggtccgaaatgttgatgacacacttgtctattggaataaactgtttcgggatctattatattgttttttttaatgtgg

SEQ ID NO: 45 - DNA, 4700 bp, Diabrotica virgifera
  SmartBlast Evalue=7E-59; Info=Probable RNA-directed DNA polymerase from transposon X-element n=1 Tax=Drosophila melanogaster RepID=RTXE_DROME
caatgaactttttattatagcataatattatagctggtttattttaaacctatttttatacaacggactttcggctataacggacaccccgtccgcccaattagtccgttatatcgaggttttactgtagtcacacaataggacaacttttataaaagcctatgtgtttataaacataatcctggcaatccttcaagttaaataacaccatttttaaacaagatggggaatattgacttgtaaaataaagaacatatatatgccaagagaatgtgttgtgaagttgctctaacgtttttttcaccctactgacaaaattgaagatatttttttttgaatcttcttccatgatgagcaaaataaaaaaaaacttatatagctatagatatagctttgaatatcacgcgaaaactatgttatttgaaatcacaataggtacaagcttggctttttctgcactttttccaacaaaattaagataagtattatgtatgataaggaagctaggagcaataatgttgttgaacatttttcttgggctctataaataaaaaaacatacccaacaccgctaactttttctaaaacttaaaatacatatctgatttacagtgatagtaaaataaatatagttgcaggtcacttaatataaagataatattaatttatgatgccatggcacggagagctggaaccttttaagagacactaaggaacaaagtgaaatagtttattacatcaaatgaaaaggagtaggtacaggaataacaaaaataataaaaattcgaaagttacaatatttcgggcatacaatgaggcatccagaaggtataagcttctacacctgataataccaaaatcaccggaaatagaggcccagaccgaagaaggacatcctgggttcgaaattttcgagaatggtatcaagaaacaccctgtaatatgtttcgagctaccgtagacaaagttattattggcaaacattcgataatcggacagggtactgaaagaatatgacgtcatcaatcaatactaccaacataataccaaataatttgcaaaatggtcatcttatcatcatcatcaatggtgctacagccctatgaaagagcctcgaccttcccaaatctattacgccagtcagtcctatccattgccaaccgttaccagtttactgcgcgtatttttctcccatcctcatgtacaccatccttccatctaagttttggcctacccctatttctacttcccacaggttgtgacataaggattcttctaggagggttgttatgctgtgatcttgctagatgtcctgcccatcttagtcttcctattttataagagatactacgtctttaccaccaaatatatgtttatatctgtggtatacctcgtagttgtacctcctcctccaaataccattttcacagatgccaccgaatattcctctcaggatccttcgttcaaatataagcagaaggttttcatctgccttggagatggtccatgtctccgatccatatgtcaacactggttgtataagggttttgtatatggttatttttgttttttggcttaagtttctgcttctcatatgtctactcagtccaaaatagcatttgttgctaggattatccttcgcttgatttcttcgtcataacgttctccttggtgatcagggagcctaagtatgtgaatttgtccaccacttcaacggtagagttatcaaccgtgaattggtgaccgatgtttctggcactattgttggatgttgatgctatcatcttagttttctcctcgtttactttcaggcccatattttttgaggcatttgagaaggtggtatacatttcttctagtttgcgtgttgtgcgggcaactaggtccacgtcatctgcatatgccaaaatttggtatgatttattaaaaatatttcctctgttgtctatttggtcatctataattagttattttaaagccttaatgttctacaagtaagttttgttgccaaataatgaaaatctatatatttttataataggtaattaattatttcgaatcgcaagaaaccaagatattgttttattacttattttgattaaaaacaatcaaaataaaattgcttgatttaactattttaataagaaactttttcagagagtttcagaagcttcgaattccaaaactggatcccagaacaccaatttggattccgacaagctcattctacagtgcaacaatgccatcgcatatcaaatgtaattaatagagcattggacaataaacaatattgcacagcagcctttctggacatcagccaagcatttgataaggtatggcacccaggattactttataaaatcaaaaaatctctacacaacaaatactttgacttattaaaatcatatccaaatcacagagaatttgaaactaaagtggaggatgaactatcaaaccgtaacaaaattcaatcaggagtcccacaaggtagtatactgggtccacttctttatgtactgtacacatccgatttaccaacctttccacaaaccacaattggagctttcgctgatgacacagcaatatttgcaactgaagagaattaaacagctgcagtcttaaaacttcaagaacacctagaccaaattggacagtggttaaagaaatggaagataaaagctaatgaaactaagtcaacacatataactgtcacactaagaaaagaccaatgcccaaatattagccttaatcaagtcaacataccccaacagaatatcgtcaaatacctggggcttcatcttgattctaaataaactggaaacaacgcattttaaagatgaataaacaaattgagttgagagtgaaagaaattaattggcttataggtcgaaaatcttgactctcaattgagaacaaactgctaatttataaaacagtcatcaaacttatatggacgtacggcatagaactatggagttgtgccagcaaatcaattacaaaaattatccaaagaactcaatcaaaaattctacgcaccatcgcaaatgccccgtggtacatctccaaccaaacccttcatagagacctaaacatcccgttagtcagcacagtattcaagaaagagccaacagacaccacgagaaattagaaggccaccccaaccaattaatattaccattactgcagccactaaacaacagaagattgcgaagattaaagttattgtacttgttatcaaattaactcatagaatatgtaattctgattgttaataaatgcttacaaaaaaaaaagaagcttcgaggccaaatatttcaacatccaccaaagtttctagacaaataaagaatattccaagaaaaaatacaatactatacatttttttttaaaatgctttcaaatatttcttattttctaattaatgaaatatacaaaattcacacaggtataaacataaatgatgaaaacagatattacttaattaatacgtttataacgataatttccacctccactagtttcatctctttttgtttcgcaatgtgttatgttttccatcttttgagctattttgcgggtaattagcgcgctcatcactgtataaaaaaaaacagttgtttttagaactctttagcgacgtattagtataaaataatatttatggattactgtcgaaggccatcatgataccaaaaaagaaaatgaatctgctgatttttctagtgacaatattgggtatgaatccagtatgaatctgtctgttgagtttattccgcctaagttaaaacaggttatagtgtgaattaataaaacttacactctaatattcatgtcctacaaataaacaaaactatcttgagctgacaactaggaaaacatgacctgcaacttttattgcaaccaatgttgtttaaacgtggtattccccaccatccaacttctcatcagaaataatattaaacaaccacttagcagtgctgtcttcaacccacaacaaatctatcagtaatccattgaagattcctaagacaacaccaccaagaacatccattatgtaatgtctgttcattaagatcctgctgaccgaaactgatatgctccaaacccagagaaaaggtattaaaagaaagtttaaaggccatagtttggtgtaaaagtatgctacaaatatagccctactagcatggcctgaaggaaaactaaatacgtccacatatttggcgagaggatcatctttgatgttttttggtggccgcttgcgcctgaagtaagctttggctactgctactagtattatatcagtagtaagacctaaaagcatgtttacttgcatttggactagattaggattattaaatagccagctaaaggcaatccaaaatgcaaaccatggaattccatggcaggaaatttctaaagctttacaatgaactctataagcatctaaatctaagattttgttagcccatgtaagaaactcgtttgtaatatatgcatcgtatttcaatattttttgtaatgctggtggaactctacttttaccctccgacattttgcagtatataatgtaaagtccagccaagacttatcttataatcttttacaaacttccaaaaatatataggtccgaaatgttgatgacacacttgtctattggaataaactgtttcgggatctattatattgttttttttaatgtgg

SEQ ID NO: 46 - DNA, 4706 bp, Diabrotica virgifera
  SmartBlast Evalue=7E-59; Info=Probable RNA-directed DNA polymerase from transposon X-element n=1 Tax=Drosophila melanogaster RepID=RTXE_DROME
caatgaactttttattatagcataatattatagctggtttattttaaacctatttttatacaacggactttcggctataacggacaccccgtccgcccaattagtccgttatatcgaggttttactgtagtcacacaataggacaacttttataaaagcctatgtgtttataaacataatcctggcaatccttcaagttaaataacaccatttttaaacaagatggggaatattgacttgtaaaataaagaacatatatatgccaagagaatgtgttgtgaagttgctctaacgtttttttcaccctactgacaaaattgaagatatttttttttgaatcttcttccatgatgagcaaaataaaaaaaaacttatatagctatagatatagctttgaatatcacgcgaaaactatgttatttgaaatcacaataggtacaagcttggctttttctgcactttttccaacaaaattaagataagtattatgtatgataaggaagctaggagcaataatgttgttgaacatttttcttgggctctataaataaaaaaacatacccaacaccgctaactttttctaaaacttaaaatacatatctgatttacagtgatagtaaaataaatatagttgcaggtcacttaatataaagataatattaatttatgatgccatggcacggagagctggaaccttttaagagacactaaggaacaaagtgaaatagtttattacatcaaatgaaaaggagtaggtacaggaataacaaaaataataaaaattcgaaagttacaatatttcgggcatacaatgaggcatccagaaggtataagcttctacacctgataataccaaaatcaccggaaatagaggcccagaccgaagaaggacatcctgggttcgaaattttcgagaatggtatcaagaaacaccctgtaatatgtttcgagctaccgtagacaaagttattattggcaaacattcgataatcggacagggtactgaaagaatatgacgtcatcaatcaatactaccaacataataccaaataatttgcaaaatggtcatcttatcatcatcatcaatggtgctacagccctatgaaagagcctcgaccttcccaaatctattacgccagtcagtcctatccattgccaaccgttaccagtttactgcgcgtatttttctcccatcctcatgtacaccatccttccatctaagttttggcctacccctatttctacttcccacaggttgtgacataaggattcttctaggagggttgttatgctgtgatcttgctagatgtcctgcccatcttagtcttcctattttataagagatactacgtctttaccaccaaatatatgtttatatctgtggtatacctcgtagttgtacctcctcctccaaataccattttcacagatgccaccgaatattcctctcaggatccttcgttcaaatataagcagaaggttttcatctgccttggagatggtccatgtctccgatccatatgtcaacatcggttgtataagggttttgtataaatatggttatttttgttttttggcttaagtttctgcttctcatatgtctactcagtccaaaatagcatttgttcgctagaattatccttcgcttgatttcttccgtcatgacgttctccttggtgatcagggagcctaagtatgtgaatttgtccaccagttcaaaggtagagttatcaacagtgaattggtgaccgatgtttctggctctattgttgggtgttgatgccaacatcttagttttctcctcgtttactttcaggcccatattttttgaggcatttgagaaggtggtatacatttcttctagtttgcgtgttgtgcgggcaactaggtccacgtcatctgcatatgccaaaatttggtatgatttattaaaaatatttcctctgttgtctatttggtcatctataattagttattttaaagccttaatgttctacaagtaagttttgttgccaaataatgaaaatctatatatttttataataggtaattaattatttcgaatcgcaagaaaccaagatattgttttattacttattttgattaaaaacaatcaaaataaaattgcttgatttaactattttaataagaaactttttcagagagtttcagaagcttcgaattccaaaactggatcccagaacaccaatttggattccgacaagctcattctacagtgcaacaatgccatcgcatatcaaatgtaattaatagagcattggacaataaacaatattgcacagcagcctttctggacatcagccaagcatttgataaggtatggcacccaggattactttataaaatcaaaaaatctctacacaacaaatactttgacttattaaaatcatatccaaatcacagagaatttgaaactaaagtggaggatgaactatcaaaccgtaacaaaattcaatcaggagtcccacaaggtagtatactgggtccacttctttatgtactgtacacatccgatttaccaacctttccacaaaccacaattggagctttcgctgatgacacagcaatatttgcaactgaagagaattaaacagctgcagtcttaaaacttcaagaacacctagaccaaattggacagtggttaaagaaatggaagataaaagctaatgaaactaagtcaacacatataactgtcacactaagaaaagaccaatgcccaaatattagccttaatcaagtcaacataccccaacagaatatcgtcaaatacctggggcttcatcttgattctaaataaactggaaacaacgcattttaaagatgaataaacaaattgagttgagagtgaaagaaattaattggcttataggtcgaaaatcttgactctcaattgagaacaaactgctaatttataaaacagtcatcaaacttatatggacgtacggcatagaactatggagttgtgccagcaaatcaattacaaaaattatccaaagaactcaatcaaaaattctacgcaccatcgcaaatgccccgtggtacatctccaaccaaacccttcatagagacctaaacatcccgttagtcagcacagtattcaagaaagagccaacagacaccacgagaaattagaaggccaccccaaccaattaatattaccattactgcagccactaaacaacagaagattgcgaagattaaagttattgtacttgttatcaaattaactcatagaatatgtaattctgattgttaataaatgcttacaaaaaaaaaagaagcttcgaggccaaatatttcaacatccaccaaagtttctagacaaataaagaatattccaagaaaaaatacaatactatacatttttttttaaaatgctttcaaatatttcttattttctaattaatgaaatatacaaaattcacacaggtataaacataaatgatgaaaacagatattacttaattaatacgtttataacgataatttccacctccactagtttcatctctttttgtttcgcaatgtgttatgttttccatcttttgagctattttgcgggtaattagcgcgctcatcactgtataaaaaaaaacagttgtttttagaactctttagcgacgtattagtataaaataatatttatggattactgtcgaaggccatcatgataccaaaaaagaaaatgaatctgctgatttttctagtgacaatattgggtatgaatccagtatgaatctgtctgttgagtttattccgcctaagttaaaacaggttatagtgtgaattaataaaacttacactctaatattcatgtcctacaaataaacaaaactatcttgagctgacaactaggaaaacatgacctgcaacttttattgcaaccaatgttgtttaaacgtggtattccccaccatccaacttctcatcagaaataatattaaacaaccacttagcagtgctgtcttcaacccacaacaaatctatcagtaatccattgaagattcctaagacaacaccaccaagaacatccattatgtaatgtctgttcattaagatcctgctgaccgaaactgatatgctccaaacccagagaaaaggtattaaaagaaagtttaaaggccatagtttggtgtaaaagtatgctacaaatatagccctactagcatggcctgaaggaaaactaaatacgtccacatatttggcgagaggatcatctttgatgttttttggtggccgcttgcgcctgaagtaagctttggctactgctactagtattatatcagtagtaagacctaaaagcatgtttacttgcatttggactagattaggattattaaatagccagctaaaggcaatccaaaatgcaaaccatggaattccatggcaggaaatttctaaagctttacaatgaactctataagcatctaaatctaagattttgttagcccatgtaagaaactcgtttgtaatatatgcatcgtatttcaatattttttgtaatgctggtggaactctacttttaccctccgacattttgcagtatataatgtaaagtccagccaagacttatcttataatcttttacaaacttccaaaaatatataggtccgaaatgttgatgacacacttgtctattggaataaactgtttcgggatctattatattgttttttttaatgtgg

SEQ ID NO: 47 - DNA, 4650 bp, Diabrotica virgifera
  SmartBlast Evalue=7E-59; Info=Probable RNA-directed DNA polymerase from transposon X-element n=1 Tax=Drosophila melanogaster RepID=RTXE_DROME
caatgaactttttattatagcataatattatagctggtttattttaaacctatttttatacaacggactttcggctataacggacaccccgtccgcccaattagtccgttatatcgaggttttactgtagtcacacaataggacaacttttataaaagcctatgtgtttataaacataatcctggcaatccttcaagttaaataacaccatttttaaacaagatggggaatattgacttgtaaaataaagaacatatatatgccaagagaatgtgttgtgaagttgctctaacgtttttttcaccctactgacaaaattgaagatatttttttttgaatcttcttccatgatgagcaaaataaaaaaaaacttatatagctatagatatagctttgaatatcacgcgaaaactatgttatttgaaatcacaataggtacaagcttggctttttctgcactttttccaacaaaattaagataagtattatgtatgataaggaagctaggagcaataatgttgttgaacatttttcttgggctctataaataaaaaaacatacccaacaccgctaactttttctaaaacttaaaatacatatctgatttacagtgatagtaaaataaatatagttgcaggtcacttaatataaagataatattaatttatgatgccatggcacggagagctgtagtaggaggagtaggtacaggaataacaaaaataataaaaattcgaaagttacaatatttcgggcatacaatgaggcatccagaaggtataagcttctacacctgataataccaaaatcaccggaaatagaggcccagaccgaagaaggacatcctgggttcgaaattttcgagaatggtatcaagaaacaccctgtaatatgtttcgagctaccgtagacaaagttattattggcaaacattcgataatcggacagggtactgaaagaatatgacgtcatcaatcaatactaccaacataataccaaataatttgcaaaatggtcatcttatcatcatcatcaatggtgctacagccctatgaaagagcctcgaccttcccaaatctattacgccagtcagtcctatccattgccaaccgttaccagtttactgcgcgtatttttctcccatcctcatgtacaccatccttccatctaagttttggcctacccctatttctacttcccacaggttgtgacataaggattcttctaggagggttgttatgctgtgatcttgctagatgtcctgcccatcttagtcttcctattttataagagatactacgtctttaccaccaaatatatgtttatatctgtggtatacctcgtagttgtacctcctcctccaaataccattttcacagatgccaccgaatattcctctcaggatccttcgttcaaatataagcagaaggttttcatctgccttggagatggtccatgtctccgatccatatgtcaacactggttgtataagggttttgtatatggttatttttgttttttggcttaagtttctgcttctcatatgtctactcagtccaaaatagcatttgttgctaggattatccttcgcttgatttcttcgtcataacgttctccttggtgatcagggagcctaagtatgtgaatttgtccaccacttcaacggtagagttatcaaccgtgaattggtgaccgatgtttctggcactattgttggatgttgatgctatcatcttagttttctcctcgtttactttcaggcccatattttttgaggcatttgagaaggtggtatacatttcttctagtttgcgtgttgtgcgggcaactaggtccacgtcatctgcatatgccaaaatttggtatgatttattaaaaatatttcctctgttgtctatttggtcatctataattagttattttaaagccttaatgttctacaagtaagttttgttgccaaataatgaaaatctatatatttttataataggtaattaattatttcgaatcgcaagaaaccaagatattgttttattacttattttgattaaaaacaatcaaaataaaattgcttgatttaactattttaataagaaactttttcagagagtttcagaagcttcgaattccaaaactggatcccagaacaccaatttggattccgacaagctcattctacagtgcaacaatgccatcgcatatcaaatgtaattaatagagcattggacaataaacaatattgcacagcagcctttctggacatcagccaagcatttgataaggtatggcacccaggattactttataaaatcaaaaaatctctacacaacaaatactttgacttattaaaatcatatccaaatcacagagaatttgaaactaaagtggaggatgaactatcaaaccgtaacaaaattcaatcaggagtcccacaaggtagtatactgggtccacttctttatgtactgtacacatccgatttaccaacctttccacaaaccacaattggagctttcgctgatgacacagcaatatttgcaactgaagagaattaaacagctgcagtcttaaaacttcaagaacacctagaccaaattggacagtggttaaagaaatggaagataaaagctaatgaaactaagtcaacacatataactgtcacactaagaaaagaccaatgcccaaatattagccttaatcaagtcaacataccccaacagaatatcgtcaaatacctggggcttcatcttgattctaaataaactggaaacaacgcattttaaagatgaataaacaaattgagttgagagtgaaagaaattaattggcttataggtcgaaaatcttgactctcaattgagaacaaactgctaatttataaaacagtcatcaaacttatatggacgtacggcatagaactatggagttgtgccagcaaatcaattacaaaaattatccaaagaactcaatcaaaaattctacgcaccatcgcaaatgccccgtggtacatctccaaccaaacccttcatagagacctaaacatcccgttagtcagcacagtattcaagaaagagccaacagacaccacgagaaattagaaggccaccccaaccaattaatattaccattactgcagccactaaacaacagaagattgcgaagattaaagttattgtacttgttatcaaattaactcatagaatatgtaattctgattgttaataaatgcttacaaaaaaaaaagaagcttcgaggccaaatatttcaacatccaccaaagtttctagacaaataaagaatattccaagaaaaaatacaatactatacatttttttttaaaatgctttcaaatatttcttattttctaattaatgaaatatacaaaattcacacaggtataaacataaatgatgaaaacagatattacttaattaatacgtttataacgataatttccacctccactagtttcatctctttttgtttcgcaatgtgttatgttttccatcttttgagctattttgcgggtaattagcgcgctcatcactgtataaaaaaaaacagttgtttttagaactctttagcgacgtattagtataaaataatatttatggattactgtcgaaggccatcatgataccaaaaaagaaaatgaatctgctgatttttctagtgacaatattgggtatgaatccagtatgaatctgtctgttgagtttattccgcctaagttaaaacaggttatagtgtgaattaataaaacttacactctaatattcatgtcctacaaataaacaaaactatcttgagctgacaactaggaaaacatgacctgcaacttttattgcaaccaatgttgtttaaacgtggtattccccaccatccaacttctcatcagaaataatattaaacaaccacttagcagtgctgtcttcaacccacaacaaatctatcagtaatccattgaagattcctaagacaacaccaccaagaacatccattatgtaatgtctgttcattaagatcctgctgaccgaaactgatatgctccaaacccagagaaaaggtattaaaagaaagtttaaaggccatagtttggtgtaaaagtatgctacaaatatagccctactagcatggcctgaaggaaaactaaatacgtccacatatttggcgagaggatcatctttgatgttttttggtggccgcttgcgcctgaagtaagctttggctactgctactagtattatatcagtagtaagacctaaaagcatgtttacttgcatttggactagattaggattattaaatagccagctaaaggcaatccaaaatgcaaaccatggaattccatggcaggaaatttctaaagctttacaatgaactctataagcatctaaatctaagattttgttagcccatgtaagaaactcgtttgtaatatatgcatcgtatttcaatattttttgtaatgctggtggaactctacttttaccctccgacattttgcagtatataatgtaaagtccagccaagacttatcttataatcttttacaaacttccaaaaatatataggtccgaaatgttgatgacacacttgtctattggaataaactgtttcgggatctattatattgttttttttaatgtgg

SEQ ID NO: 48 - DNA, 9058 bp, Diabrotica virgifera
  SmartBlast Evalue=0; Info=Catenin alpha n=3 Tax=Aculeata RepID= E2A263_9HYME
attttatacaaagcacagcgtgaaatctgtgcgcggacaaaaaacttgttatcgccgatttattataatttatatttatgaagtgactgtgtcggtacttaatagctttatgtatattgtgtttgttttcatttaaattttaaatttctataccaaagatatgagccggttgaacatattcagttttttgaaaatgcttcaagcattgtgttgtgtactgggagttacatcagcatcttcagacccagttatagtctccagagaagaatggggggcccgcgctcctaaaaacatagaaaatatggcgaacccagtaccttacgtcgttatccaccacagttatctaccaccagcttgttacaatttaaccgattgtttcaaagccatgcgttggatgcaagaccttcaccaagacaccaacggttgggcggatattggctacaactttggtgttggcggagatggtagagcctacgaaggaaggggatggtccagagttggtgctcatgctccctattacaacagcaaaagtattggaatatgtataattggagattggacagttgaacttccaccagaaaatcagctagcgacagttcatgagctaatacaaaaaggagtgagagaagggtacatccagaaggactacaaattggtaggccataggcaggttagacaaggtaccgaatgtccgggtgacaggctcttcaaagagatacacaagtggcagaatttttgtgaacaaccagacgagatagcagtaaggacaaacaacacttggttccttaaaaaaactgtacatgacaatagtagggataaggaagataaagatgaagacaataatgacaatggtattaataggttagaaaaaagaactgtttagatttaagtaatacattttatttattattaaaaaaacacctatgcagttatgattcatttttgagataaacaatagggtgaatttatttttcttttagtcagatttagtaataaactaagctcgtttagtagtgtatttactaccgatttacgttttattttgtatatagctaagtctcaattaaaaatgatgactgaccgcttcggtttaaaatgggacccgaaaaacttagagataagaaccatgtctgtggaaaagacattggaacccctagtgcttcaagttaccaccctcgtcaataccaaggggcctagcaaaaagaagaaaggaaagtctaaacgtgccaatgctctggttagtactgttgaaaaagccacggaaaacttcatagaaaagggggagcagatagcctatgagaatccagatattactgaggaaatgctggcagctgttgacgaagtcaagaaaacgggacatgctatgagcggagctgcaagagaattttcagaagacccatgttcttctttaaaaagaggaaatatggttagggctgctagaaatcttttatcggctgtaactcgtcttttaattctagcggacatggttgatgtccaccttttgctcaaatccttacatgtagttgaggatgacctcgaaaaactaaaaaatgcttcaagcaatggcgaacttttagacaatattaaagcctttggtcaaaatgccaacgaattaatgaatcaggctgctaaaaggcagcaagaactgaaagatccacaacttcgtgatgatctagcagctgctagagctgtacttaagaaacattccactatgttattaactgcctctaaggtttatgtacgtcatccagagctagcagctgccaaagcaaatagagattatgtcttgaaacaagtttgtgaagctgtgaataccattaatgatgtagctcagggaagaactcctcaacctgcttctggaccatatgatggacctggagagttggctgctgctttggatgattttgatgatcacatggtaatggagcctctagcatacaatgaagttcataccaggccttcattggaagaacgtctagaaagcattataagtggtgcagctcttatggcagattctagttgtactagggatgaaagaagggaaaggatagttgcagagtgtaatgctgtaagacaagctttgcaagacttgttgactgaatatatgacaaatatgggcaataaagataaaagtgagagcctaatacgagcaatcgacaatatgggtagaaagactaaggatttaagaagacaactgagaaaagctgttgtagatcatgtatctgacagtttcttggaaaccaacgtacctcttctcgttttaataaaggcagctcaaaatggcaacgaaaaggaggtagaagaatatgcagttgtatttactgaacattccaataagttagtagaagttgctaaccttgtctgcagcatgtctaataatgaagatggtgtcaaaatggttagatatgctgctgctcagatcgacaatctgtgtcctgaagtaataaatgcagctagaattttagccgctagacctcgcagtaaagttgctcaagaaaatatggacgcattcaagcaatcatgggagaatcaagtgagacttctgactgaagcagtcgatgacattactactatcgacgactttttggctgtttctgaaaaccatattctggaagatgttaataaatgtgtacttgccttgcaagaaggtgattctgacacattggatcgcactgccagtggtataagaggaagatccaatagggtgtgcaatgtagtaacagctgaaatggataattacgaaccttgcatttataccaaacgtgttcttgaagccgtcaaagtattgaatgatcaagtgatgcccaagtttactcaaagagtgcaagttgcagttcaagctttgggaaatagtcctcccaaagaagtggatgaaaacgattttatcgatgcttctagacttgtttacgatggagtgagagaaataagaagagccgttctaatgaatagagccgatgaagatttagatccagaagatgtcgaattggatgaaaactatctaatagaaacaagaagcaaatcgagcgctcacacaggcgaacatggagttgatgagtatccagatattagtggaattacaacggctagggaagctatgggtaaaatgccggaagaagataaacagaagattttgcaacaggttgagttcttcaggagtgaaaaactcaagtttgaccgtgaggtcgctaaatgggacgacactggcaacgatattatcgttcttgctaagcacatgtgtatgattatgatggaaatgacagattttaccaggggtcgtggccctctaaaaaccactatggacgttattaatgcggctaaaaagatttccgaagctggaaccaaattagataaacttactcgccaaatagctgaacagtgcccagagagttccaccaaaaaagatttgttggcttatttgcaacgtattgctctttactgccaccagatgaacattacatcaaaggttaaagccgatgttcaaaacatcagtggagaacttattgtatctgggttggacagtgctacttctttgattcaagctgctaagaacttgatgaatgctgtagttctcacagtaaaagcttcatatgtggcatccaccaaatacccaagacaaggaactattgcatcgccgattgttgtctggaagatgaaagcgccagagaagaagccgttagtcagaccagagaaacccgaagaagttcgtgccaaagtacgcaaaggctcacaaaagaaagttcaaaatccaattcacgctctttctgaattccaaagcccaactgagtctgtgtaaacgtaaacctttatccattaatatattaaccagatgttaactattatttgcctgattattctgtgacattttctatgtacctatagattcgtattaatataaagtctgattagaggcatgttcaagttcatttaacatttgaacagtacatagtaagtccgtagtttcatcaagtgttaaatacagtgtgttctaacgaaaatatgaccccctcccagaaactgagaagccaaggagtttcttcacaatttgaaaatcacgtcaatttgtattggaagagggacgaatgttcatgcaattcatgccctcagatgtaaccccctactgccccccagttttttgaaatagcaagtgtgtcgagttgcacatcatttgaaaggtagtttttttttctctacacgaccctctatttttttaatttgcgaaataactttaaagacagttttggatttaactaatttataatacatttgttaagttcaaaattgtcttcaaacttgttatgtaaattaaaaaaaaaatagtgtcgtgtagagaaaaaaattacctttcaaatgatgtgccactcgatcacacttgctatttaaaaaaaaagtgggggttgatgcggggcagtggagggttacatttgagggcatgaagtttgcatgaaagttcgttcccctcccattataaattgacgtatttttaaaatttttaagaagctcttggtttctgagtttctggggtggtcagattttcgatggaacagactgtatatgcgaaatgcatatggcacaattaaaagtacagctgtttcgctacaatatgcaactaacatcgaaaatatttgcaagtttaaaatacatatacacctatgttttaacatactttagacctagaacttaactaggtgctgcgcagaatgaaatttcccaccgttgggccaagtgttttccatttttttagtaaagcaaaaaatccggacatttctcatatccggacgccaatccggacatgccgttcaaatccggactgtccggatgaaatccggacgtatggtaaccctaagtattcatcaactgattcatgggttttgttcttttagacttgttttttcttcttgtgaagccctttgtagtcccatcaatagtattggactatcgcgtgctattaaatttaggatgtcatatgtgtaatattctcttggtgtagttggaactcttcttagaagtttgcctcaaaaatttgtatttcttgtcagcttcacgattctagaaatggtgagtctgatttaaagatcttgttaagctaccaagattatgaatttgcacgtgatttccacaggacttccacaaagtagccagcaaactatatttctactatatttctggctagtgctttgatttcagccagggtttccccatttctttctcttcgtccagtattgcccttttccaagtttttaagtctgcatactttctgtcagccttcagaattccaatccagcactgttcttacaatgtcatctgttgtgtcaatgttgtgtacggagtgtgtggtccaggcatctcgataattttcttcgccttatttgctttatggcatttttttggttggcttgggtctccacaaattttcatttaaaattcgatgaggccaaaatatcatcatcaatggtgctacagcactatgaaagagcctcgaccttctcaagtctattacgccagtcagtcctatccattgccaactgttgccagtttgctgcgcgatttttctaccatcgtctacaccatccttccatctgagttttggcctacccctatttctacttcccacaggttgtgacataaggattcttcaaggagggttgttatgctgtgatcttgctagatgttctgcccacttagtcttcctattttataagagatactacgtctttaccaccaaatatatgtttatatctgtggtatacctcgtagttgtacctcctcctccaaataccattttcacagatgccaccgaatattcctctcaggatccttcgttcaaatataagcagaaggttttcatctgccttggagatggtccatgtctccgatccatatgtcaacactggttgtataagggttttgtatatggttatttttgttttttggcttaagtttctgcttctcatatgtctactcagtccaaaatagcatttgttgctaggattatccttcgcttgatttcttcgtcataacgttctccttggtgatcagggagcctaagtatgtgaatttgtccaccacttcaacggtagagttatcaaccgtgaattggtgaccgatgtttctggcactattgttggatgttgatgctatcatcttagttttctcctcgtttactttcaggcccatattttttgaggcatttgagaaggtggtatacatttcttctagtttgcgtgttgtgcgggcaactaggtccacgtcatctgcatatgccaaaatttggtatgatttattaaaaatatttcctctgttgtctatttggtcatctataattagttattttaaagccttaatgttctacaagtaagttttgttgccaaataatgaaaatctatatatttttataataggtaattaattatttcgaatcgcaagaaaccaagatattgttttattacttattttgattaaaaacaatcaaaataaaattgcttgatttaactattttaataagaaactttttcagagagtttcagaagcttcgaattccaaaactggatcccagaacaccaatttggattccgacaagctcattctacagtgcaacaatgccatcgcatatcaaatgtaattaatagagcattggacaataaacaatattgcacagcagcctttctggacatcagccaagcatttgataaggtatggcacccaggattactttataaaatcaaaaaatctctacacaacaaatactttgacttattaaaatcatatccaaatcacagagaatttgaaactaaagtggaggatgaactatcaaaccgtaacaaaattcaatcaggagtcccacaaggtagtatactgggtccacttctttatgtactgtacacatccgatttaccaacctttccacaaaccacaattggagctttcgctgatgacacagcaatatttgcaactgaagagaattaaacagctgcagtcttaaaacttcaagaacacctagaccaaattggacagtggttaaagaaatggaagataaaagctaatgaaactaagtcaacacatataactgtcacactaagaaaagaccaatgcccaaatattagccttaatcaagtcaacataccccaacagaatatcgtcaaatacctggggcttcatcttgattctaaataaactggaaacaacgcattttaaagatgaataaacaaattgagttgagagtgaaagaaattaattggcttataggtcgaaaatcttgactctcaattgagaacaaactgctaatttataaaacagtcatcaaacttatatggacgtacggcatagaactatggagttgtgccagcaaatcaattacaaaaattatccaaagaactcaatcaaaaattctacgcaccatcgcaaatgccccgtggtacatctccaaccaaacccttcatagagacctaaacatcccgttagtcagcacagtattcaagaaagagccaacagacaccacgagaaattagaaggccaccccaaccaattaatattaccattactgcagccactaaacaacagaagattgcgaagattaaagttattgtacttgttatcaaattaactcatagaatatgtaattctgattgttaataaatgcttacaaaaaaaaaagaagcttcgaggccaaatatttcaacatccaccaaagtttctagacaaataaagaatattccaagaaaaaatacaatactatacatttttttttaaaatgctttcaaatatttcttattttctaattaatgaaatatacaaaattcacacaggtataaacataaatgatgaaaacagatattacttaattaatacgtttataacgataatttccacctccactagtttcatctctttttgtttcgcaatgtgttatgttttccatcttttgagctattttgcgggtaattagcgcgctcatcactgtataaaaaaaaacagttgtttttagaactctttagcgacgtattagtataaaataatatttatggattactgtcgaaggccatcatgataccaaaaaagaaaatgaatctgctgatttttctagtgacaatattgggtatgaatccagtatgaatctgtctgttgagtttattccgcctaagttaaaacaggttatagtgtgaattaataaaacttacactctaatattcatgtcctacaaataaacaaaactatcttgagctgacaactaggaaaacatgacctgcaacttttattgcaaccaatgttgtttaaacgtggtattccccaccatccaacttctcatcagaaataatattaaacaaccacttagcagtgctgtcttcaacccacaacaaatctatcagtaatccattgaagattcctaagacaacaccaccaagaacatccattatgtaatgtctgttcattaagatcctgctgaccgaaactgatatgctccaaacccagagaaaaggtattaaaagaaagtttaaaggccatagtttggtgtaaaagtatgctacaaatatagccctactagcatggcctgaaggaaaactaaatacgtccacatatttggcgagaggatcatctttgatgttttttggtggccgcttgcgcctgaagtaagctttggctactgctactagtattatatcagtagtaagacctaaaagcatgtttacttgcatttggactagattaggattattaaatagccagctaaaggcaatccaaaatgcaaaccatggaattccatggcaggaaatttctaaagctttacaatgaactctataagcatctaaatctaagattttgttagcccatgtaagaaactcgtttgtaatatatgcatcgtatttcaatattttttgtaatgctggtggaactctacttttaccctccgacattttgcagtatataatgtaaagtccagccaagacttatcttataatcttttacaaacttccaaaaatatataggtccgaaatgttgatgacacacttgtctattggaataaactgtttcgggatctattatattgttttttttaatgtgg

SEQ ID NO: 49 - DNA, 4656 bp, Diabrotica virgifera
  SmartBlast Evalue=7E-59; Info=Probable RNA-directed DNA polymerase from transposon X-element n=1 Tax=Drosophila melanogaster RepID=RTXE_DROME
caatgaactttttattatagcataatattatagctggtttattttaaacctatttttatacaacggactttcggctataacggacaccccgtccgcccaattagtccgttatatcgaggttttactgtagtcacacaataggacaacttttataaaagcctatgtgtttataaacataatcctggcaatccttcaagttaaataacaccatttttaaacaagatggggaatattgacttgtaaaataaagaacatatatatgccaagagaatgtgttgtgaagttgctctaacgtttttttcaccctactgacaaaattgaagatatttttttttgaatcttcttccatgatgagcaaaataaaaaaaaacttatatagctatagatatagctttgaatatcacgcgaaaactatgttatttgaaatcacaataggtacaagcttggctttttctgcactttttccaacaaaattaagataagtattatgtatgataaggaagctaggagcaataatgttgttgaacatttttcttgggctctataaataaaaaaacatacccaacaccgctaactttttctaaaacttaaaatacatatctgatttacagtgatagtaaaataaatatagttgcaggtcacttaatataaagataatattaatttatgatgccatggcacggagagctgtagtaggaggagtaggtacaggaataacaaaaataataaaaattcgaaagttacaatatttcgggcatacaatgaggcatccagaaggtataagcttctacacctgataataccaaaatcaccggaaatagaggcccagaccgaagaaggacatcctgggttcgaaattttcgagaatggtatcaagaaacaccctgtaatatgtttcgagctaccgtagacaaagttattattggcaaacattcgataatcggacagggtactgaaagaatatgacgtcatcaatcaatactaccaacataataccaaataatttgcaaaatggtcatcttatcatcatcatcaatggtgctacagccctatgaaagagcctcgaccttcccaaatctattacgccagtcagtcctatccattgccaaccgttaccagtttactgcgcgtatttttctcccatcctcatgtacaccatccttccatctaagttttggcctacccctatttctacttcccacaggttgtgacataaggattcttctaggagggttgttatgctgtgatcttgctagatgtcctgcccatcttagtcttcctattttataagagatactacgtctttaccaccaaatatatgtttatatctgtggtatacctcgtagttgtacctcctcctccaaataccattttcacagatgccaccgaatattcctctcaggatccttcgttcaaatataagcagaaggttttcatctgccttggagatggtccatgtctccgatccatatgtcaacatcggttgtataagggttttgtataaatatggttatttttgttttttggcttaagtttctgcttctcatatgtctactcagtccaaaatagcatttgttcgctagaattatccttcgcttgatttcttccgtcatgacgttctccttggtgatcagggagcctaagtatgtgaatttgtccaccagttcaaaggtagagttatcaacagtgaattggtgaccgatgtttctggctctattgttgggtgttgatgccaacatcttagttttctcctcgtttactttcaggcccatattttttgaggcatttgagaaggtggtatacatttcttctagtttgcgtgttgtgcgggcaactaggtccacgtcatctgcatatgccaaaatttggtatgatttattaaaaatatttcctctgttgtctatttggtcatctataattagttattttaaagccttaatgttctacaagtaagttttgttgccaaataatgaaaatctatatatttttataataggtaattaattatttcgaatcgcaagaaaccaagatattgttttattacttattttgattaaaaacaatcaaaataaaattgcttgatttaactattttaataagaaactttttcagagagtttcagaagcttcgaattccaaaactggatcccagaacaccaatttggattccgacaagctcattctacagtgcaacaatgccatcgcatatcaaatgtaattaatagagcattggacaataaacaatattgcacagcagcctttctggacatcagccaagcatttgataaggtatggcacccaggattactttataaaatcaaaaaatctctacacaacaaatactttgacttattaaaatcatatccaaatcacagagaatttgaaactaaagtggaggatgaactatcaaaccgtaacaaaattcaatcaggagtcccacaaggtagtatactgggtccacttctttatgtactgtacacatccgatttaccaacctttccacaaaccacaattggagctttcgctgatgacacagcaatatttgcaactgaagagaattaaacagctgcagtcttaaaacttcaagaacacctagaccaaattggacagtggttaaagaaatggaagataaaagctaatgaaactaagtcaacacatataactgtcacactaagaaaagaccaatgcccaaatattagccttaatcaagtcaacataccccaacagaatatcgtcaaatacctggggcttcatcttgattctaaataaactggaaacaacgcattttaaagatgaataaacaaattgagttgagagtgaaagaaattaattggcttataggtcgaaaatcttgactctcaattgagaacaaactgctaatttataaaacagtcatcaaacttatatggacgtacggcatagaactatggagttgtgccagcaaatcaattacaaaaattatccaaagaactcaatcaaaaattctacgcaccatcgcaaatgccccgtggtacatctccaaccaaacccttcatagagacctaaacatcccgttagtcagcacagtattcaagaaagagccaacagacaccacgagaaattagaaggccaccccaaccaattaatattaccattactgcagccactaaacaacagaagattgcgaagattaaagttattgtacttgttatcaaattaactcatagaatatgtaattctgattgttaataaatgcttacaaaaaaaaaagaagcttcgaggccaaatatttcaacatccaccaaagtttctagacaaataaagaatattccaagaaaaaatacaatactatacatttttttttaaaatgctttcaaatatttcttattttctaattaatgaaatatacaaaattcacacaggtataaacataaatgatgaaaacagatattacttaattaatacgtttataacgataatttccacctccactagtttcatctctttttgtttcgcaatgtgttatgttttccatcttttgagctattttgcgggtaattagcgcgctcatcactgtataaaaaaaaacagttgtttttagaactctttagcgacgtattagtataaaataatatttatggattactgtcgaaggccatcatgataccaaaaaagaaaatgaatctgctgatttttctagtgacaatattgggtatgaatccagtatgaatctgtctgttgagtttattccgcctaagttaaaacaggttatagtgtgaattaataaaacttacactctaatattcatgtcctacaaataaacaaaactatcttgagctgacaactaggaaaacatgacctgcaacttttattgcaaccaatgttgtttaaacgtggtattccccaccatccaacttctcatcagaaataatattaaacaaccacttagcagtgctgtcttcaacccacaacaaatctatcagtaatccattgaagattcctaagacaacaccaccaagaacatccattatgtaatgtctgttcattaagatcctgctgaccgaaactgatatgctccaaacccagagaaaaggtattaaaagaaagtttaaaggccatagtttggtgtaaaagtatgctacaaatatagccctactagcatggcctgaaggaaaactaaatacgtccacatatttggcgagaggatcatctttgatgttttttggtggccgcttgcgcctgaagtaagctttggctactgctactagtattatatcagtagtaagacctaaaagcatgtttacttgcatttggactagattaggattattaaatagccagctaaaggcaatccaaaatgcaaaccatggaattccatggcaggaaatttctaaagctttacaatgaactctataagcatctaaatctaagattttgttagcccatgtaagaaactcgtttgtaatatatgcatcgtatttcaatattttttgtaatgctggtggaactctacttttaccctccgacattttgcagtatataatgtaaagtccagccaagacttatcttataatcttttacaaacttccaaaaatatataggtccgaaatgttgatgacacacttgtctattggaataaactgtttcgggatctattatattgttttttttaatgtgg

SEQ ID NO: 50 - DNA, 4360 bp, Diabrotica virgifera
  SmartBlast Evalue=1E-63; Info=Reverse transcriptase family member n=1 Tax=Glycine max RepID=Q1AKH8_SOYBN
atcatcatcattctctttgcttatccctatgcggggtcggcttccctaattgcatttctccacacaattatattttgggtcatatcaatgttaatcccctttaccaacatgtcctgcttatcgtctccccccaggtcttctttggtcttcctctcctactctttccagaaacctgcacttcagctattcttcatattgggtgattaagtctcgacgttgaacatgaccaaaccatcttaacctatgctctctcattttggcatcaattggtgccacacctagacttcccctaatatactcatttctaattttatccttctttgtcactccactcatccatctaagcattctcatttccgccacatgcattcgttgttcctctttctttttcactgcccaacattcagttccgtacatcatagccggtcttatggctgttttatagaattttcccttcagcttcattggaatttttctgtcacacaacacaccactcgcttctttccacttcatccatccagccctaattctactgcatgcatctccatctatttctccattactctgtaataccgatcctaggtacttaaaactattgcttttcacaatcatttcaccatccaaagataccattttatttgtagtagctccatctttaaatgaacattccaaatactctgtttttgtcctactaagttttaaacctttttcctccagagcttgtctccactgttccagtttttgttctaaacttctttccctatttcctattaacactttcccaagtctattacaccagtcagtcctatccattgccaaccgttgccagtttgctgcgcctatttttctcccatcctcatctacaccatccttccatctaagttttggcctacccgtatttctacttcccacaggttgtgacataaggattcttctaggagggttgttatgctgtgatcttgctagatgtcctgcccatcttagtcttcctattttataagagatactacgtctttaccaccaaatatatgtttatatctgtggtatacctcgtagttgtacctcctcctccaaataccattttcacagatgccaccgaatattcctctcaggatccttcgttcaaatataagcagaaggttttcatctgccttggagatggtccatgtctccgatccatatgtcaacactggttgtataagggttttgtatatggttatttttgttttttggcttaagtttctgcttctcatatgtctactcagtccaaaatagcatttgttgctaggattatccttcgcttgatttcttcgtcataacgttctccttggtgatcagggagcctaagtatgtgaatttgtccaccacttcaacggtagagttatcaaccgtgaattggtgaccgatgtttctggcactattgttggatgttgatgctatcatcttagttttctcctcgtttactttcaggcccatattttttgaggcatttgagaaggtggtatacatttcttctagtttgcgtgttgtgcgggcaactaggtccacgtcatctgcatatgccaaaatttggtatgatttattaaaaatatttcctctgttgtctatttggtcatctataattagttattttaaagccttaatgttctacaagtaagttttgttgccaaataatgaaaatctatatatttttataataggtaattaattatttcgaatcgcaagaaaccaagatattgttttattacttattttgattaaaaacaatcaaaataaaattgcttgatttaactattttaataagaaactttttcagagagtttcagaagcttcgaattccaaaactggatcccagaacaccaatttggattccgacaagctcattctacagtgcaacaatgccatcgcatatcaaatgtaattaatagagcattggacaataaacaatattgcacagcagcctttctggacatcagccaagcatttgataaggtatggcacccaggattactttataaaatcaaaaaatctctacacaacaaatactttgacttattaaaatcatatccaaatcacagagaatttgaaactaaagtggaggatgaactatcaaaccgtaacaaaattcaatcaggagtcccacaaggtagtatactgggtccacttctttatgtactgtacacatccgatttaccaacctttccacaaaccacaattggagctttcgctgatgacacagcaatatttgcaactgaagagaattaaacagctgcagtcttaaaacttcaagaacacctagaccaaattggacagtggttaaagaaatggaagataaaagctaatgaaactaagtcaacacatataactgtcacactaagaaaagaccaatgcccaaatattagccttaatcaagtcaacataccccaacagaatatcgtcaaatacctggggcttcatcttgattctaaataaactggaaacaacgcattttaaagatgaataaacaaattgagttgagagtgaaagaaattaattggcttataggtcgaaaatcttgactctcaattgagaacaaactgctaatttataaaacagtcatcaaacttatatggacgtacggcatagaactatggagttgtgccagcaaatcaattacaaaaattatccaaagaactcaatcaaaaattctacgcaccatcgcaaatgccccgtggtacatctccaaccaaacccttcatagagacctaaacatcccgttagtcagcacagtattcaagaaagagccaacagacaccacgagaaattagaaggccaccccaaccaattaatattaccattactgcagccactaaacaacagaagattgcgaagattaaagttattgtacttgttatcaaattaactcatagaatatgtaattctgattgttaataaatgcttacaaaaaaaaaagaagcttcgaggccaaatatttcaacatccaccaaagtttctagacaaataaagaatattccaagaaaaaatacaatactatacatttttttttaaaatgctttcaaatatttcttattttctaattaatgaaatatacaaaattcacacaggtataaacataaatgatgaaaacagatattacttaattaatacgtttataacgataatttccacctccactagtttcatctctttttgtttcgcaatgtgttatgttttccatcttttgagctattttgcgggtaattagcgcgctcatcactgtataaaaaaaaacagttgtttttagaactctttagcgacgtattagtataaaataatatttatggattactgtcgaaggccatcatgataccaaaaaagaaaatgaatctgctgatttttctagtgacaatattgggtatgaatccagtatgaatctgtctgttgagtttattccgcctaagttaaaacaggttatagtgtgaattaataaaacttacactctaatattcatgtcctacaaataaacaaaactatcttgagctgacaactaggaaaacatgacctgcaacttttattgcaaccaatgttgtttaaacgtggtattccccaccatccaacttctcatcagaaataatattaaacaaccacttagcagtgctgtcttcaacccacaacaaatctatcagtaatccattgaagattcctaagacaacaccaccaagaacatccattatgtaatgtctgttcattaagatcctgctgaccgaaactgatatgctccaaacccagagaaaaggtattaaaagaaagtttaaaggccatagtttggtgtaaaagtatgctacaaatatagccctactagcatggcctgaaggaaaactaaatacgtccacatatttggcgagaggatcatctttgatgttttttggtggccgcttgcgcctgaagtaagctttggctactgctactagtattatatcagtagtaagacctaaaagcatgtttacttgcatttggactagattaggattattaaatagccagctaaaggcaatccaaaatgcaaaccatggaattccatggcaggaaatttctaaagctttacaatgaactctataagcatctaaatctaagattttgttagcccatgtaagaaactcgtttgtaatatatgcatcgtatttcaatattttttgtaatgctggtggaactctacttttaccctccgacattttgcagtatataatgtaaagtccagccaagacttatcttataatcttttacaaacttccaaaaatatataggtccgaaatgttgatgacacacttgtctattggaataaactgtttcgggatctattatattgttttttttaatgtgg

SEQ ID NO: 51 - DNA, 4366 bp, Diabrotica virgifera
  SmartBlast Evalue=1E-63; Info=Reverse transcriptase family member n=1 Tax=Glycine max RepID=Q1AKH8_SOYBN
atcatcatcattctctttgcttatccctatgcggggtcggcttccctaattgcatttctccacacaattatattttgggtcatatcaatgttaatcccctttaccaacatgtcctgcttatcgtctccccccaggtcttctttggtcttcctctcctactctttccagaaacctgcacttcagctattcttcatattgggtgattaagtctcgacgttgaacatgaccaaaccatcttaacctatgctctctcattttggcatcaattggtgccacacctagacttcccctaatatactcatttctaattttatccttctttgtcactccactcatccatctaagcattctcatttccgccacatgcattcgttgttcctctttctttttcactgcccaacattcagttccgtacatcatagccggtcttatggctgttttatagaattttcccttcagcttcattggaatttttctgtcacacaacacaccactcgcttctttccacttcatccatccagccctaattctactgcatgcatctccatctatttctccattactctgtaataccgatcctaggtacttaaaactattgcttttcacaatcatttcaccatccaaagataccattttatttgtagtagctccatctttaaatgaacattccaaatactctgtttttgtcctactaagttttaaacctttttcctccagagcttgtctccactgttccagtttttgttctaaacttctttccctatttcctattaacactttcccaagtctattacaccagtcagtcctatccattgccaaccgttgccagtttgctgcgcctatttttctcccatcctcatctacaccatccttccatctaagttttggcctacccgtatttctacttcccacaggttgtgacataaggattcttctaggagggttgttatgctgtgatcttgctagatgtcctgcccatcttagtcttcctattttataagagatactacgtctttaccaccaaatatatgtttatatctgtggtatacctcgtagttgtacctcctcctccaaataccattttcacagatgccaccgaatattcctctcaggatccttcgttcaaatataagcagaaggttttcatctgccttggagatggtccatgtctccgatccatatgtcaacatcggttgtataagggttttgtataaatatggttatttttgttttttggcttaagtttctgcttctcatatgtctactcagtccaaaatagcatttgttcgctagaattatccttcgcttgatttcttccgtcatgacgttctccttggtgatcagggagcctaagtatgtgaatttgtccaccagttcaaaggtagagttatcaacagtgaattggtgaccgatgtttctggctctattgttgggtgttgatgccaacatcttagttttctcctcgtttactttcaggcccatattttttgaggcatttgagaaggtggtatacatttcttctagtttgcgtgttgtgcgggcaactaggtccacgtcatctgcatatgccaaaatttggtatgatttattaaaaatatttcctctgttgtctatttggtcatctataattagttattttaaagccttaatgttctacaagtaagttttgttgccaaataatgaaaatctatatatttttataataggtaattaattatttcgaatcgcaagaaaccaagatattgttttattacttattttgattaaaaacaatcaaaataaaattgcttgatttaactattttaataagaaactttttcagagagtttcagaagcttcgaattccaaaactggatcccagaacaccaatttggattccgacaagctcattctacagtgcaacaatgccatcgcatatcaaatgtaattaatagagcattggacaataaacaatattgcacagcagcctttctggacatcagccaagcatttgataaggtatggcacccaggattactttataaaatcaaaaaatctctacacaacaaatactttgacttattaaaatcatatccaaatcacagagaatttgaaactaaagtggaggatgaactatcaaaccgtaacaaaattcaatcaggagtcccacaaggtagtatactgggtccacttctttatgtactgtacacatccgatttaccaacctttccacaaaccacaattggagctttcgctgatgacacagcaatatttgcaactgaagagaattaaacagctgcagtcttaaaacttcaagaacacctagaccaaattggacagtggttaaagaaatggaagataaaagctaatgaaactaagtcaacacatataactgtcacactaagaaaagaccaatgcccaaatattagccttaatcaagtcaacataccccaacagaatatcgtcaaatacctggggcttcatcttgattctaaataaactggaaacaacgcattttaaagatgaataaacaaattgagttgagagtgaaagaaattaattggcttataggtcgaaaatcttgactctcaattgagaacaaactgctaatttataaaacagtcatcaaacttatatggacgtacggcatagaactatggagttgtgccagcaaatcaattacaaaaattatccaaagaactcaatcaaaaattctacgcaccatcgcaaatgccccgtggtacatctccaaccaaacccttcatagagacctaaacatcccgttagtcagcacagtattcaagaaagagccaacagacaccacgagaaattagaaggccaccccaaccaattaatattaccattactgcagccactaaacaacagaagattgcgaagattaaagttattgtacttgttatcaaattaactcatagaatatgtaattctgattgttaataaatgcttacaaaaaaaaaagaagcttcgaggccaaatatttcaacatccaccaaagtttctagacaaataaagaatattccaagaaaaaatacaatactatacatttttttttaaaatgctttcaaatatttcttattttctaattaatgaaatatacaaaattcacacaggtataaacataaatgatgaaaacagatattacttaattaatacgtttataacgataatttccacctccactagtttcatctctttttgtttcgcaatgtgttatgttttccatcttttgagctattttgcgggtaattagcgcgctcatcactgtataaaaaaaaacagttgtttttagaactctttagcgacgtattagtataaaataatatttatggattactgtcgaaggccatcatgataccaaaaaagaaaatgaatctgctgatttttctagtgacaatattgggtatgaatccagtatgaatctgtctgttgagtttattccgcctaagttaaaacaggttatagtgtgaattaataaaacttacactctaatattcatgtcctacaaataaacaaaactatcttgagctgacaactaggaaaacatgacctgcaacttttattgcaaccaatgttgtttaaacgtggtattccccaccatccaacttctcatcagaaataatattaaacaaccacttagcagtgctgtcttcaacccacaacaaatctatcagtaatccattgaagattcctaagacaacaccaccaagaacatccattatgtaatgtctgttcattaagatcctgctgaccgaaactgatatgctccaaacccagagaaaaggtattaaaagaaagtttaaaggccatagtttggtgtaaaagtatgctacaaatatagccctactagcatggcctgaaggaaaactaaatacgtccacatatttggcgagaggatcatctttgatgttttttggtggccgcttgcgcctgaagtaagctttggctactgctactagtattatatcagtagtaagacctaaaagcatgtttacttgcatttggactagattaggattattaaatagccagctaaaggcaatccaaaatgcaaaccatggaattccatggcaggaaatttctaaagctttacaatgaactctataagcatctaaatctaagattttgttagcccatgtaagaaactcgtttgtaatatatgcatcgtatttcaatattttttgtaatgctggtggaactctacttttaccctccgacattttgcagtatataatgtaaagtccagccaagacttatcttataatcttttacaaacttccaaaaatatataggtccgaaatgttgatgacacacttgtctattggaataaactgtttcgggatctattatattgttttttttaatgtgg

SEQ ID NO: 52 - DNA, 4296 bp, Diabrotica virgifera
  SmartBlast Evalue=6E-66; Info=Reverse transcriptase family member n=1 Tax=Glycine max RepID=Q1AKH8_SOYBN
aattctatcttgggtcatatcaatgttaatcccctttaccaacatgtcctgccttatcgtctccccccaggtcttctttggtcttcctctcctactccttccaggaatctgcacttcagctattcttcgtattgggtgattaagtctcgacgttgaacatgaccaaaccatcttaacctatgctctctcattttggcatcaattggtgccacacctagacttcccctaatatactcatttctaattttatccttctttgtcactccactcatccatctaagcattctcatttccgccacatgcattcgttgttcctctttctttttcactgcccaacattcagttccgtacatcatagccggtcttatggctgttttatagaattttcccttcagcttcattggaatttttctgtcacacaacacaccactcgcttctttccacttcatccatccagccctaattctactgcatgcatctccatctatttctccattactctgtaataccgatcctaggtacttaaaactattgcttttcacaatcatttcaccatccaaagataccattttatttgtagtagctccatctttaaatgaacattccaaatactctgtttttgtcctactaagttttaaacctttttcctccagagcttgtctccactgttccagtttttgttctaaacttctttccctatttcctattaacactttcccaagtctattacaccagtcagtcctatccattgccaaccgttgccagtttgctgcgcctatttttctcccatcctcatctacaccatccttccatctaagttttggcctacccgtatttctacttcccacaggttgtgacataaggattcttctaggagggttgttatgctgtgatcttgctagatgtcctgcccatcttagtcttcctattttataagagatactacgtctttaccaccaaatatatgtttatatctgtggtatacctcgtagttgtacctcctcctccaaataccattttcacagatgccaccgaatattcctctcaggatccttcgttcaaatataagcagaaggttttcatctgccttggagatggtccatgtctccgatccatatgtcaacactggttgtataagggttttgtatatggttatttttgttttttggcttaagtttctgcttctcatatgtctactcagtccaaaatagcatttgttgctaggattatccttcgcttgatttcttcgtcataacgttctccttggtgatcagggagcctaagtatgtgaatttgtccaccacttcaacggtagagttatcaaccgtgaattggtgaccgatgtttctggcactattgttggatgttgatgctatcatcttagttttctcctcgtttactttcaggcccatattttttgaggcatttgagaaggtggtatacatttcttctagtttgcgtgttgtgcgggcaactaggtccacgtcatctgcatatgccaaaatttggtatgatttattaaaaatatttcctctgttgtctatttggtcatctataattagttattttaaagccttaatgttctacaagtaagttttgttgccaaataatgaaaatctatatatttttataataggtaattaattatttcgaatcgcaagaaaccaagatattgttttattacttattttgattaaaaacaatcaaaataaaattgcttgatttaactattttaataagaaactttttcagagagtttcagaagcttcgaattccaaaactggatcccagaacaccaatttggattccgacaagctcattctacagtgcaacaatgccatcgcatatcaaatgtaattaatagagcattggacaataaacaatattgcacagcagcctttctggacatcagccaagcatttgataaggtatggcacccaggattactttataaaatcaaaaaatctctacacaacaaatactttgacttattaaaatcatatccaaatcacagagaatttgaaactaaagtggaggatgaactatcaaaccgtaacaaaattcaatcaggagtcccacaaggtagtatactgggtccacttctttatgtactgtacacatccgatttaccaacctttccacaaaccacaattggagctttcgctgatgacacagcaatatttgcaactgaagagaattaaacagctgcagtcttaaaacttcaagaacacctagaccaaattggacagtggttaaagaaatggaagataaaagctaatgaaactaagtcaacacatataactgtcacactaagaaaagaccaatgcccaaatattagccttaatcaagtcaacataccccaacagaatatcgtcaaatacctggggcttcatcttgattctaaataaactggaaacaacgcattttaaagatgaataaacaaattgagttgagagtgaaagaaattaattggcttataggtcgaaaatcttgactctcaattgagaacaaactgctaatttataaaacagtcatcaaacttatatggacgtacggcatagaactatggagttgtgccagcaaatcaattacaaaaattatccaaagaactcaatcaaaaattctacgcaccatcgcaaatgccccgtggtacatctccaaccaaacccttcatagagacctaaacatcccgttagtcagcacagtattcaagaaagagccaacagacaccacgagaaattagaaggccaccccaaccaattaatattaccattactgcagccactaaacaacagaagattgcgaagattaaagttattgtacttgttatcaaattaactcatagaatatgtaattctgattgttaataaatgcttacaaaaaaaaaagaagcttcgaggccaaatatttcaacatccaccaaagtttctagacaaataaagaatattccaagaaaaaatacaatactatacatttttttttaaaatgctttcaaatatttcttattttctaattaatgaaatatacaaaattcacacaggtataaacataaatgatgaaaacagatattacttaattaatacgtttataacgataatttccacctccactagtttcatctctttttgtttcgcaatgtgttatgttttccatcttttgagctattttgcgggtaattagcgcgctcatcactgtataaaaaaaaacagttgtttttagaactctttagcgacgtattagtataaaataatatttatggattactgtcgaaggccatcatgataccaaaaaagaaaatgaatctgctgatttttctagtgacaatattgggtatgaatccagtatgaatctgtctgttgagtttattccgcctaagttaaaacaggttatagtgtgaattaataaaacttacactctaatattcatgtcctacaaataaacaaaactatcttgagctgacaactaggaaaacatgacctgcaacttttattgcaaccaatgttgtttaaacgtggtattccccaccatccaacttctcatcagaaataatattaaacaaccacttagcagtgctgtcttcaacccacaacaaatctatcagtaatccattgaagattcctaagacaacaccaccaagaacatccattatgtaatgtctgttcattaagatcctgctgaccgaaactgatatgctccaaacccagagaaaaggtattaaaagaaagtttaaaggccatagtttggtgtaaaagtatgctacaaatatagccctactagcatggcctgaaggaaaactaaatacgtccacatatttggcgagaggatcatctttgatgttttttggtggccgcttgcgcctgaagtaagctttggctactgctactagtattatatcagtagtaagacctaaaagcatgtttacttgcatttggactagattaggattattaaatagccagctaaaggcaatccaaaatgcaaaccatggaattccatggcaggaaatttctaaagctttacaatgaactctataagcatctaaatctaagattttgttagcccatgtaagaaactcgtttgtaatatatgcatcgtatttcaatattttttgtaatgctggtggaactctacttttaccctccgacattttgcagtatataatgtaaagtccagccaagacttatcttataatcttttacaaacttccaaaaatatataggtccgaaatgttgatgacacacttgtctattggaataaactgtttcgggatctattatattgttttttttaatgtgg

SEQ ID NO: 53 - DNA, 4302 bp, Diabrotica virgifera
  SmartBlast Evalue=6E-66; Info=Reverse transcriptase family member n=1 Tax=Glycine max RepID=Q1AKH8_SOYBN
aattctatcttgggtcatatcaatgttaatcccctttaccaacatgtcctgccttatcgtctccccccaggtcttctttggtcttcctctcctactccttccaggaatctgcacttcagctattcttcgtattgggtgattaagtctcgacgttgaacatgaccaaaccatcttaacctatgctctctcattttggcatcaattggtgccacacctagacttcccctaatatactcatttctaattttatccttctttgtcactccactcatccatctaagcattctcatttccgccacatgcattcgttgttcctctttctttttcactgcccaacattcagttccgtacatcatagccggtcttatggctgttttatagaattttcccttcagcttcattggaatttttctgtcacacaacacaccactcgcttctttccacttcatccatccagccctaattctactgcatgcatctccatctatttctccattactctgtaataccgatcctaggtacttaaaactattgcttttcacaatcatttcaccatccaaagataccattttatttgtagtagctccatctttaaatgaacattccaaatactctgtttttgtcctactaagttttaaacctttttcctccagagcttgtctccactgttccagtttttgttctaaacttctttccctatttcctattaacactttcccaagtctattacaccagtcagtcctatccattgccaaccgttgccagtttgctgcgcctatttttctcccatcctcatctacaccatccttccatctaagttttggcctacccgtatttctacttcccacaggttgtgacataaggattcttctaggagggttgttatgctgtgatcttgctagatgtcctgcccatcttagtcttcctattttataagagatactacgtctttaccaccaaatatatgtttatatctgtggtatacctcgtagttgtacctcctcctccaaataccattttcacagatgccaccgaatattcctctcaggatccttcgttcaaatataagcagaaggttttcatctgccttggagatggtccatgtctccgatccatatgtcaacatcggttgtataagggttttgtataaatatggttatttttgttttttggcttaagtttctgcttctcatatgtctactcagtccaaaatagcatttgttcgctagaattatccttcgcttgatttcttccgtcatgacgttctccttggtgatcagggagcctaagtatgtgaatttgtccaccagttcaaaggtagagttatcaacagtgaattggtgaccgatgtttctggctctattgttgggtgttgatgccaacatcttagttttctcctcgtttactttcaggcccatattttttgaggcatttgagaaggtggtatacatttcttctagtttgcgtgttgtgcgggcaactaggtccacgtcatctgcatatgccaaaatttggtatgatttattaaaaatatttcctctgttgtctatttggtcatctataattagttattttaaagccttaatgttctacaagtaagttttgttgccaaataatgaaaatctatatatttttataataggtaattaattatttcgaatcgcaagaaaccaagatattgttttattacttattttgattaaaaacaatcaaaataaaattgcttgatttaactattttaataagaaactttttcagagagtttcagaagcttcgaattccaaaactggatcccagaacaccaatttggattccgacaagctcattctacagtgcaacaatgccatcgcatatcaaatgtaattaatagagcattggacaataaacaatattgcacagcagcctttctggacatcagccaagcatttgataaggtatggcacccaggattactttataaaatcaaaaaatctctacacaacaaatactttgacttattaaaatcatatccaaatcacagagaatttgaaactaaagtggaggatgaactatcaaaccgtaacaaaattcaatcaggagtcccacaaggtagtatactgggtccacttctttatgtactgtacacatccgatttaccaacctttccacaaaccacaattggagctttcgctgatgacacagcaatatttgcaactgaagagaattaaacagctgcagtcttaaaacttcaagaacacctagaccaaattggacagtggttaaagaaatggaagataaaagctaatgaaactaagtcaacacatataactgtcacactaagaaaagaccaatgcccaaatattagccttaatcaagtcaacataccccaacagaatatcgtcaaatacctggggcttcatcttgattctaaataaactggaaacaacgcattttaaagatgaataaacaaattgagttgagagtgaaagaaattaattggcttataggtcgaaaatcttgactctcaattgagaacaaactgctaatttataaaacagtcatcaaacttatatggacgtacggcatagaactatggagttgtgccagcaaatcaattacaaaaattatccaaagaactcaatcaaaaattctacgcaccatcgcaaatgccccgtggtacatctccaaccaaacccttcatagagacctaaacatcccgttagtcagcacagtattcaagaaagagccaacagacaccacgagaaattagaaggccaccccaaccaattaatattaccattactgcagccactaaacaacagaagattgcgaagattaaagttattgtacttgttatcaaattaactcatagaatatgtaattctgattgttaataaatgcttacaaaaaaaaaagaagcttcgaggccaaatatttcaacatccaccaaagtttctagacaaataaagaatattccaagaaaaaatacaatactatacatttttttttaaaatgctttcaaatatttcttattttctaattaatgaaatatacaaaattcacacaggtataaacataaatgatgaaaacagatattacttaattaatacgtttataacgataatttccacctccactagtttcatctctttttgtttcgcaatgtgttatgttttccatcttttgagctattttgcgggtaattagcgcgctcatcactgtataaaaaaaaacagttgtttttagaactctttagcgacgtattagtataaaataatatttatggattactgtcgaaggccatcatgataccaaaaaagaaaatgaatctgctgatttttctagtgacaatattgggtatgaatccagtatgaatctgtctgttgagtttattccgcctaagttaaaacaggttatagtgtgaattaataaaacttacactctaatattcatgtcctacaaataaacaaaactatcttgagctgacaactaggaaaacatgacctgcaacttttattgcaaccaatgttgtttaaacgtggtattccccaccatccaacttctcatcagaaataatattaaacaaccacttagcagtgctgtcttcaacccacaacaaatctatcagtaatccattgaagattcctaagacaacaccaccaagaacatccattatgtaatgtctgttcattaagatcctgctgaccgaaactgatatgctccaaacccagagaaaaggtattaaaagaaagtttaaaggccatagtttggtgtaaaagtatgctacaaatatagccctactagcatggcctgaaggaaaactaaatacgtccacatatttggcgagaggatcatctttgatgttttttggtggccgcttgcgcctgaagtaagctttggctactgctactagtattatatcagtagtaagacctaaaagcatgtttacttgcatttggactagattaggattattaaatagccagctaaaggcaatccaaaatgcaaaccatggaattccatggcaggaaatttctaaagctttacaatgaactctataagcatctaaatctaagattttgttagcccatgtaagaaactcgtttgtaatatatgcatcgtatttcaatattttttgtaatgctggtggaactctacttttaccctccgacattttgcagtatataatgtaaagtccagccaagacttatcttataatcttttacaaacttccaaaaatatataggtccgaaatgttgatgacacacttgtctattggaataaactgtttcgggatctattatattgttttttttaatgtgg

SEQ ID NO: 54 - DNA, 3657 bp, Diabrotica virgifera
  SmartBlast Evalue=0; Info=Endonuclease-reverse transcriptase HmRTE-e01 n=1 Tax=Heliconius melpomene RepID=C6Y4D5_9NEOP
ataaggtgcatgcaatgcatcactagattttagttttttttgttagtaggaactgctaatttagaattatttgctgcggtaaacttttattatctttttaggataatagggtaatttaaagacaatttaaatattgcctttaaattgttctttaacattatggttatttcgatgcgtcccctaacttttaagcatcagatccaggcatttttccgattttcaaaacaataattattttcgatatatttcatcatcatcatcatcattctctttgccttatccctatgcggggtcggcttccctaattgcatttctccacacaattctatcttgggtcatatcaatgttaatcccctttaccaacatgtcctgccttatcgtctccccccaggtcttctttggtcttcctctcctactccttccaggaatctgcacttcagctattcttcgtattgggtgattaacgtctcgacgttgaacatgaccaaaccatcttaacctatgctctctcattttggcatcaattggtgccacacctagacttcccctaatatactcatttctaattttatccttctttgtcactccactcatccatctaagcattctcatttccgccacatgcattcgttgttcctctttctttttcactgcccaacattcagttccgtacatcatagccggtcttatggctgttttatagaattttcccttcagcttcattggaatttttctgtcacacaacacaccactcgcttctttccacttcatccatccagccctaattctactgcatgcatctccatctatttctccattactctgtaataccgatcctaggtacttaaaactattgcttttcacaatcatttcaccatccaaagataccattttatttgtagtagctccatctttaaatgaacattccaaatactctgtttttgtcctactaagttttaaacctttttcctccagagcttgtctccactgttccagtttttgttctaagtctctttcactatttcctactaacacgacatcatcagcatacattaagcaccatggaatgttaccctgtagtttcgctgttatctggtccaaaactaatgagaataaatacggactaagcacagagccttggtgcaatcctactttcacatgaaatttatcagtctctcccacacctgtcctaacactagtcgttactccctcatacatatccctcacaatctttacatattcaccagggactcctttcttattgagtgcccaccacagaatctctcgaggaactctatcatatgctttctcaagatcaatgaataccatatgagcgtttgtttctttactcctgtatttttccatcaactgccttataatgaaaattgcatctgttgttgatctaccctgcataaagccaaattgattctcggatatttcggtctcttcacgtatccgtctatcaattactctttcccatattttcatggtgtggctaagcagttttatagccctgtagtttgtacattgttgtatatctcccttgtttttgtaaacaggtaccagtatactgcttctccattcgtctggcatttgtccaacttccataattctattaaatagacctgctagccaccttgttcctgtctctcccaatgctctccatacttccccaggaatatcatctggtcctaccgcttttcctttctttattttttgaagcgcttgagccacttcctcgttggttattttggtgaccattgctgctactgtctccgttgactctacaggctgtctgtcaaattcttcatttaataagctgtcaaagtactttctccatctctttttgacatccctttcgtgaactagtattttattattttcatctcggatacatctaatctgattaaaatcttttgctttctttgctctctgtttggctattttatatatcttcgtttcgccttccctggtatcaagttgatcgtataggtttgaatacgcttctgctttggcttttgctactgctactttcgcttcctttttggcgaccatatagttttgaagatctatgtcgatctggtttcttgccactttttatataattttcccttctcttttatttttccttgtacttcatttgaccaccaccaagtctctttatcctcaaacttctttcctgacgttttcccaagtatttcaatagccgtctctctaataatattggccatttttctccaaattgtgttagggcttcctttcatgttccaacatattttttctactattctttccctgaatagaccttctttctcatcttttagcatccaccacttgattttttgtggtcctctccgatatttttgtttagtttcgctttttacttcgatgtccagaacaagcagcttatgttgttggcttactgtctcactaactattaccttgcagtccttgcattcacgtatgtcttctttccttatcatgaagtagtctatttgggattgatgttgtccacttttgtaggtaataagttgagtttctctctttttaaagaatgtgttaacaatcgccatatccaatgctgttgctaattctagcatgtcatctccagcttcatttctagttccaaagcctaatcccccatgtattgtttcatatcctgtcttggcttggcccacatgtgcattgaaatcacctcctattataactttctcctctgctggaatatcactcagtacgtctcctaattggtcatagaaagctcttctttcattctcacccagacctgtttgaggagcatacacacacacaacattcaatacctctttatcaattacaaatttcactgacatcattctatcactcgttcttacaacttctactacgttatctttcatttcactatcagcaattataccaactccatttctagtgttactactccctacataccacaatttatatccatcacctagttctttcgccctttgtcctttccacctagtttcttgaatacaagcaatttgaactcttcttcgtttgagcgcatccactaactccagactcttacctgtaagactaccaagattccaagaccctatcctgatttttctaacctgtaatggtgttccccctgagatagtcctcacccggagatccgaatggaggctcattttacttccggaacattttacctcaggagatgccatcatttcagtataagtttttatttcgtttggagaaggtcttttcattattatggcctgaaaagatttttggatatttgatgcctgaatgccttttctatcagcaccataccctgccctgtcctgcacgtttagccaatacaccaccaatgcaaccaaagtgcagtattaccccacacccgcctgcatttttctgtataggccaggatccctactgtaaggactgccctataagccaatgtattgttgcccgtatcccgccactaggaggcacgtacttcattcgggatacaatttcagtattttataaatgctagaatgttccacacggtgatgtgagctttgagaaaaaaaaacactttttaattcgtacatccggtatacaatgaggatgtacctatttggcagcaatattattacagcgatattgttaaggaatgaggctacggca

SEQ ID NO: 55 - DNA, 3658 bp, Diabrotica virgifera
  SmartBlast Evalue=0; Info=Endonuclease-reverse transcriptase HmRTE-e01 n=1 Tax=Heliconius melpomene RepID=C6Y4D5_9NEOP
ataaggtgcatgcaatgcatcactagattttagttttttttgttagtaggaactgctaatttagaattatttgctgcggtaaacttttattatctttttaggataatagggtaatttaaagacaatttaaatattgcctttaaattgttctttaacattatggttatttcgatgcgtcccctaacttttaagcatcagatccaggcatttttccgattttcaaaacaataattattttcgatatatttcatcatcatcatcatcattctctttgccttatccctatgcggggtcggcttccctaattgcatttctccacacaattctatcttgggtcatatcaatgttaatcccctttaccaacatgtcctgccttatcgtctccccccaggtcttctttggtcttcctctcctactccttccaggaatctgcacttcagctattcttcgtattgggtgattaacgtctcgacgttgaacatgaccaaaccatcttaacctatgctctctcattttggcatcaattggtgccacacctagacttcccctaatatactcatttctaattttatccttctttgtcactccactcatccatctaagcattctcatttccgccacatgcattcgttgttcctctttctttttcactgcccaacattcagttccgtacatcatagccggtcttatggctgttttatagaattttcccttcagcttcattggaatttttctgtcacacaacacaccactcgcttctttccacttcatccatccagccctaattctactgcatgcatctccatctatttctccattactctgtaataccgatcctaggtacttaaaactattgcttttcacaatcatttcaccatccaaagataccattttatttgtagtagctccatctttaaatgaacattccaaatactctgtttttgtcctactaagttttaaacctttttcctccagagcttgtctccactgttccagtttttgttctaagtctctttcactatttcctactaacacgacatcatcagcatacattaagcaccatggaatgttaccctgtagtttcgctgttatctggtccaaaactaatgagaataaatacggactaagcacagagccttggtgcaatcctactttcacatgaaatttatcagtctctcccacacctgtcctaacactagtcgttactccctcatacatatccctcacaatctttacatattcaccagggactcctttcttattgagtgcccaccacagaatctctcgaggaactctatcatatgctttctcaagatcaatgaataccatatgagcgtttgtttctttactcctgtatttttccatcaactgccttataatgaaaattgcatctgttgttgatctaccctgcataaagccaaattgattctcggatatttcggtctcttcacgtatccgtctatcaattactctttcccatattttcatggtgtggctaagcagttttatagccctgtagtttgtacattgttgtatatctcccttgtttttgtaaacaggtaccagtatactgcttctccattcgtctggcatttgtccaacttccataattctattaaatagacctgctagccaccttgttcctgtctctcccaatgctctccatacttccccaggaatatcatctggtcctaccgcttttcctttctttattttttgaagcgcttgagccacttcctcgttggttattttggtgaccattgctgctactgtctccgttgactctacaggctgtctgtcaaattcttcatttaataagctgtcaaagtactttctccatctctttttgacatccctttcgtgaactagtattttattattttcatctcggatacatctaatctgattaaaatcttttgctttctttgctctctgtttggctattttatatatcttcgtttcgccttccctggtatcaagttgatcgtataggtttgaatacgcttctgctttggcttttgctactgctactttcgcttcctttttcgccaccatatagttttgaagatctgtgtcggatctggtttcttgccactttttatataattttctcttctcttttatttttccttgtacttcgtttgaccaccaccaagtctctttatcctcaaacttttttcctgacgttttcccaagtatttcaatagcagtctctctaatactactggccatttttctccaaattgtattagggcttcctttcatgttccaacatattttttctactattcttctcctgaatagaccttctttctcatcttttagcatccaccacttgattttttgtggtcctctccgatatttttgtttagtttcgctttttacttcgatgtccagaacaagcagcttatgttgttggcttactgtctcactaactattaccttgcagtccttgcattcacgtatgtcttctttccttatcatgaagtagtctatttgggattgatgttgtccacttttgtaggtaataagttgagtttctctctttttaaagaatgtgttaacaatcgccatatccaatgctgttgctaattctagcatgtcatctccagcttcatttctagttccaaagcctaatcccccatgtattgtttcatatcctgtcttggcttggcccacatgtgcattgaaatcacctcctattataactttctcctctgctggaatatcactcagtacgtctcctaattggtcatagaaagctcttctttcattctcacccagacctgtttgaggagcatacacacacacaacattcaatacctctttatcaattacaaatttcactgacatcattctatcactcgttcttacaacttctactacgttatctttcatttcactatcagcaattataccaactccatttctagtgttactactccctacataccacaatttatatccatcacctagttctttcgccctttgtcctttccacctagtttcttgaatacaagcaatttgaactcttcttcgtttgagcgcatccactaactccagactcttacctgtaagactaccaagattccaagaccctatcctgatttttctaacctgtaatggtgttccccctgagatagtcctcacccggagatccgaatggaggctcattttacttccggaacattttacctcaggagatgccatcatttcagtataagtttttatttcgtttggagaaggtcttttcattattatggcctgaaaagatttttggatatttgatgcctgaatgccttttctatcagcaccataccctgccctgtcctgcacgtttagccaatacaccaccaatgcaaccaaagtgcagtattaccccacacccgcctgcatttttctgtataggccaggatccctactgtaaggactgccctataagccaatgtattgttgcccgtatcccgccactaggaggcacgtacttcattcgggatacaatttcagtattttataaatgctagaatgttccacacggtgatgtgagctttgagaaaaaaaaacactttttaattcgtacatccggtatacaatgaggatgtacctatttggcagcaatattattacagcgatattgttaaggaatgaggctacggca

SEQ ID NO: 56 - DNA, 4036 bp, Diabrotica virgifera
  SmartBlast Evalue=6E-71; Info=CD9 antigen n=1 Tax=Harpegnathos saltator RepID=E2B773_9HYME
gtttcaaagtgcggtactatcggtttcattttatatctctttataacggtgtcgcgagttttcttgtgaaaaatgatgtccaaagcagacacacaggaagatgcctccttcgccaaattggaaaatcagattgctatcatcaaatacgtaatactctttaccaacgttttgcaatgggctctcggtgcagcaatcttcgctctttgcctttggctacgattcgaggagggcattcaagaatggctccagaaattggattcagaacaattttacatcggagtatatgtacttatagtcgcttcactgatcgtcatgattgtgtcctttataggatgtattagtgccctgcaggagagtaccatggcccttttagtgtacatcggcacccaagtgctcagttttatattcggtttatccggttcggcggttcttctggataacagcgccagagattcccacttccaaccgaggatccgagagagtatgcgacgtcttatcatgaatgctcatcacgaccaatccagacaaacactagccatgattcaggaaaatgttggttgctgcggagctgatggcgcaacagactacctctctcttcagcagccccttccaagtcagtgcagagacaccgttactggaaacccattcttccacggatgtgtagatgaactcacctggttcttcgaagaaaaatgtggttggatagcaggtttagctatggcgatatgcatgattaacgtccttagtattgttttatctacggtactcatccaggcattgaaaaaagaagaagaagcatccgattcatacaggagatagatttagtgagatagagatataatgtagtaattagaatttaatgtatcttcaactaaattacttttttttagagatatacctgaaattgtaaagaacaggaaaattaaataagaaccaaaaactaaagtgaaccaacaataattgaacattccaaaatacactttttttgttaagttaactaaacgacataaatttttcattttttaagttttttattgtttttttagtattataatttggataaggtgtttttatattaagtgtgtaattataaagtttttttataggacggaacctaaattatatagaatcatacaataaactattgtctgctcattgaatttggaaaataaacatttggtatattaaaaataataatatatggcttagtgaggaactaatgaaaacgtctatacatttttgaatttaataccaacagatattgtaattattaattttaattaatcaactccaagtcaacatctagaaagcaatagaaattaaagtaattgactaactaataacattctagcaacctgtacatgtggttgtattactctgttttgacattgacaaaactagctatgtgatcagttatctctagcagtaataaactctagctgtattttgttttatatatttgtccaaagaattggtttattttaaagcaaatataatggtttaacccaggggtgggcaaactttttttggtaagggccataaaatatttttgatctattaccgagagccgcaatatttgttaccttaacatattcgaatttttaactttttactaattttgtttacgtgtgttggggggggggggatggttaaattaaataaacacaaataaacatattcagtacgattcaaagattattcaaaaaaatttaaaaccaaatattgaaaaataagccaacggtggcaaatttttacaggcagctctaagaaaaaatggattttgcagtagatcaatgcatatgaaacaaaaaattcaaaaatatgttattagcttatgagtttctcgaggtaacgctgttgagttttttagttttaacgatttttgagtttttgatatcactcaaaataccagtcaaaataaggaaatttttgtaaaaagtgtgaaaatcaacatatttattattgttaaccaaaacatatctcgatagagttacttcacgaagtgaccaaagaaaatctatgaaaaattttaggtggagctgtcaagtaggtagtttttgagttacaatgtccaccgcctttgaaaaaagcagttttgagaaaaacgcatttggtttgacaacttttatttccctttgttttttgtctgtcaaatcgtaaagtgatgtacgccggaatatgtttttgaatcgtagagtaatttataaaagagacgagaacagctgttgtacgtttctccctacgctcaggctactgcaaagcgagtcgaaggtagggatattaaacatgctttacttccggtaattttactccagtcaagctgaaaattttagagagtagtcttgaagtttatttatttatttatttatgtactttcatttaaaatataaaaaaaaatcaaacatttaaaacaaaaaaaattttcaaaccgtaaccctcccctctaaacagcattcgcatttaattaagcatggtatttccctcaaatatatgtgtatctatatatttatttatttttattttatctctgaacctatttctttttccttaatattgttctgaagctatttgcttgtaacatcttatgcaatttactattttgtttgagaatgggccacaatttaagtttgaaattaaatttatttgacgttccgatttccacttcggaaatcgttatcaaaatgcaaaacattgataaattaagcatttatttaattagtttaatttattgatgttttgtattttgataatgatttccgatgtggaaatcgaaaataaatttaataaatttaatttcaaacttaaattgttgcttgttcccaaacaaaatagtgaattctgtgttcacattgctattagttacttaaatatttgaagggaaattccgtgcttaaatagatgcaaacacgcatcatacgtaatatgccacacgcgtcattaaaatcaaaataaacaaagttataaatttgaaaaatcttagattcccttcattgtttttgttttctttgaaagaattaaataatatcaaaatatgcacgatgatttaatcctattgaacgaataattaacaatattagttataattgaaatgacgttggcgttgactacttgcaaaacatttttgcacaatacctgctcatggattaagcagtgaaaaataataactaatgttctgaaaattgttcatggacgtaatctttaagttttctcaacactacaatatttgttcctcttaaatttggtgctccgtcagttgttacacttactaggtggttacagcgttaatttaaaattttccaaacagttccagactacttccaaaaatatcgtttccatttgttgaaatttcgtggatttcattcaggcagccgacaaaactctaccggaaacccaaataattgcccgcgttatgttgaaaatttgcggaaaaatcaatcgctgcgaaagtgttattgtattagctgtgttaatagctgcattatctgtatttatttaataatattagcaataaaattaaaaaaaaattaaattaaaatatttcacttttttccgcgggccgcaaaaaaatgtataaggggccgcactttgcccacccctggatagatggtaggcaagacgaggtagtggagctgttcacatcaatccggcaggttgtgcatacgactattttattagtttagcgtacacaagtgaattgaatttgagtggttggtaatatccacattgaaatgttaataacctttgtagcctggatatgtcagaataacattttttttaaatagttaaaaaactcttcttgatcttgatttttttttcttttacggcctttgggaacttcgcccatttagccagcaacgcttcttgaaagcgacgcctcaccatacaccaagaccattacgaatccattacaaaaacaatccagggtaggagtatttgatcttgatttaaatcattaaagagtacataaaatgccccggaatattttcttagcatgttgattcgatgcatccagtgcaacatatttcttctctgtctt

SEQ ID NO: 57 - DNA, 4036 bp, Diabrotica virgifera; identical to SEQ ID NO: 56
  SmartBlast Evalue=6E-71; Info=CD9 antigen n=1 Tax=Harpegnathos saltator RepID=E2B773_9HYME

SEQ ID NO: 58 - DNA, 3863 bp, Diabrotica virgifera
  SmartBlast Evalue=7E-74; Info=Reverse transcriptase family member n=1 Tax=Glycine max RepID=Q1AKH8_SOYBN
aggcgcctttcaggattatatatattttgatccttggactgtccactgcttgttctcgggctttcgagcaaatcgatccattctgtaaaaattgcgaggtgaaaagcttcggttcctggacgacaacgtgcaatagcgttattaccctcaatatttgagatttgcaatgcttgggctaggacagaactatttatggtcggcgtggatctgcgcgaagtcttctgtcgtttatcggtaaatgaacatggttcaaaggaagtcagaagctgatacagactaggtacatactcctccaacccttttaactctgctaggaacaatcagtgccttggtaattttactatggagtggtctagcgaccgacgttctgtttgaatttttatcatcgtgtaaattaaccaactaactaaaatttctaccgccaacactggtggtgcaccctcgatattagaggggatacgttccatcgaaatggtccgatcatatttatcaaaatgtaaatgtttattaatctcagaataatatggggcgttaactgtgctctcttttcttttcaccattatctattttctatttctctttgccaacgtgaactggcaaagagtgccacgccacattctatgggatcccgtcttaatgcagattattatttttcttatgcaaacatatttattttaatagtatttaaggtaggtttaataataacagcaatgactattgtattacgtagatatataatatattctttaagttctgtagatacaatacgaaatgtgcaggtagctattattgttttttgttttttggtacaaaatattttaaattacttctaacaacataaatatataatgaggattccttttagagaaaagaagtaaaaagaaatacttcgcacagatttataggtgtgctttatcagttcttcatcaattatacgttaatggtctcgatttaacaatgatgtaagtactctttcagactaagacagtctgagaccgatgtgcgcccccggttttcaattgccccaaagcattggtaagccactaaaatcagccagacactaggaagtggctcgtctgtagtcgttcatttaaaaccatgctttgctgcaatttggcggacaccggtgtcagacaccagtgtcttagtcagaaagggtactaaatctccatacctattcaaaagtagataatacaaatatttcatcatcattctctttgccttattcctatgcggggccggcttccctagttgcatttctccacacaattctatcttgggtcatatcaatgttaatcccctttaccaacatgtcctgccttatcgtctccccccaggtcttctttggtcttcctctcctactccttccaggaatctgcacttcagctattcttcgtattgggtgattaacgtctcgacgttgaacatgaccaaaccatcttaacctatgctctctcattttggcatcaattggtgccacacctagacttcccctaatatactcatttctaattttatccttctttgtcactccactcatccatctaagcattctcatttccgccacatgcattcgttgttcctctttctttttcactgcccaacattcagttccgtacatcatagccggtcttatggctgttttatagaattttcccttcagcttcattggaatttttctgtcacacaacacaccactcgcttctttccacttcatccatccagccctaattctactgcatgcatctccatctatttctccattactctgtaataccgatcctaggtacttaaaactattgcttttcacaatcatttcaccatccaaagataccattttatttgtagtagctccatctttaaatgaacattccaaatactctgtttttgtcctactaagttttaaacctttttcctccagagcttgtctccactgttccagtttttgttctaaacttctttccctatttcctattaacactttcccaagtctattacaccagtcagtcctatccattgccaaccgttgccagtttgctgcgcctatttttctcccatcctcatctacaccatccttccatctaagttttggcctacccgtatttctacttcccacaggttgtgacataaggattcttctaggagggttgttatgctgtgatcttgctagatgtcctgcccatcttagtcttcctattttataagagatactacgtctttaccaccaaatatatgtttatatctgtggtatacctcgtagttgtacctcctcctccaaataccattttcacagatgccaccgaatattcctctcaggatccttcgttcaaatataagcagaaggttttcatctgccttggagatggtccatgtctccgatccatatgtcaacactggttgtataagggttttgtatatggttatttttgttttttggcttaagtttctgcttctcatatgtctactcagtccaaaatagcatttgttgctaggattatccttcgcttgatttcttcgtcataacgttctccttggtgatcagggagcctaagtatgtgaatttgtccaccacttcaacggtagagttatcaaccgtgaattggtgaccgatgtttctggcactattgttggatgttgatgctatcatcttagttttctcctcgtttactttcaggcccatattttttgaggcatttgagaaggtggtatacatttcttctagtttgcgtgttgtgcgggcaactaggtccacgtcatctgcatatgccaaaatttggtatgatttattaaaaatatttcctctgttgtctatttggtcatctataattagttattttaaagccttaatgttctacaagtaagttttgttgccaaataatgaaaatctatatatttttataataggtaattaattatttcgaatcgcaagaaaccaagatattgttttattacttattttgattaaaaacaatcaaaataaaattgcttgatttaactattttaataagaaactttttcagagagtttcagaagcttcgaattccaaaactggatcccagaacaccaatttggattccgacaagctcattctacagtgcaacaatgccatcgcatatcaaatgtaattaatagagcattggacaataaacaatattgcacagcagcctttctggacatcagccaagcatttgataaggtatggcacccaggattactttataaaatcaaaaaatctctacacaacaaatactttgacttattaaaatcatatccaaatcacagagaatttgaaactaaagtggaggatgaactatcaaaccgtaacaaaattcaatcaggagtcccacaaggtagtatactgggtccacttctttatgtactgtacacatccgatttaccaacctttccacaaaccacaattggagctttcgctgatgacacagcaatatttgcaactgaagagaattaaacagctgcagtcttaaaacttcaagaacacctagaccaaattggacagtggttaaagaaatggaagataaaagctaatgaaactaagtcaacacatataactgtcacactaagaaaagaccaatgcccaaatattagccttaatcaagtcaacataccccaacagaatatcgtcaaatacctggggcttcatcttgattctaaataaactggaaacaacacattttaaagaagaagaaacaaactgagttgagagtgaaagaaattaattggtttataggtcgaaaatctcgactctcaattgagaacaaactgctcatttataaaacagtcatcaaacctatatggacttacggtatacaactatggagttgtgccagcaaatcaaatacaaa

SEQ ID NO: 59 - DNA, 9064 bp, Diabrotica virgifera
  SmartBlast Evalue=0; Info=Catenin alpha n=3 Tax=Aculeata RepID= E2A263_9HYME
attttatacaaagcacagcgtgaaatctgtgcgcggacaaaaaacttgttatcgccgatttattataatttatatttatgaagtgactgtgtcggtacttaatagctttatgtatattgtgtttgttttcatttaaattttaaatttctataccaaagatatgagccggttgaacatattcagttttttgaaaatgcttcaagcattgtgttgtgtactgggagttacatcagcatcttcagacccagttatagtctccagagaagaatggggggcccgcgctcctaaaaacatagaaaatatggcgaacccagtaccttacgtcgttatccaccacagttatctaccaccagcttgttacaatttaaccgattgtttcaaagccatgcgttggatgcaagaccttcaccaagacaccaacggttgggcggatattggctacaactttggtgttggcggagatggtagagcctacgaaggaaggggatggtccagagttggtgctcatgctccctattacaacagcaaaagtattggaatatgtataattggagattggacagttgaacttccaccagaaaatcagctagcgacagttcatgagctaatacaaaaaggagtgagagaagggtacatccagaaggactacaaattggtaggccataggcaggttagacaaggtaccgaatgtccgggtgacaggctcttcaaagagatacacaagtggcagaatttttgtgaacaaccagacgagatagcagtaaggacaaacaacacttggttccttaaaaaaactgtacatgacaatagtagggataaggaagataaagatgaagacaataatgacaatggtattaataggttagaaaaaagaactgtttagatttaagtaatacattttatttattattaaaaaaacacctatgcagttatgattcatttttgagataaacaatagggtgaatttatttttcttttagtcagatttagtaataaactaagctcgtttagtagtgtatttactaccgatttacgttttattttgtatatagctaagtctcaattaaaaatgatgactgaccgcttcggtttaaaatgggacccgaaaaacttagagataagaaccatgtctgtggaaaagacattggaacccctagtgcttcaagttaccaccctcgtcaataccaaggggcctagcaaaaagaagaaaggaaagtctaaacgtgccaatgctctggttagtactgttgaaaaagccacggaaaacttcatagaaaagggggagcagatagcctatgagaatccagatattactgaggaaatgctggcagctgttgacgaagtcaagaaaacgggacatgctatgagcggagctgcaagagaattttcagaagacccatgttcttctttaaaaagaggaaatatggttagggctgctagaaatcttttatcggctgtaactcgtcttttaattctagcggacatggttgatgtccaccttttgctcaaatccttacatgtagttgaggatgacctcgaaaaactaaaaaatgcttcaagcaatggcgaacttttagacaatattaaagcctttggtcaaaatgccaacgaattaatgaatcaggctgctaaaaggcagcaagaactgaaagatccacaacttcgtgatgatctagcagctgctagagctgtacttaagaaacattccactatgttattaactgcctctaaggtttatgtacgtcatccagagctagcagctgccaaagcaaatagagattatgtcttgaaacaagtttgtgaagctgtgaataccattaatgatgtagctcagggaagaactcctcaacctgcttctggaccatatgatggacctggagagttggctgctgctttggatgattttgatgatcacatggtaatggagcctctagcatacaatgaagttcataccaggccttcattggaagaacgtctagaaagcattataagtggtgcagctcttatggcagattctagttgtactagggatgaaagaagggaaaggatagttgcagagtgtaatgctgtaagacaagctttgcaagacttgttgactgaatatatgacaaatatgggcaataaagataaaagtgagagcctaatacgagcaatcgacaatatgggtagaaagactaaggatttaagaagacaactgagaaaagctgttgtagatcatgtatctgacagtttcttggaaaccaacgtacctcttctcgttttaataaaggcagctcaaaatggcaacgaaaaggaggtagaagaatatgcagttgtatttactgaacattccaataagttagtagaagttgctaaccttgtctgcagcatgtctaataatgaagatggtgtcaaaatggttagatatgctgctgctcagatcgacaatctgtgtcctgaagtaataaatgcagctagaattttagccgctagacctcgcagtaaagttgctcaagaaaatatggacgcattcaagcaatcatgggagaatcaagtgagacttctgactgaagcagtcgatgacattactactatcgacgactttttggctgtttctgaaaaccatattctggaagatgttaataaatgtgtacttgccttgcaagaaggtgattctgacacattggatcgcactgccagtggtataagaggaagatccaatagggtgtgcaatgtagtaacagctgaaatggataattacgaaccttgcatttataccaaacgtgttcttgaagccgtcaaagtattgaatgatcaagtgatgcccaagtttactcaaagagtgcaagttgcagttcaagctttgggaaatagtcctcccaaagaagtggatgaaaacgattttatcgatgcttctagacttgtttacgatggagtgagagaaataagaagagccgttctaatgaatagagccgatgaagatttagatccagaagatgtcgaattggatgaaaactatctaatagaaacaagaagcaaatcgagcgctcacacaggcgaacatggagttgatgagtatccagatattagtggaattacaacggctagggaagctatgggtaaaatgccggaagaagataaacagaagattttgcaacaggttgagttcttcaggagtgaaaaactcaagtttgaccgtgaggtcgctaaatgggacgacactggcaacgatattatcgttcttgctaagcacatgtgtatgattatgatggaaatgacagattttaccaggggtcgtggccctctaaaaaccactatggacgttattaatgcggctaaaaagatttccgaagctggaaccaaattagataaacttactcgccaaatagctgaacagtgcccagagagttccaccaaaaaagatttgttggcttatttgcaacgtattgctctttactgccaccagatgaacattacatcaaaggttaaagccgatgttcaaaacatcagtggagaacttattgtatctgggttggacagtgctacttctttgattcaagctgctaagaacttgatgaatgctgtagttctcacagtaaaagcttcatatgtggcatccaccaaatacccaagacaaggaactattgcatcgccgattgttgtctggaagatgaaagcgccagagaagaagccgttagtcagaccagagaaacccgaagaagttcgtgccaaagtacgcaaaggctcacaaaagaaagttcaaaatccaattcacgctctttctgaattccaaagcccaactgagtctgtgtaaacgtaaacctttatccattaatatattaaccagatgttaactattatttgcctgattattctgtgacattttctatgtacctatagattcgtattaatataaagtctgattagaggcatgttcaagttcatttaacatttgaacagtacatagtaagtccgtagtttcatcaagtgttaaatacagtgtgttctaacgaaaatatgaccccctcccagaaactgagaagccaaggagtttcttcacaatttgaaaatcacgtcaatttgtattggaagagggacgaatgttcatgcaattcatgccctcagatgtaaccccctactgccccccagttttttgaaatagcaagtgtgtcgagttgcacatcatttgaaaggtagtttttttttctctacacgaccctctatttttttaatttgcgaaataactttaaagacagttttggatttaactaatttataatacatttgttaagttcaaaattgtcttcaaacttgttatgtaaattaaaaaaaaaatagtgtcgtgtagagaaaaaaattacctttcaaatgatgtgccactcgatcacacttgctatttaaaaaaaaagtgggggttgatgcggggcagtggagggttacatttgagggcatgaagtttgcatgaaagttcgttcccctcccattataaattgacgtatttttaaaatttttaagaagctcttggtttctgagtttctggggtggtcagattttcgatggaacagactgtatatgcgaaatgcatatggcacaattaaaagtacagctgtttcgctacaatatgcaactaacatcgaaaatatttgcaagtttaaaatacatatacacctatgttttaacatactttagacctagaacttaactaggtgctgcgcagaatgaaatttcccaccgttgggccaagtgttttccatttttttagtaaagcaaaaaatccggacatttctcatatccggacgccaatccggacatgccgttcaaatccggactgtccggatgaaatccggacgtatggtaaccctaagtattcatcaactgattcatgggttttgttcttttagacttgttttttcttcttgtgaagccctttgtagtcccatcaatagtattggactatcgcgtgctattaaatttaggatgtcatatgtgtaatattctcttggtgtagttggaactcttcttagaagtttgcctcaaaaatttgtatttcttgtcagcttcacgattctagaaatggtgagtctgatttaaagatcttgttaagctaccaagattatgaatttgcacgtgatttccacaggacttccacaaagtagccagcaaactatatttctactatatttctggctagtgctttgatttcagccagggtttccccatttctttctcttcgtccagtattgcccttttccaagtttttaagtctgcatactttctgtcagccttcagaattccaatccagcactgttcttacaatgtcatctgttgtgtcaatgttgtgtacggagtgtgtggtccaggcatctcgataattttcttcgccttatttgctttatggcatttttttggttggcttgggtctccacaaattttcatttaaaattcgatgaggccaaaatatcatcatcaatggtgctacagcactatgaaagagcctcgaccttctcaagtctattacgccagtcagtcctatccattgccaactgttgccagtttgctgcgcgatttttctaccatcgtctacaccatccttccatctgagttttggcctacccctatttctacttcccacaggttgtgacataaggattcttcaaggagggttgttatgctgtgatcttgctagatgttctgcccacttagtcttcctattttataagagatactacgtctttaccaccaaatatatgtttatatctgtggtatacctcgtagttgtacctcctcctccaaataccattttcacagatgccaccgaatattcctctcaggatccttcgttcaaatataagcagaaggttttcatctgccttggagatggtccatgtctccgatccatatgtcaacatcggttgtataagggttttgtataaatatggttatttttgttttttggcttaagtttctgcttctcatatgtctactcagtccaaaatagcatttgttcgctagaattatccttcgcttgatttcttccgtcatgacgttctccttggtgatcagggagcctaagtatgtgaatttgtccaccagttcaaaggtagagttatcaacagtgaattggtgaccgatgtttctggctctattgttgggtgttgatgccaacatcttagttttctcctcgtttactttcaggcccatattttttgaggcatttgagaaggtggtatacatttcttctagtttgcgtgttgtgcgggcaactaggtccacgtcatctgcatatgccaaaatttggtatgatttattaaaaatatttcctctgttgtctatttggtcatctataattagttattttaaagccttaatgttctacaagtaagttttgttgccaaataatgaaaatctatatatttttataataggtaattaattatttcgaatcgcaagaaaccaagatattgttttattacttattttgattaaaaacaatcaaaataaaattgcttgatttaactattttaataagaaactttttcagagagtttcagaagcttcgaattccaaaactggatcccagaacaccaatttggattccgacaagctcattctacagtgcaacaatgccatcgcatatcaaatgtaattaatagagcattggacaataaacaatattgcacagcagcctttctggacatcagccaagcatttgataaggtatggcacccaggattactttataaaatcaaaaaatctctacacaacaaatactttgacttattaaaatcatatccaaatcacagagaatttgaaactaaagtggaggatgaactatcaaaccgtaacaaaattcaatcaggagtcccacaaggtagtatactgggtccacttctttatgtactgtacacatccgatttaccaacctttccacaaaccacaattggagctttcgctgatgacacagcaatatttgcaactgaagagaattaaacagctgcagtcttaaaacttcaagaacacctagaccaaattggacagtggttaaagaaatggaagataaaagctaatgaaactaagtcaacacatataactgtcacactaagaaaagaccaatgcccaaatattagccttaatcaagtcaacataccccaacagaatatcgtcaaatacctggggcttcatcttgattctaaataaactggaaacaacgcattttaaagatgaataaacaaattgagttgagagtgaaagaaattaattggcttataggtcgaaaatcttgactctcaattgagaacaaactgctaatttataaaacagtcatcaaacttatatggacgtacggcatagaactatggagttgtgccagcaaatcaattacaaaaattatccaaagaactcaatcaaaaattctacgcaccatcgcaaatgccccgtggtacatctccaaccaaacccttcatagagacctaaacatcccgttagtcagcacagtattcaagaaagagccaacagacaccacgagaaattagaaggccaccccaaccaattaatattaccattactgcagccactaaacaacagaagattgcgaagattaaagttattgtacttgttatcaaattaactcatagaatatgtaattctgattgttaataaatgcttacaaaaaaaaaagaagcttcgaggccaaatatttcaacatccaccaaagtttctagacaaataaagaatattccaagaaaaaatacaatactatacatttttttttaaaatgctttcaaatatttcttattttctaattaatgaaatatacaaaattcacacaggtataaacataaatgatgaaaacagatattacttaattaatacgtttataacgataatttccacctccactagtttcatctctttttgtttcgcaatgtgttatgttttccatcttttgagctattttgcgggtaattagcgcgctcatcactgtataaaaaaaaacagttgtttttagaactctttagcgacgtattagtataaaataatatttatggattactgtcgaaggccatcatgataccaaaaaagaaaatgaatctgctgatttttctagtgacaatattgggtatgaatccagtatgaatctgtctgttgagtttattccgcctaagttaaaacaggttatagtgtgaattaataaaacttacactctaatattcatgtcctacaaataaacaaaactatcttgagctgacaactaggaaaacatgacctgcaacttttattgcaaccaatgttgtttaaacgtggtattccccaccatccaacttctcatcagaaataatattaaacaaccacttagcagtgctgtcttcaacccacaacaaatctatcagtaatccattgaagattcctaagacaacaccaccaagaacatccattatgtaatgtctgttcattaagatcctgctgaccgaaactgatatgctccaaacccagagaaaaggtattaaaagaaagtttaaaggccatagtttggtgtaaaagtatgctacaaatatagccctactagcatggcctgaaggaaaactaaatacgtccacatatttggcgagaggatcatctttgatgttttttggtggccgcttgcgcctgaagtaagctttggctactgctactagtattatatcagtagtaagacctaaaagcatgtttacttgcatttggactagattaggattattaaatagccagctaaaggcaatccaaaatgcaaaccatggaattccatggcaggaaatttctaaagctttacaatgaactctataagcatctaaatctaagattttgttagcccatgtaagaaactcgtttgtaatatatgcatcgtatttcaatattttttgtaatgctggtggaactctacttttaccctccgacattttgcagtatataatgtaaagtccagccaagacttatcttataatcttttacaaacttccaaaaatatataggtccgaaatgttgatgacacacttgtctattggaataaactgtttcgggatctattatattgttttttttaatgtgg

SEQ ID NO: 60 - DNA, 3869 bp, Diabrotica virgifera
  SmartBlast Evalue=7E-74; Info=Reverse transcriptase family member n=1 Tax=Glycine max RepID=Q1AKH8_SOYBN
aggcgcctttcaggattatatatattttgatccttggactgtccactgcttgttctcgggctttcgagcaaatcgatccattctgtaaaaattgcgaggtgaaaagcttcggttcctggacgacaacgtgcaatagcgttattaccctcaatatttgagatttgcaatgcttgggctaggacagaactatttatggtcggcgtggatctgcgcgaagtcttctgtcgtttatcggtaaatgaacatggttcaaaggaagtcagaagctgatacagactaggtacatactcctccaacccttttaactctgctaggaacaatcagtgccttggtaattttactatggagtggtctagcgaccgacgttctgtttgaatttttatcatcgtgtaaattaaccaactaactaaaatttctaccgccaacactggtggtgcaccctcgatattagaggggatacgttccatcgaaatggtccgatcatatttatcaaaatgtaaatgtttattaatctcagaataatatggggcgttaactgtgctctcttttcttttcaccattatctattttctatttctctttgccaacgtgaactggcaaagagtgccacgccacattctatgggatcccgtcttaatgcagattattatttttcttatgcaaacatatttattttaatagtatttaaggtaggtttaataataacagcaatgactattgtattacgtagatatataatatattctttaagttctgtagatacaatacgaaatgtgcaggtagctattattgttttttgttttttggtacaaaatattttaaattacttctaacaacataaatatataatgaggattccttttagagaaaagaagtaaaaagaaatacttcgcacagatttataggtgtgctttatcagttcttcatcaattatacgttaatggtctcgatttaacaatgatgtaagtactctttcagactaagacagtctgagaccgatgtgcgcccccggttttcaattgccccaaagcattggtaagccactaaaatcagccagacactaggaagtggctcgtctgtagtcgttcatttaaaaccatgctttgctgcaatttggcggacaccggtgtcagacaccagtgtcttagtcagaaagggtactaaatctccatacctattcaaaagtagataatacaaatatttcatcatcattctctttgccttattcctatgcggggccggcttccctagttgcatttctccacacaattctatcttgggtcatatcaatgttaatcccctttaccaacatgtcctgccttatcgtctccccccaggtcttctttggtcttcctctcctactccttccaggaatctgcacttcagctattcttcgtattgggtgattaacgtctcgacgttgaacatgaccaaaccatcttaacctatgctctctcattttggcatcaattggtgccacacctagacttcccctaatatactcatttctaattttatccttctttgtcactccactcatccatctaagcattctcatttccgccacatgcattcgttgttcctctttctttttcactgcccaacattcagttccgtacatcatagccggtcttatggctgttttatagaattttcccttcagcttcattggaatttttctgtcacacaacacaccactcgcttctttccacttcatccatccagccctaattctactgcatgcatctccatctatttctccattactctgtaataccgatcctaggtacttaaaactattgcttttcacaatcatttcaccatccaaagataccattttatttgtagtagctccatctttaaatgaacattccaaatactctgtttttgtcctactaagttttaaacctttttcctccagagcttgtctccactgttccagtttttgttctaaacttctttccctatttcctattaacactttcccaagtctattacaccagtcagtcctatccattgccaaccgttgccagtttgctgcgcctatttttctcccatcctcatctacaccatccttccatctaagttttggcctacccgtatttctacttcccacaggttgtgacataaggattcttctaggagggttgttatgctgtgatcttgctagatgtcctgcccatcttagtcttcctattttataagagatactacgtctttaccaccaaatatatgtttatatctgtggtatacctcgtagttgtacctcctcctccaaataccattttcacagatgccaccgaatattcctctcaggatccttcgttcaaatataagcagaaggttttcatctgccttggagatggtccatgtctccgatccatatgtcaacatcggttgtataagggttttgtataaatatggttatttttgttttttggcttaagtttctgcttctcatatgtctactcagtccaaaatagcatttgttcgctagaattatccttcgcttgatttcttccgtcatgacgttctccttggtgatcagggagcctaagtatgtgaatttgtccaccagttcaaaggtagagttatcaacagtgaattggtgaccgatgtttctggctctattgttgggtgttgatgccaacatcttagttttctcctcgtttactttcaggcccatattttttgaggcatttgagaaggtggtatacatttcttctagtttgcgtgttgtgcgggcaactaggtccacgtcatctgcatatgccaaaatttggtatgatttattaaaaatatttcctctgttgtctatttggtcatctataattagttattttaaagccttaatgttctacaagtaagttttgttgccaaataatgaaaatctatatatttttataataggtaattaattatttcgaatcgcaagaaaccaagatattgttttattacttattttgattaaaaacaatcaaaataaaattgcttgatttaactattttaataagaaactttttcagagagtttcagaagcttcgaattccaaaactggatcccagaacaccaatttggattccgacaagctcattctacagtgcaacaatgccatcgcatatcaaatgtaattaatagagcattggacaataaacaatattgcacagcagcctttctggacatcagccaagcatttgataaggtatggcacccaggattactttataaaatcaaaaaatctctacacaacaaatactttgacttattaaaatcatatccaaatcacagagaatttgaaactaaagtggaggatgaactatcaaaccgtaacaaaattcaatcaggagtcccacaaggtagtatactgggtccacttctttatgtactgtacacatccgatttaccaacctttccacaaaccacaattggagctttcgctgatgacacagcaatatttgcaactgaagagaattaaacagctgcagtcttaaaacttcaagaacacctagaccaaattggacagtggttaaagaaatggaagataaaagctaatgaaactaagtcaacacatataactgtcacactaagaaaagaccaatgcccaaatattagccttaatcaagtcaacataccccaacagaatatcgtcaaatacctggggcttcatcttgattctaaataaactggaaacaacacattttaaagaagaagaaacaaactgagttgagagtgaaagaaattaattggtttataggtcgaaaatctcgactctcaattgagaacaaactgctcatttataaaacagtcatcaaacctatatggacttacggtatacaactatggagttgtgccagcaaatcaaatacaaa

SEQ ID NO: 61 - DNA, 3972 bp, Diabrotica virgifera
  SmartBlast Evalue=1E-105; Info=Reverse transcriptase family member n=1 Tax=Glycine max RepID=Q1AKH8_SOYBN
aggcgcctttcaggattatatatattttgatccttggactgtccactgcttgttctcgggctttcgagcaaatcgatccattctgtaaaaattgcgaggtgaaaagcttcggttcctggacgacaacgtgcaatagcgttattaccctcaatatttgagatttgcaatgcttgggctaggacagaactatttatggtcggcgtggatctgcgcgaagtcttctgtcgtttatcggtaaatgaacatggttcaaaggaagtcagaagctgatacagactaggtacatactcctccaacccttttaactctgctaggaacaatcagtgccttggtaattttactatggagtggtctagcgaccgacgttctgtttgaatttttatcatcgtgtaaattaaccaactaactaaaatttctaccgccaacactggtggtgcaccctcgatattagaggggatacgttccatcgaaatggtccgatcatatttatcaaaatgtaaatgtttattaatctcagaataatatggggcgttaactgtgctctcttttcttttcaccattatctattttctatttctctttgccaacgtgaactggcaaagagtgccacgccacattctatgggatcccgtcttaatgcagattattatttttcttatgcaaacatatttattttaatagtatttaaggtaggtttaataataacagcaatgactattgtattacgtagatatataatatattctttaagttctgtagatacaatacgaaatgtgcaggtagctattattgttttttgttttttggtacaaaatattttaaattacttctaacaacataaatatataatgaggattccttttagagaaaagaagtaaaaagaaatacttcgcacagatttataggtgtgctttatcagttcttcatcaattatacgttaatggtctcgatttaacaatgatgtaagtactctttcagactaagacagtctgagaccgatgtgcgcccccggttttcaattgccccaaagcattggtaagccactaaaatcagccagacactaggaagtggctcgtctgtagtcgttcatttaaaaccatgctttgctgcaatttggcggacaccggtgtcagacaccagtgtcttagtcagaaagggtactaaatctccatacctattcaaaagtagataatacaaatatttcatcatcattctctttgccttattcctatgcggggccggcttccctagttgcatttctccacacaattctatcttgggtcatatcaatgttaatcccctttaccaacatgtcctgccttatcgtctccccccaggtcttctttggtcttcctctcctactccttccaggaatctgcacttcagctattcttcgtattgggtgattaacgtctcgacgttgaacatgaccaaaccatcttaacctatgctctctcattttggcatcaattggtgccacacctagacttcccctaatatactcatttctaattttatccttctttgtcactccactcatccatctaagcattctcatttccgccacatgcattcgttgttcctctttctttttcactgcccaacattcagttccgtacatcatagccggtcttatggctgttttatagaattttcacttcagcttcattggaatttttctgtcacacaacacaccactcgcttctttccacttcatccatccagccctaattctactgcatgcatctccatctatttctccattactctgtaataccgatcccaggtatttaaaactattgctttttacaatcagttcaccatccaaagataccattttatttgtagtaattccatctttaaataaacatttcaaatactctgtttttgtcctactaagttttaaacctttttcctccagagcttgcctccactgttccagtttttgttctaagtctctttcgctatttcctattaacacgacatcatcagcatacattaagcaccatggaatgttatcctgtagtttcgctgttatctggtccaaaactaatgagagtaaatacggactaagcacagagccttggtgcaatcctactttcacatgaaatttatcagtctctccacacctgtcctaacactagtcgttactccctcatacacatcgctcacaatctttacatattcaccagggactccttacttatttagtgcctaccacagaatctctcgaggaactctatcataagctttctcaagatcaatgaatatcatatgagcgtttgtttctttactcctgtatttttccatcaactgccttataatgaaaattgcatctgttgttgatctgacctgcataaagccaaattgattctcgccaatttcggtctctttacttatccgtctatcaattactctttccctagataatacaaatttcctctagataatacaaatatttatttaattaaaatacaaatctaagttaacatcctccttctctatcttttatccttcgtaaggatgtagtggcgtcatgtaatttgtttgactatttctgtccaattatttcactcctgtgtgtgttgttttgcttcggagaatgagtaaacagtgatgccttttatttggtacgaccatcgtactggaaatcttcctctggatctttttccctctacgttgcctttaactctcattcgttctttgcctgctcctcttctagttatatgtccaaaatatctcagtacattttggttgatagttattgtgagtctagtttttatgttaagttttgttagtattgaattattttgtgcgatgtgtggtccatggtatgcgcaacattctacggtacacctacatttcaaatgccattatacgcttcagatcggctttttttatggtccaagtttctgaagcgtaggtggcgataggaaatattaatgctcgaacaaggcttaattttgttttgtaatgtcagtgttcttccatgtttttttgaatttgactgttgccgatctcaccgttgtgatgcgtcgaaggtcttcgcatcttgccactttgtaagctaccttgcttcttatttctgtttggttgtttctgattctatcaatgatcattactttggttttcggtatatttattttcaaaccatattccgtactcaccctacctagcctgttcataatttgctccagttcttctggtgaagacgccaatataacaatatcattagcataacgtaggttttgatttttctttcccctatatttgacccactttgccattccttgccagttaatatacagatattaaaaaatttcaattgatatattggagaaaaaaaaagagtcgcaaaaaatcctcggtacaataattattttttaatgtcatagacatatgaaattataatgttatattattgttaacatttccgttgctcaaaagcaatacgcgttaaatccaaagatgcaactttcgagaaaacagcaaaaaaaacttttgttgcttcttatctgtttaagctttaagtttaagtttaagtaaactaaattaagtaaaaaaaaactacttgttacataggtactaaaggcattggtttttactttaaaagcgacttttacctgttttgcttttgaaatttggatttttgcttttatgttggattctgagcaatttgcacattattagtaaaaaatttttgttccattttaaatttgtatatagtattttgtatataaaatagtatataaaagtaaagaacgtcgtttactttatttaaaaaataaatgtcatttctattgttaatgatcatcatgacaatcattagaatcttgaaaagttagtgtttcttcacttttgtcatacacatatatagcataattaagtactatatcagacaattgtgtcaacaactcactcatgcattcaagggcgttttcttaaaactgcaaaagtatacgccagacctaa

SEQ ID NO: 62 - DNA, 3399 bp, Diabrotica virgifera
  SmartBlast Evalue=0; Info=Endonuclease-reverse transcriptase HmRTE-e01 n=1 Tax=Heliconius melpomene RepID=C6Y4D5_9NEOP
atcatcatcattctctttgcttatccctatgcggggtcggcttccctaattgcatttctccacacaattatattttgggtcatatcaatgttaatcccctttaccaacatgtcctgcttatcgtctccccccaggtcttctttggtcttcctctcctactctttccagaaacctgcacttcagctattcttcatattgggtgattaagtctcgacgttgaacatgaccaaaccatcttaacctatgctctctcattttggcatcaattggtgccacacctagacttcccctaatatactcatttctaattttatccttctttgtcactccactcatccatctaagcattctcatttccgccacatgcattcgttgttcctctttctttttcactgcccaacattcagttccgtacatcatagccggtcttatggctgttttatagaattttcccttcagcttcattggaatttttctgtcacacaacacaccactcgcttctttccacttcatccatccagccctaattctactgcatgcatctccatctatttctccattactctgtaataccgatcctaggtacttaaaactattgcttttcacaatcatttcaccatccaaagataccattttatttgtagtagctccatctttaaatgaacattccaaatactctgtttttgtcctactaagttttaaacctttttcctccagagcttgtctccactgttccagtttttgttctaagtctctttcactatttcctactaacacgacatcatcagcatacattaagcaccatggaatgttaccctgtagtttcgctgttatctggtccaaaactaatgagaataaatacggactaagcacagagccttggtgcaatcctactttcacatgaaatttatcagtctctcccacacctgtcctaacactagtcgttactccctcatacatatccctcacaatctttacatattcaccagggactcctttcttattgagtgcccaccacagaatctctcgaggaactctatcatatgctttctcaagatcaatgaataccatatgagcgtttgtttctttactcctgtatttttccatcaactgccttataatgaaaattgcatctgttgttgatctaccctgcataaagccaaattgattctcggatatttcggtctcttcacgtatccgtctatcaattactctttcccatattttcatggtgtggctaagcagttttatagccctgtagtttgtacattgttgtatatctcccttgtttttgtaaacaggtaccagtatactgcttctccattcgtctggcatttgtccaacttccataattctattaaatagacctgctagccaccttgttcctgtctctcccaatgctctccatacttccccaggaatatcatctggtcctaccgcttttcctttctttattttttgaagcgcttgagccacttcctcgttggttattttggtgaccattgctgctactgtctccgttgactctacaggctgtctgtcaaattcttcatttaataagctgtcaaagtactttctccatctctttttgacatccctttcgtgaactagtattttattattttcatctcggatacatctaatctgattaaaatcttttgctttctttgctctctgtttggctattttatatatcttcgtttcgccttccctggtatcaagttgatcgtataggtttgaatacgcttctgctttggcttttgctactgctactttcgcttcctttttggcgaccatatagttttgaagatctatgtcgatctggtttcttgccactttttatataattttcccttctcttttatttttccttgtacttcatttgaccaccaccaagtctctttatcctcaaacttctttcctgacgttttcccaagtatttcaatagccgtctctctaataatattggccatttttctccaaattgtgttagggcttcctttcatgttccaacatattttttctactattctttccctgaatagaccttctttctcatcttttagcatccaccacttgattttttgtggtcctctccgatatttttgtttagtttcgctttttacttcgatgtccagaacaagcagcttatgttgttggcttactgtctcactaactattaccttgcagtccttgcattcacgtatgtcttctttccttatcatgaagtagtctatttgggattgatgttgtccacttttgtaggtaataagttgagtttctctctttttaaagaatgtgttaacaatcgccatatccaatgctgttgctaattctagcatgtcatctccagcttcatttctagttccaaagcctaatcccccatgtattgtttcatatcctgtcttggcttggcccacatgtgcattgaaatcacctcctattataactttctcctctgctggaatatcactcagtacgtctcctaattggtcatagaaagctcttctttcattctcacccagacctgtttgaggagcatacacacacacaacattcaatacctctttatcaattacaaatttcactgacatcattctatcactcgttcttacaacttctactacgttatctttcatttcactatcagcaattataccaactccatttctagtgttactactccctacataccacaatttatatccatcacctagttctttcgccctttgtcctttccacctagtttcttgaatacaagcaatttgaactcttcttcgtttgagcgcatccactaactccagactcttacctgtaagactaccaagattccaagaccctatcctgatttttctaacctgtaatggtgttccccctgagatagtcctcacccggagatccgaatggaggctcattttacttccggaacattttacctcaggagatgccatcatttcagtataagtttttatttcgtttggagaaggtcttttcattattatggcctgaaaagatttttggatatttgatgcctgaatgccttttctatcagcaccataccctgccctgtcctgcacgtttagccaatacaccaccaatgcaaccaaagtgcagtattaccccacacccgcctgcatttttctgtataggccaggatccctactgtaaggactgccctataagccaatgtattgttgcccgtatcccgccactaggaggcacgtacttcattcgggatacaatttcagtattttataaatgctagaatgttccacacggtgatgtgagctttgagaaaaaaaaacactttttaattcgtacatccggtatacaatgaggatgtacctatttggcagcaatattattacagcgatattgttaaggaatgaggctacggca

SEQ ID NO: 63 - DNA, 3400 bp, Diabrotica virgifera
  SmartBlast Evalue=0; Info=Endonuclease-reverse transcriptase HmRTE-e01 n=1 Tax=Heliconius melpomene RepID=C6Y4D5_9NEOP
atcatcatcattctctttgcttatccctatgcggggtcggcttccctaattgcatttctccacacaattatattttgggtcatatcaatgttaatcccctttaccaacatgtcctgcttatcgtctccccccaggtcttctttggtcttcctctcctactctttccagaaacctgcacttcagctattcttcatattgggtgattaagtctcgacgttgaacatgaccaaaccatcttaacctatgctctctcattttggcatcaattggtgccacacctagacttcccctaatatactcatttctaattttatccttctttgtcactccactcatccatctaagcattctcatttccgccacatgcattcgttgttcctctttctttttcactgcccaacattcagttccgtacatcatagccggtcttatggctgttttatagaattttcccttcagcttcattggaatttttctgtcacacaacacaccactcgcttctttccacttcatccatccagccctaattctactgcatgcatctccatctatttctccattactctgtaataccgatcctaggtacttaaaactattgcttttcacaatcatttcaccatccaaagataccattttatttgtagtagctccatctttaaatgaacattccaaatactctgtttttgtcctactaagttttaaacctttttcctccagagcttgtctccactgttccagtttttgttctaagtctctttcactatttcctactaacacgacatcatcagcatacattaagcaccatggaatgttaccctgtagtttcgctgttatctggtccaaaactaatgagaataaatacggactaagcacagagccttggtgcaatcctactttcacatgaaatttatcagtctctcccacacctgtcctaacactagtcgttactccctcatacatatccctcacaatctttacatattcaccagggactcctttcttattgagtgcccaccacagaatctctcgaggaactctatcatatgctttctcaagatcaatgaataccatatgagcgtttgtttctttactcctgtatttttccatcaactgccttataatgaaaattgcatctgttgttgatctaccctgcataaagccaaattgattctcggatatttcggtctcttcacgtatccgtctatcaattactctttcccatattttcatggtgtggctaagcagttttatagccctgtagtttgtacattgttgtatatctcccttgtttttgtaaacaggtaccagtatactgcttctccattcgtctggcatttgtccaacttccataattctattaaatagacctgctagccaccttgttcctgtctctcccaatgctctccatacttccccaggaatatcatctggtcctaccgcttttcctttctttattttttgaagcgcttgagccacttcctcgttggttattttggtgaccattgctgctactgtctccgttgactctacaggctgtctgtcaaattcttcatttaataagctgtcaaagtactttctccatctctttttgacatccctttcgtgaactagtattttattattttcatctcggatacatctaatctgattaaaatcttttgctttctttgctctctgtttggctattttatatatcttcgtttcgccttccctggtatcaagttgatcgtataggtttgaatacgcttctgctttggcttttgctactgctactttcgcttcctttttcgccaccatatagttttgaagatctgtgtcggatctggtttcttgccactttttatataattttctcttctcttttatttttccttgtacttcgtttgaccaccaccaagtctctttatcctcaaacttttttcctgacgttttcccaagtatttcaatagcagtctctctaatactactggccatttttctccaaattgtattagggcttcctttcatgttccaacatattttttctactattcttctcctgaatagaccttctttctcatcttttagcatccaccacttgattttttgtggtcctctccgatatttttgtttagtttcgctttttacttcgatgtccagaacaagcagcttatgttgttggcttactgtctcactaactattaccttgcagtccttgcattcacgtatgtcttctttccttatcatgaagtagtctatttgggattgatgttgtccacttttgtaggtaataagttgagtttctctctttttaaagaatgtgttaacaatcgccatatccaatgctgttgctaattctagcatgtcatctccagcttcatttctagttccaaagcctaatcccccatgtattgtttcatatcctgtcttggcttggcccacatgtgcattgaaatcacctcctattataactttctcctctgctggaatatcactcagtacgtctcctaattggtcatagaaagctcttctttcattctcacccagacctgtttgaggagcatacacacacacaacattcaatacctctttatcaattacaaatttcactgacatcattctatcactcgttcttacaacttctactacgttatctttcatttcactatcagcaattataccaactccatttctagtgttactactccctacataccacaatttatatccatcacctagttctttcgccctttgtcctttccacctagtttcttgaatacaagcaatttgaactcttcttcgtttgagcgcatccactaactccagactcttacctgtaagactaccaagattccaagaccctatcctgatttttctaacctgtaatggtgttccccctgagatagtcctcacccggagatccgaatggaggctcattttacttccggaacattttacctcaggagatgccatcatttcagtataagtttttatttcgtttggagaaggtcttttcattattatggcctgaaaagatttttggatatttgatgcctgaatgccttttctatcagcaccataccctgccctgtcctgcacgtttagccaatacaccaccaatgcaaccaaagtgcagtattaccccacacccgcctgcatttttctgtataggccaggatccctactgtaaggactgccctataagccaatgtattgttgcccgtatcccgccactaggaggcacgtacttcattcgggatacaatttcagtattttataaatgctagaatgttccacacggtgatgtgagctttgagaaaaaaaaacactttttaattcgtacatccggtatacaatgaggatgtacctatttggcagcaatattattacagcgatattgttaaggaatgaggctacggca

SEQ ID NO: 64 - DNA, 3335 bp, Diabrotica virgifera
  SmartBlast Evalue=0; Info=Endonuclease-reverse transcriptase HmRTE-e01 n=1 Tax=Heliconius melpomene RepID=C6Y4D5_9NEOP
aattctatcttgggtcatatcaatgttaatcccctttaccaacatgtcctgccttatcgtctccccccaggtcttctttggtcttcctctcctactccttccaggaatctgcacttcagctattcttcgtattgggtgattaagtctcgacgttgaacatgaccaaaccatcttaacctatgctctctcattttggcatcaattggtgccacacctagacttcccctaatatactcatttctaattttatccttctttgtcactccactcatccatctaagcattctcatttccgccacatgcattcgttgttcctctttctttttcactgcccaacattcagttccgtacatcatagccggtcttatggctgttttatagaattttcccttcagcttcattggaatttttctgtcacacaacacaccactcgcttctttccacttcatccatccagccctaattctactgcatgcatctccatctatttctccattactctgtaataccgatcctaggtacttaaaactattgcttttcacaatcatttcaccatccaaagataccattttatttgtagtagctccatctttaaatgaacattccaaatactctgtttttgtcctactaagttttaaacctttttcctccagagcttgtctccactgttccagtttttgttctaagtctctttcactatttcctactaacacgacatcatcagcatacattaagcaccatggaatgttaccctgtagtttcgctgttatctggtccaaaactaatgagaataaatacggactaagcacagagccttggtgcaatcctactttcacatgaaatttatcagtctctcccacacctgtcctaacactagtcgttactccctcatacatatccctcacaatctttacatattcaccagggactcctttcttattgagtgcccaccacagaatctctcgaggaactctatcatatgctttctcaagatcaatgaataccatatgagcgtttgtttctttactcctgtatttttccatcaactgccttataatgaaaattgcatctgttgttgatctaccctgcataaagccaaattgattctcggatatttcggtctcttcacgtatccgtctatcaattactctttcccatattttcatggtgtggctaagcagttttatagccctgtagtttgtacattgttgtatatctcccttgtttttgtaaacaggtaccagtatactgcttctccattcgtctggcatttgtccaacttccataattctattaaatagacctgctagccaccttgttcctgtctctcccaatgctctccatacttccccaggaatatcatctggtcctaccgcttttcctttctttattttttgaagcgcttgagccacttcctcgttggttattttggtgaccattgctgctactgtctccgttgactctacaggctgtctgtcaaattcttcatttaataagctgtcaaagtactttctccatctctttttgacatccctttcgtgaactagtattttattattttcatctcggatacatctaatctgattaaaatcttttgctttctttgctctctgtttggctattttatatatcttcgtttcgccttccctggtatcaagttgatcgtataggtttgaatacgcttctgctttggcttttgctactgctactttcgcttcctttttggcgaccatatagttttgaagatctatgtcgatctggtttcttgccactttttatataattttcccttctcttttatttttccttgtacttcatttgaccaccaccaagtctctttatcctcaaacttctttcctgacgttttcccaagtatttcaatagccgtctctctaataatattggccatttttctccaaattgtgttagggcttcctttcatgttccaacatattttttctactattctttccctgaatagaccttctttctcatcttttagcatccaccacttgattttttgtggtcctctccgatatttttgtttagtttcgctttttacttcgatgtccagaacaagcagcttatgttgttggcttactgtctcactaactattaccttgcagtccttgcattcacgtatgtcttctttccttatcatgaagtagtctatttgggattgatgttgtccacttttgtaggtaataagttgagtttctctctttttaaagaatgtgttaacaatcgccatatccaatgctgttgctaattctagcatgtcatctccagcttcatttctagttccaaagcctaatcccccatgtattgtttcatatcctgtcttggcttggcccacatgtgcattgaaatcacctcctattataactttctcctctgctggaatatcactcagtacgtctcctaattggtcatagaaagctcttctttcattctcacccagacctgtttgaggagcatacacacacacaacattcaatacctctttatcaattacaaatttcactgacatcattctatcactcgttcttacaacttctactacgttatctttcatttcactatcagcaattataccaactccatttctagtgttactactccctacataccacaatttatatccatcacctagttctttcgccctttgtcctttccacctagtttcttgaatacaagcaatttgaactcttcttcgtttgagcgcatccactaactccagactcttacctgtaagactaccaagattccaagaccctatcctgatttttctaacctgtaatggtgttccccctgagatagtcctcacccggagatccgaatggaggctcattttacttccggaacattttacctcaggagatgccatcatttcagtataagtttttatttcgtttggagaaggtcttttcattattatggcctgaaaagatttttggatatttgatgcctgaatgccttttctatcagcaccataccctgccctgtcctgcacgtttagccaatacaccaccaatgcaaccaaagtgcagtattaccccacacccgcctgcatttttctgtataggccaggatccctactgtaaggactgccctataagccaatgtattgttgcccgtatcccgccactaggaggcacgtacttcattcgggatacaatttcagtattttataaatgctagaatgttccacacggtgatgtgagctttgagaaaaaaaaacactttttaattcgtacatccggtatacaatgaggatgtacctatttggcagcaatattattacagcgatattgttaaggaatgaggctacggca

SEQ ID NO: 65 - DNA, 3336 bp, Diabrotica virgifera
  SmartBlast Evalue=0; Info=Endonuclease-reverse transcriptase HmRTE-e01 n=1 Tax=Heliconius melpomene RepID=C6Y4D5_9NEOP
aattctatcttgggtcatatcaatgttaatcccctttaccaacatgtcctgccttatcgtctccccccaggtcttctttggtcttcctctcctactccttccaggaatctgcacttcagctattcttcgtattgggtgattaagtctcgacgttgaacatgaccaaaccatcttaacctatgctctctcattttggcatcaattggtgccacacctagacttcccctaatatactcatttctaattttatccttctttgtcactccactcatccatctaagcattctcatttccgccacatgcattcgttgttcctctttctttttcactgcccaacattcagttccgtacatcatagccggtcttatggctgttttatagaattttcccttcagcttcattggaatttttctgtcacacaacacaccactcgcttctttccacttcatccatccagccctaattctactgcatgcatctccatctatttctccattactctgtaataccgatcctaggtacttaaaactattgcttttcacaatcatttcaccatccaaagataccattttatttgtagtagctccatctttaaatgaacattccaaatactctgtttttgtcctactaagttttaaacctttttcctccagagcttgtctccactgttccagtttttgttctaagtctctttcactatttcctactaacacgacatcatcagcatacattaagcaccatggaatgttaccctgtagtttcgctgttatctggtccaaaactaatgagaataaatacggactaagcacagagccttggtgcaatcctactttcacatgaaatttatcagtctctcccacacctgtcctaacactagtcgttactccctcatacatatccctcacaatctttacatattcaccagggactcctttcttattgagtgcccaccacagaatctctcgaggaactctatcatatgctttctcaagatcaatgaataccatatgagcgtttgtttctttactcctgtatttttccatcaactgccttataatgaaaattgcatctgttgttgatctaccctgcataaagccaaattgattctcggatatttcggtctcttcacgtatccgtctatcaattactctttcccatattttcatggtgtggctaagcagttttatagccctgtagtttgtacattgttgtatatctcccttgtttttgtaaacaggtaccagtatactgcttctccattcgtctggcatttgtccaacttccataattctattaaatagacctgctagccaccttgttcctgtctctcccaatgctctccatacttccccaggaatatcatctggtcctaccgcttttcctttctttattttttgaagcgcttgagccacttcctcgttggttattttggtgaccattgctgctactgtctccgttgactctacaggctgtctgtcaaattcttcatttaataagctgtcaaagtactttctccatctctttttgacatccctttcgtgaactagtattttattattttcatctcggatacatctaatctgattaaaatcttttgctttctttgctctctgtttggctattttatatatcttcgtttcgccttccctggtatcaagttgatcgtataggtttgaatacgcttctgctttggcttttgctactgctactttcgcttcctttttcgccaccatatagttttgaagatctgtgtcggatctggtttcttgccactttttatataattttctcttctcttttatttttccttgtacttcgtttgaccaccaccaagtctctttatcctcaaacttttttcctgacgttttcccaagtatttcaatagcagtctctctaatactactggccatttttctccaaattgtattagggcttcctttcatgttccaacatattttttctactattcttctcctgaatagaccttctttctcatcttttagcatccaccacttgattttttgtggtcctctccgatatttttgtttagtttcgctttttacttcgatgtccagaacaagcagcttatgttgttggcttactgtctcactaactattaccttgcagtccttgcattcacgtatgtcttctttccttatcatgaagtagtctatttgggattgatgttgtccacttttgtaggtaataagttgagtttctctctttttaaagaatgtgttaacaatcgccatatccaatgctgttgctaattctagcatgtcatctccagcttcatttctagttccaaagcctaatcccccatgtattgtttcatatcctgtcttggcttggcccacatgtgcattgaaatcacctcctattataactttctcctctgctggaatatcactcagtacgtctcctaattggtcatagaaagctcttctttcattctcacccagacctgtttgaggagcatacacacacacaacattcaatacctctttatcaattacaaatttcactgacatcattctatcactcgttcttacaacttctactacgttatctttcatttcactatcagcaattataccaactccatttctagtgttactactccctacataccacaatttatatccatcacctagttctttcgccctttgtcctttccacctagtttcttgaatacaagcaatttgaactcttcttcgtttgagcgcatccactaactccagactcttacctgtaagactaccaagattccaagaccctatcctgatttttctaacctgtaatggtgttccccctgagatagtcctcacccggagatccgaatggaggctcattttacttccggaacattttacctcaggagatgccatcatttcagtataagtttttatttcgtttggagaaggtcttttcattattatggcctgaaaagatttttggatatttgatgcctgaatgccttttctatcagcaccataccctgccctgtcctgcacgtttagccaatacaccaccaatgcaaccaaagtgcagtattaccccacacccgcctgcatttttctgtataggccaggatccctactgtaaggactgccctataagccaatgtattgttgcccgtatcccgccactaggaggcacgtacttcattcgggatacaatttcagtattttataaatgctagaatgttccacacggtgatgtgagctttgagaaaaaaaaacactttttaattcgtacatccggtatacaatgaggatgtacctatttggcagcaatattattacagcgatattgttaaggaatgaggctacggca

SEQ ID NO: 66 - DNA, 3282 bp, Diabrotica virgifera
  SmartBlast Evalue=1E-151; Info=Endonuclease-reverse transcriptase HmRTE-e01 n=1 Tax=Heliconius melpomene RepID= C6Y4D5_9NEOP
aggcgcctttcaggattatatatattttgatccttggactgtccactgcttgttctcgggctttcgagcaaatcgatccattctgtaaaaattgcgaggtgaaaagcttcggttcctggacgacaacgtgcaatagcgttattaccctcaatatttgagatttgcaatgcttgggctaggacagaactatttatggtcggcgtggatctgcgcgaagtcttctgtcgtttatcggtaaatgaacatggttcaaaggaagtcagaagctgatacagactaggtacatactcctccaacccttttaactctgctaggaacaatcagtgccttggtaattttactatggagtggtctagcgaccgacgttctgtttgaatttttatcatcgtgtaaattaaccaactaactaaaatttctaccgccaacactggtggtgcaccctcgatattagaggggatacgttccatcgaaatggtccgatcatatttatcaaaatgtaaatgtttattaatctcagaataatatggggcgttaactgtgctctcttttcttttcaccattatctattttctatttctctttgccaacgtgaactggcaaagagtgccacgccacattctatgggatcccgtcttaatgcagattattatttttcttatgcaaacatatttattttaatagtatttaaggtaggtttaataataacagcaatgactattgtattacgtagatatataatatattctttaagttctgtagatacaatacgaaatgtgcaggtagctattattgttttttgttttttggtacaaaatattttaaattacttctaacaacataaatatataatgaggattccttttagagaaaagaagtaaaaagaaatacttcgcacagatttataggtgtgctttatcagttcttcatcaattatacgttaatggtctcgatttaacaatgatgtaagtactctttcagactaagacagtctgagaccgatgtgcgcccccggttttcaattgccccaaagcattggtaagccactaaaatcagccagacactaggaagtggctcgtctgtagtcgttcatttaaaaccatgctttgctgcaatttggcggacaccggtgtcagacaccagtgtcttagtcagaaagggtactaaatctccatacctattcaaaagtagataatacaaatatttcatcatcattctctttgccttattcctatgcggggccggcttccctagttgcatttctccacacaattctatcttgggtcatatcaatgttaatcccctttaccaacatgtcctgccttatcgtctccccccaggtcttctttggtcttcctctcctactccttccaggaatctgcacttcagctattcttcgtattgggtgattaacgtctcgacgttgaacatgaccaaaccatcttaacctatgctctctcattttggcatcaattggtgccacacctagacttcccctaatatactcatttctaattttatccttctttgtcactccactcatccatctaagcattctcatttccgccacatgcattcgttgttcctctttctttttcactgcccaacattcagttccgtacatcatagccggtcttatggctgttttatagaattttcccttcagcttcattggaatttttctgtcacacaacacaccactcgcttctttccacttcatccatccagccctaattctactgcatgcatctccatctatttctccattactctgtaataccgatcctaggtacttaaaactattgcttttcacaatcatttcaccatccaaagataccattttatttgtagtagctccatctttaaatgaacattccaaatactctgtttttgtcctactaagttttaaacctttttcctccagagcttgtctccactgttccagtttttgttctaagtctctttcactatttcctactaacacgacatcatcagcatacattaagcaccatggaatgttaccctgtagtttcgctgttatctggtccaaaactaatgagaataaatacggactaagcacagagccttggtgcaatcctactttcacatgaaatttatcagtctctcccacacctgtcctaacactagtcgttactccctcatacatatccctcacaatctttacatattcaccagggactcctttcttattgagtgcccaccacagaatctctcgaggaactctatcatatgctttctcaagatcaatgaataccatatgagcgtttgtttctttactcctgtatttttccatcaactgccttataatgaaaattgcatctgttgttgatctaccctgcataaagccaaattgattctcggatatttcggtctcttcacgtatccgtctatcaattactctttcccatattttcatggtgtggctaagcagttttatagccctgtagtttgtacattgttgtatatctcccttgtttttgtaaacaggtaccagtatactgcttctccattcgtctggcatttgtccaacttccataattctattaaatagacctgctagccaccttgttcctgtctctcccaatgctctccatacttccccaggaatatcatctggtcctaccgcttttcctttctttattttttgaagcgcttgagccacttcctcgttggttattttggtgaccattgctgctactgtctccgttgactctacaggctgtctgtcaaattcttcatttaataagctgtcaaagtactttctccatctctttttgacatccctttcgtgatgccatcatttcaggagatgccatcatttcagtataagtttttatttcgtttggagaaggtcttttcattattatggcctgaaaagatttttggatatttgatgcctgaatgccttttctatcagcaccataccctgccctgtcctgcacgtttagccaatacaccaccaatgcaaccaaagtgcagtattaccccacacccgcctgcatttttctgtataggccaggatccctactgtaaggactgccctataagccaatgtattgttgcccgtatcccgccactaggaggcacgtacttcattcgggatacaatttcagtattttataaatgctagaatgttccacacggtgatgtgagctttgagaaaaaaaaacactttttaattcgtacatccggtatacaatgaggatgtacctatttggcagcaatattattacagcgatattgttaaggaatgaggctacggca

SEQ ID NO: 67 - DNA, 3650 bp, Diabrotica virgifera
  SmartBlast Evalue=1E-51; Info=Probable RNA-directed DNA polymerase from transposon X-element n=1 Tax=Drosophila melanogaster RepID=RTXE_DROME
tggttctttgatgtacccagtacaatttaatgttataagtcttgctgtgtaacagcttttatcgatgtggtgctataaagataattttagcgaatcttgcataacataagtctttatttccaattttttctttgtttttctctctctctcttgagcagtattcatagggttaccataatttattaaggccaaatccggacaggggtagtccatggggttgtaggaaagctaaaatgtgaatttgactgtgtgtggctacctctacattgtacatacagtgtgttccaacgaaaatttgacccctcctccaaactcagaaactaagagtttcttcacaaaaacacgtcaatttgtattggaggggggacgaattttcatgcaaaattcatgctctcaaatgtaaccccctactgaccccagtgttttttaattagcaagtgtgtcgagttgcacatcatttgaaaggtagtttttttttctctacacgaccctctatttttttaatttgcgaaataactttaaagacagttttggatttaactaatttataatacatttgttaagttcaaaattgtcttcaaacttgttatgtaaattaaaaaaaaaatagtgtcgtgtagagaaaaaaattacctttcaaatgatgtgccactcgatcacacttgctatttaaaaaaaaagtgggggttgatgcggggcagtggagggttacatttgagggcatgaagtttgcatgaaagttcgttcccctcccattataaattgacgtatttttaaaatttttaagaagctcttggtttctgagtttctggggtggtcagattttcgatggaacagactgtatatgcgaaatgcatatggcacaattaaaagtacagctgtttcgctacaatatgcaactaacatcgaaaatatttgcaagtttaaaatacatatacacctatgttttaacatactttagacctagaacttaactaggtgctgcgcagaatgaaatttcccaccgttgggccaagtgttttccatttttttagtaaagcaaaaaatccggacatttctcatatccggacgccaatccggacatgccgttcaaatccggactgtccggatgaaatccggacgtatggtaaccctaagtattcatcaactgattcatgggttttgttcttttagacttgttttttcttcttgtgaagccctttgtagtcccatcaatagtattggactatcgcgtgctattaaatttaggatgtcatatgtgtaatattctcttggtgtagttggaactcttcttagaagtttgcctcaaaaatttgtatttcttgtcagcttcacgattctagaaatggtgagtctgatttaaagatcttgttaagctaccaagattatgaatttgcacgtgatttccacaggacttccacaaagtagccagcaaactatatttctactatatttctggctagtgctttgatttcagccagggtttccccatttctttctcttcgtccagtattgcccttttccaagtttttaagtctgcatactttctgtcagccttcagaattccaatccagcactgttcttacaatgtcatctgttgtgtcaatgttgtgtacggagtgtgtggtccaggcatctcgataattttcttcgccttatttgctttatggcatttttttggttggcttgggtctccacaaattttcatttaaaattcgatgaggccaaaatatcatcatcaatggtgctacagcactatgaaagagcctcgaccttctcaagtctattacgccagtcagtcctatccattgccaactgttgccagtttgctgcgcgatttttctaccatcgtctacaccatccttccatctgagttttggcctacccctatttctacttcccacaggttgtgacataaggattcttcaaggagggttgttatgctgtgatcttgctagatgttctgcccacttagtcttcctattttataagagatactacgtctttaccaccaaatatatgtttatatctgtggtatacctcgtagttgtacctcctcctccaaataccattttcacagatgccaccgaatattcctctcaggatccttcgttcaaatataagcagaaggttttcatctgccttggagatggtccatgtctccgatccatatgtcaacactggttgtataagggttttgtatatggttatttttgttttttggcttaagtttctgcttctcatatgtctactcagtccaaaatagcatttgttgctaggattatccttcgcttgatttcttcgtcataacgttctccttggtgatcagggagcctaagtatgtgaatttgtccaccacttcaacggtagagttatcaaccgtgaattggtgaccgatgtttctggcactattgttggatgttgatgctatcatcttagttttctcctcgtttactttcaggcccatattttttgaggcatttgagaaggtggtatacatttcttctagtttgcgtgttgtgcgggcaactaggtccacgtcatctgcatatgccaaaatttggtatgatttattaaaaatatttcctctgttgtctatttggtcatctataattagttattttaaagccttaatgttctacaagtaagttttgttgccaaataatgaaaatctatatatttttataataggtaattaattatttcgaatcgcaagaaaccaagatattgttttattacttattttgattaaaaacaatcaaaataaaattgcttgatttaactattttaataagaaactttttcagagagtttcagaagcttcgaattccaaaactggatcccagaacaccaatttggattccgacaagctcattctacagtgcaacaatgccatcgcatatcaaatgtaattaatagagcattggacaataaacaatattgcacagcagcctttctggacatcagccaagcatttgataaggtatggcacccaggattactttataaaatcaaaaaatctctacacaacaaatactttgacttattaaaatcatatccaaatcacagagaatttgaaactaaagtggaggatgaactatcaaaccgtaacaaaattcaatcaggagtcccacaaggtagtatactgggtccacttctttatgtactgtacacatccgatttaccaacctttccacaaaccacaattggagctttcgctgatgacacagcaatatttgcaactgaagagaattaaacagctgcagtcttaaaacttcaagaacacctagaccaaattggacagtggttaaagaaatggaagataaaagctaatgaaactaagtcaacacatataactgtcacactaagaaaagaccaatgcccaaatattagccttaatcaagtcaacataccccaacagaatatcgtcaaatacctggggcttcatcttgattctaaataaactggaaacaacacattttaaagaagaagaaacaaactgagttgagagtgaaagaaattaattggtttataggtcgaaaatctcgactctcaattgagaacaaactgctcatttataaaacagtcatcaaacctatatggacttacggtatacaactatggagttgtgccagcaaatcaaatacaaa

SEQ ID NO: 68 - DNA, 3656 bp, Diabrotica virgifera
  SmartBlast Evalue=1E-51; Info=Probable RNA-directed DNA polymerase from transposon X-element n=1 Tax=Drosophila melanogaster RepID=RTXE_DROME
tggttctttgatgtacccagtacaatttaatgttataagtcttgctgtgtaacagcttttatcgatgtggtgctataaagataattttagcgaatcttgcataacataagtctttatttccaattttttctttgtttttctctctctctcttgagcagtattcatagggttaccataatttattaaggccaaatccggacaggggtagtccatggggttgtaggaaagctaaaatgtgaatttgactgtgtgtggctacctctacattgtacatacagtgtgttccaacgaaaatttgacccctcctccaaactcagaaactaagagtttcttcacaaaaacacgtcaatttgtattggaggggggacgaattttcatgcaaaattcatgctctcaaatgtaaccccctactgaccccagtgttttttaattagcaagtgtgtcgagttgcacatcatttgaaaggtagtttttttttctctacacgaccctctatttttttaatttgcgaaataactttaaagacagttttggatttaactaatttataatacatttgttaagttcaaaattgtcttcaaacttgttatgtaaattaaaaaaaaaatagtgtcgtgtagagaaaaaaattacctttcaaatgatgtgccactcgatcacacttgctatttaaaaaaaaagtgggggttgatgcggggcagtggagggttacatttgagggcatgaagtttgcatgaaagttcgttcccctcccattataaattgacgtatttttaaaatttttaagaagctcttggtttctgagtttctggggtggtcagattttcgatggaacagactgtatatgcgaaatgcatatggcacaattaaaagtacagctgtttcgctacaatatgcaactaacatcgaaaatatttgcaagtttaaaatacatatacacctatgttttaacatactttagacctagaacttaactaggtgctgcgcagaatgaaatttcccaccgttgggccaagtgttttccatttttttagtaaagcaaaaaatccggacatttctcatatccggacgccaatccggacatgccgttcaaatccggactgtccggatgaaatccggacgtatggtaaccctaagtattcatcaactgattcatgggttttgttcttttagacttgttttttcttcttgtgaagccctttgtagtcccatcaatagtattggactatcgcgtgctattaaatttaggatgtcatatgtgtaatattctcttggtgtagttggaactcttcttagaagtttgcctcaaaaatttgtatttcttgtcagcttcacgattctagaaatggtgagtctgatttaaagatcttgttaagctaccaagattatgaatttgcacgtgatttccacaggacttccacaaagtagccagcaaactatatttctactatatttctggctagtgctttgatttcagccagggtttccccatttctttctcttcgtccagtattgcccttttccaagtttttaagtctgcatactttctgtcagccttcagaattccaatccagcactgttcttacaatgtcatctgttgtgtcaatgttgtgtacggagtgtgtggtccaggcatctcgataattttcttcgccttatttgctttatggcatttttttggttggcttgggtctccacaaattttcatttaaaattcgatgaggccaaaatatcatcatcaatggtgctacagcactatgaaagagcctcgaccttctcaagtctattacgccagtcagtcctatccattgccaactgttgccagtttgctgcgcgatttttctaccatcgtctacaccatccttccatctgagttttggcctacccctatttctacttcccacaggttgtgacataaggattcttcaaggagggttgttatgctgtgatcttgctagatgttctgcccacttagtcttcctattttataagagatactacgtctttaccaccaaatatatgtttatatctgtggtatacctcgtagttgtacctcctcctccaaataccattttcacagatgccaccgaatattcctctcaggatccttcgttcaaatataagcagaaggttttcatctgccttggagatggtccatgtctccgatccatatgtcaacatcggttgtataagggttttgtataaatatggttatttttgttttttggcttaagtttctgcttctcatatgtctactcagtccaaaatagcatttgttcgctagaattatccttcgcttgatttcttccgtcatgacgttctccttggtgatcagggagcctaagtatgtgaatttgtccaccagttcaaaggtagagttatcaacagtgaattggtgaccgatgtttctggctctattgttgggtgttgatgccaacatcttagttttctcctcgtttactttcaggcccatattttttgaggcatttgagaaggtggtatacatttcttctagtttgcgtgttgtgcgggcaactaggtccacgtcatctgcatatgccaaaatttggtatgatttattaaaaatatttcctctgttgtctatttggtcatctataattagttattttaaagccttaatgttctacaagtaagttttgttgccaaataatgaaaatctatatatttttataataggtaattaattatttcgaatcgcaagaaaccaagatattgttttattacttattttgattaaaaacaatcaaaataaaattgcttgatttaactattttaataagaaactttttcagagagtttcagaagcttcgaattccaaaactggatcccagaacaccaatttggattccgacaagctcattctacagtgcaacaatgccatcgcatatcaaatgtaattaatagagcattggacaataaacaatattgcacagcagcctttctggacatcagccaagcatttgataaggtatggcacccaggattactttataaaatcaaaaaatctctacacaacaaatactttgacttattaaaatcatatccaaatcacagagaatttgaaactaaagtggaggatgaactatcaaaccgtaacaaaattcaatcaggagtcccacaaggtagtatactgggtccacttctttatgtactgtacacatccgatttaccaacctttccacaaaccacaattggagctttcgctgatgacacagcaatatttgcaactgaagagaattaaacagctgcagtcttaaaacttcaagaacacctagaccaaattggacagtggttaaagaaatggaagataaaagctaatgaaactaagtcaacacatataactgtcacactaagaaaagaccaatgcccaaatattagccttaatcaagtcaacataccccaacagaatatcgtcaaatacctggggcttcatcttgattctaaataaactggaaacaacacattttaaagaagaagaaacaaactgagttgagagtgaaagaaattaattggtttataggtcgaaaatctcgactctcaattgagaacaaactgctcatttataaaacagtcatcaaacctatatggacttacggtatacaactatggagttgtgccagcaaatcaaatacaaa

SEQ ID NO: 69 - DNA, 3407 bp, Diabrotica virgifera
  SmartBlast Evalue=1E-101; Info=Probable RNA-directed DNA polymerase from transposon X-element n=1 Tax=Drosophila melanogaster RepID=RTXE_DROME
gtttcaaagtgcggtactatcggtttcattttatatctctttataacggtgtcgcgagttttcttgtgaaaaatgatgtccaaagcagacacacaggaagatgcctccttcgccaaattggaaaatcagattgctatcatcaaatacgtaatactctttaccaacgttttgcaatgggctctcggtgcagcaatcttcgctctttgcctttggctacgattcgaggagggcattcaagaatggctccagaaattggattcagaacaattttacatcggagtatatgtacttatagtcgcttcactgatcgtcatgattgtgtcctttataggatgtattagtgccctgcaggagagtaccatggcccttttagtgtacatcggcacccaagtgctcagttttatattcggtttatccggttcggcggttcttctggataacagcgccagagattcccacttccaaccgaggatccgagagagtatgcgacgtcttatcatgaatgctcatcacgaccaatccagacaaacactagccatgattcaggaaaatgttggttgctgcggagctgatggcgcaacagactacctctctcttcagcagccccttccaagtcagtgcagagacaccgttactggaaacccattcttccacggatgtgtagatgaactcacctggttcttcgaagaaaaatgtggttggatagcaggtttagctatggcgatatgcatgattaacgtccttagtattgttttatctacggtactcatccaggcattgaaaaaagaagaagaagcatccgattcatacaggagatagatttagtgagatagagatataatgtagtaattagaatttaatgtatcttcaactaaattacttttttttagagatatacctgaaattgtaaagaacaggaaaattaaataagaaccaaaaactaaagtgaaccaacaataattgaacattccaaaatacactttttttgttaagttaactaaacgacataaatttttcattttttaagttttttattgtttttttagtattataatttggataaggtgtttttatattaagtgtgtaattataaagtttttttataggacggaacctaaattatatagaatcatacaataaactattgtctgctcattgaatttggaaaataaacatttggtatattaaaaataataatatatggcttagtgaggaactaatgaaaacgtctatacatttttgaatttaataccaacagatattgtaattattaattttaattaatcaactccaagtcaacatctagaaagcaatagaaattaaagtaattgactaactaataacattctagcaacctgtacatgtggttgtattactctgttttgacattgacaaaactagctatgtgatcagttatctctagcagtaataaactctagctgtattttgttttatatatttgtccaacaaaaaaaaattttcaaccaacattcctcttgaaataaaaagactagtagcagaaaaacgaaaagccagatcaatttggcaaagaactcacagaccagacgacaggacagtttataataacaaaacaagaaacttaaaaacagctctagaacagatgagaaacaactcatttgaaaactatgtatcaaacctttcgcgtcaagataactctatctggaaaccaatcaaaaacaaaaataaaccaataaatacttcacctccaattcggaaaaacacattaccaccaggaccatgggcaaaaagcaacaaagaaaaagctgatttatttgctgaacatctaactgaagtcttcgaccaagtacaagaagtagagcaggaactagccttaccaattaatcaacgagagcgactaactttaattacaccgaaggagatcaaagatgaaattaatcatttgaatgaaaagaaggcaccaggcactgatctcataacagcaacaatgctaaaacaacttcctaaaaaaggtatcatgaagttattgtacatattaaatgcaatcttaagacttaattattggcctatatcactaaaaattgcccaagtaattatgataccgaaacctggtaaagctttaacggatgtttcatcataccgcccaataagtctactgccaataatgtcaaaacttcttgaaaagctgttacttaaaaaattatgagcgacctagaattccaaaactggatcccagaacaccaatttggattccggcaaggtcattctacagtgcaacaatgccatcgcatatcaaatgtaattaatagagctttggacaataaacagtattgcacagcagcctttctggacattagccaagcatttgataaggtatggcacccaggattactttataaaatcaaaaaatccctacccaacaaatactttgacttattaaaatcatatctaaatcacagagaatttgaaactaaagtggaggatgaactatcaaaccgtaacaaaattcaatcaggagtcccacaaggtagtatattgggtccacttctttatgtactgtacacatccgatttaccaacctctccacaaaccaccattggaactttcgctgatgacacagcaatatttgcaactgaagaggatccaagaactgcagtattaaaacttcaagaacacctagaccaaattggacagtggttaaagaaatggaagataaaagctaacgaaactaagtcaacacatataactttcacactaaggaaagaccaatgcccaaatattagccttaatcaagtcaacataccacaacagaacatcgtcaaatacctggggcttcatcttgattctaaattaaactggaaacaacacattttaaagaagaagaaacaaattgagttgagagtgaaagaaataaattggcttataggtagaaaatctcgactctcaattgagaacaaactgctgatttataaaacagtcatcaaacctatatggacgtacggtatagaactatggagttgtgccagcaaatcaaacacaaaaattatccaaagaactcaatcaaaaattctacgcaccatcgcaaatgccccgtggtacatttccaaccaaacccttcatacagacctaaacatcccgttagtcagcacagtaattcaagaaagagccaacagacatcacgagaaattggaagaccaccccaaccaattaatattaccattactgcagccactaaacaacagaagattgcgaagattatggcccatagatcttcgctgaaactgaggtgaaaccgctgggtgatgtacctcataacgccattttagtgtacaataatacattgatatatgttattgtacttgttatcaaattagcttatataatatgtaattatgattgctaataaatgcttacaaaaaaaaaaaaat

SEQ ID NO: 70 - DNA, 7357 bp, Diabrotica virgifera
  SmartBlast Evalue=0; Info=Catenin alpha n=3 Tax=Aculeata RepID= E2A263_9HYME
attttatacaaagcacagcgtgaaatctgtgcgcggacaaaaaacttgttatcgccgatttattataatttatatttatgaagtgactgtgtcggtacttaatagctttatgtatattgtgtttgttttcatttaaattttaaatttctataccaaagatatgagccggttgaacatattcagttttttgaaaatgcttcaagcattgtgttgtgtactgggagttacatcagcatcttcagacccagttatagtctccagagaagaatggggggcccgcgctcctaaaaacatagaaaatatggcgaacccagtaccttacgtcgttatccaccacagttatctaccaccagcttgttacaatttaaccgattgtttcaaagccatgcgttggatgcaagaccttcaccaagacaccaacggttgggcggatattggctacaactttggtgttggcggagatggtagagcctacgaaggaaggggatggtccagagttggtgctcatgctccctattacaacagcaaaagtattggaatatgtataattggagattggacagttgaacttccaccagaaaatcagctagcgacagttcatgagctaatacaaaaaggagtgagagaagggtacatccagaaggactacaaattggtaggccataggcaggttagacaaggtaccgaatgtccgggtgacaggctcttcaaagagatacacaagtggcagaatttttgtgaacaaccagacgagatagcagtaaggacaaacaacacttggttccttaaaaaaactgtacatgacaatagtagggataaggaagataaagatgaagacaataatgacaatggtattaataggttagaaaaaagaactgtttagatttaagtaatacattttatttattattaaaaaaacacctatgcagttatgattcatttttgagataaacaatagggtgaatttatttttcttttagtcagatttagtaataaactaagctcgtttagtagtgtatttactaccgatttacgttttattttgtatatagctaagtctcaattaaaaatgatgactgaccgcttcggtttaaaatgggacccgaaaaacttagagataagaaccatgtctgtggaaaagacattggaacccctagtgcttcaagttaccaccctcgtcaataccaaggggcctagcaaaaagaagaaaggaaagtctaaacgtgccaatgctctggttagtactgttgaaaaagccacggaaaacttcatagaaaagggggagcagatagcctatgagaatccagatattactgaggaaatgctggcagctgttgacgaagtcaagaaaacgggacatgctatgagcggagctgcaagagaattttcagaagacccatgttcttctttaaaaagaggaaatatggttagggctgctagaaatcttttatcggctgtaactcgtcttttaattctagcggacatggttgatgtccaccttttgctcaaatccttacatgtagttgaggatgacctcgaaaaactaaaaaatgcttcaagcaatggcgaacttttagacaatattaaagcctttggtcaaaatgccaacgaattaatgaatcaggctgctaaaaggcagcaagaactgaaagatccacaacttcgtgatgatctagcagctgctagagctgtacttaagaaacattccactatgttattaactgcctctaaggtttatgtacgtcatccagagctagcagctgccaaagcaaatagagattatgtcttgaaacaagtttgtgaagctgtgaataccattaatgatgtagctcagggaagaactcctcaacctgcttctggaccatatgatggacctggagagttggctgctgctttggatgattttgatgatcacatggtaatggagcctctagcatacaatgaagttcataccaggccttcattggaagaacgtctagaaagcattataagtggtgcagctcttatggcagattctagttgtactagggatgaaagaagggaaaggatagttgcagagtgtaatgctgtaagacaagctttgcaagacttgttgactgaatatatgacaaatatgggcaataaagataaaagtgagagcctaatacgagcaatcgacaatatgggtagaaagactaaggatttaagaagacaactgagaaaagctgttgtagatcatgtatctgacagtttcttggaaaccaacgtacctcttctcgttttaataaaggcagctcaaaatggcaacgaaaaggaggtagaagaatatgcagttgtatttactgaacattccaataagttagtagaagttgctaaccttgtctgcagcatgtctaataatgaagatggtgtcaaaatggttagatatgctgctgctcagatcgacaatctgtgtcctgaagtaataaatgcagctagaattttagccgctagacctcgcagtaaagttgctcaagaaaatatggacgcattcaagcaatcatgggagaatcaagtgagacttctgactgaagcagtcgatgacattactactatcgacgactttttggctgtttctgaaaaccatattctggaagatgttaataaatgtgtacttgccttgcaagaaggtgattctgacacattggatcgcactgccagtggtataagaggaagatccaatagggtgtgcaatgtagtaacagctgaaatggataattacgaaccttgcatttataccaaacgtgttcttgaagccgtcaaagtattgaatgatcaagtgatgcccaagtttactcaaagagtgcaagttgcagttcaagctttgggaaatagtcctcccaaagaagtggatgaaaacgattttatcgatgcttctagacttgtttacgatggagtgagagaaataagaagagccgttctaatgaatagagccgatgaagatttagatccagaagatgtcgaattggatgaaaactatctaatagaaacaagaagcaaatcgagcgctcacacaggcgaacatggagttgatgagtatccagatattagtggaattacaacggctagggaagctatgggtaaaatgccggaagaagataaacagaagattttgcaacaggttgagttcttcaggagtgaaaaactcaagtttgaccgtgaggtcgctaaatgggacgacactggcaacgatattatcgttcttgctaagcacatgtgtatgattatgatggaaatgacagattttaccaggggtcgtggccctctaaaaaccactatggacgttattaatgcggctaaaaagatttccgaagctggaaccaaattagataaacttactcgccaaatagctgaacagtgcccagagagttccaccaaaaaagatttgttggcttatttgcaacgtattgctctttactgccaccagatgaacattacatcaaaggttaaagccgatgttcaaaacatcagtggagaacttattgtatctgggttggacagtgctacttctttgattcaagctgctaagaacttgatgaatgctgtagttctcacagtaaaagcttcatatgtggcatccaccaaatacccaagacaaggaactattgcatcgccgattgttgtctggaagatgaaagcgccagagaagaagccgttagtcagaccagagaaacccgaagaagttcgtgccaaagtacgcaaaggctcacaaaagaaagttcaaaatccaattcacgctctttctgaattccaaagcccaactgagtctgtgtaaacgtaaacctttatccattaatatattaaccagatgttaactattatttgcctgattattctgtgacattttctatgtacctatagattcgtattaatataaagtctgattagaggcatgttcaagttcatttaacatttgaacagtacatagtaagtccgtagtttcatcaagtgttaaatacagtgtgttctaacgaaaatatgaccccctcccagaaactgagaagccaaggagtttcttcacaatttgaaaatcacgtcaatttgtattggaagagggacgaatgttcatgcaattcatgccctcagatgtaaccccctactgccccccagttttttgaaatagcaagtgtgtcgagttgcacatcatttgaaaggtagtttttttttctctacacgaccctctatttttttaatttgcgaaataactttaaagacagttttggatttaactaatttataatacatttgttaagttcaaaattgtcttcaaacttgttatgtaaattaaaaaaaaaatagtgtcgtgtagagaaaaaaattacctttcaaatgatgtgccactcgatcacacttgctatttaaaaaaaaagtgggggttgatgcggggcagtggagggttacatttgagggcatgaagtttgcatgaaagttcgttcccctcccattataaattgacgtatttttaaaatttttaagaagctcttggtttctgagtttctggggtggtcagattttcgatggaacagactgtatatgcgaaatgcatatggcacaattaaaagtacagctgtttcgctacaatatgcaactaacatcgaaaatatttgcaagtttaaaatacatatacacctatgttttaacatactttagacctagaacttaactaggtgctgcgcagaatgaaatttcccaccgttgggccaagtgttttccatttttttagtaaagcaaaaaatccggacatttctcatatccggacgccaatccggacatgccgttcaaatccggactgtccggatgaaatccggacgtatggtaaccctaagtattcatcaactgattcatgggttttgttcttttagacttgttttttcttcttgtgaagccctttgtagtcccatcaatagtattggactatcgcgtgctattaaatttaggatgtcatatgtgtaatattctcttggtgtagttggaactcttcttagaagtttgcctcaaaaatttgtatttcttgtcagcttcacgattctagaaatggtgagtctgatttaaagatcttgttaagctaccaagattatgaatttgcacgtgatttccacaggacttccacaaagtagccagcaaactatatttctactatatttctggctagtgctttgatttcagccagggtttccccatttctttctcttcgtccagtattgcccttttccaagtttttaagtctgcatactttctgtcagccttcagaattccaatccagcactgttcttacaatgtcatctgttgtgtcaatgttgtgtacggagtgtgtggtccaggcatctcgataattttcttcgccttatttgctttatggcatttttttggttggcttgggtctccacaaattttcatttaaaattcgatgaggccaaaatatcatcatcaatggtgctacagcactatgaaagagcctcgaccttctcaagtctattacgccagtcagtcctatccattgccaactgttgccagtttgctgcgcgatttttctaccatcgtctacaccatccttccatctgagttttggcctacccctatttctacttcccacaggttgtgacataaggattcttcaaggagggttgttatgctgtgatcttgctagatgttctgcccacttagtcttcctattttataagagatactacgtctttaccaccaaatatatgtttatatctgtggtatacctcgtagttgtacctcctcctccaaataccattttcacagatgccaccgaatattcctctcaggatccttcgttcaaatataagcagaaggttttcatctgccttggagatggtccatgtctccgatccatatgtcaacactggttgtataagggttttgtatatggttatttttgttttttggcttaagtttctgcttctcatatgtctactcagtccaaaatagcatttgttgctaggattatccttcgcttgatttcttcgtcataacgttctccttggtgatcagggagcctaagtatgtgaatttgtccaccacttcaacggtagagttatcaaccgtgaattggtgaccgatgtttctggcactattgttggatgttgatgctatcatcttagttttctcctcgtttactttcaggcccatattttttgaggcatttgagaaggtggtatacatttcttctagtttgcgtgttgtgcgggcaactaggtccacgtcatctgcatatgccaaaatttggtatgatttattaaaaatatttcctctgttgtctatttggtcatctataattagttattttaaagccttaatgttctacaagtaagttttgttgccaaataatgaaaatctatatatttttataataggtaattaattatttcgaatcgcaagaaaccaagatattgttttattacttattttgattaaaaacaatcaaaataaaattgcttgatttaactattttaataagaaactttttcagagagtttcagaagcttcgaattccaaaactggatcccagaacaccaatttggattccgacaagctcattctacagtgcaacaatgccatcgcatatcaaatgtaattaatagagcattggacaataaacaatattgcacagcagcctttctggacatcagccaagcatttgataaggtatggcacccaggattactttataaaatcaaaaaatctctacacaacaaatactttgacttattaaaatcatatccaaatcacagagaatttgaaactaaagtggaggatgaactatcaaaccgtaacaaaattcaatcaggagtcccacaaggtagtatactgggtccacttctttatgtactgtacacatccgatttaccaacctttccacaaaccacaattggagctttcgctgatgacacagcaatatttgcaactgaagagaattaaacagctgcagtcttaaaacttcaagaacacctagaccaaattggacagtggttaaagaaatggaagataaaagctaatgaaactaagtcaacacatataactgtcacactaagaaaagaccaatgcccaaatattagccttaatcaagtcaacataccccaacagaatatcgtcaaatacctggggcttcatcttgattctaaataaactggaaacaacacattttaaagaagaagaaacaaactgagttgagagtgaaagaaattaattggtttataggtcgaaaatctcgactctcaattgagaacaaactgctcatttataaaacagtcatcaaacctatatggacttacggtatacaactatggagttgtgccagcaaatcaaatacaaa

SEQ ID NO: 71 - DNA, 3510 bp, Diabrotica virgifera
  SmartBlast Evalue=1E-85; Info=Probable RNA-directed DNA polymerase from transposon X-element n=1 Tax=Drosophila melanogaster RepID=RTXE_DROME
acagatgtagtaccaagttttgatttatcatcagatcatagtcccataattgccacaattagcacaacgttgataatcaaaaaccaacacctcgactgcatagctttaaaacaaactgggacacataccgactaatcatagaacaggaagtaaatctactagtgagattgcaaactcccgaacaaatagaaacagaaactagtaatctaatcgacttacttcaaaatgctgccaaacagtctacccctcaacctggacaaaaaaaaattttcaaccaacattcctcttgaaataaaaagactagtagcagaaaaacgaaaagccagatcaatttggcaaagaactcacagaccagacgacaggacagtttataataacaaaacaagaaacttaaaaacagctctagaacagatgagaaacaactcatttgaaaactatgtatcaaacctttcgcgtcaagataactctatctggaaaccaatcaaaaacaaaaataaaccaataaatacttcacctccaattcggaaaaacacattaccaccaggaccatgggcaaaaagcaacaaagaaaaagctgatttatttgctgaacatctaactgaagtcttcgaccaagtacaagaagtagagcaggaactagccttaccaattaatcaacgagagcgactaactttaattacaccgaaggagatcaaagatgaaattaatcatttgaatgaaaagaaggcaccaggcactgatctcataacagcaacaatgctaaaacaacttcctaaaaaaggtatcatgaagttattgtacatattaaatgcaatcttaagacttaattattggcctatatcactaaaaattgcccaagtaattatgataccgaaacctggtaaagctttaacggatgtttcatcataccgcccaataagtctactgccaataatgtcaaaacttcttgaaaagctgttacttaaaaaattatgagcgacctagaattccaaaactggatcccagaacaccaatttggattccgacaagctcattctacagtgcaacaatgccatcgcatatcaaatgtaattaatagagcattggacaataaacaatattgcacagcagcctttctggacatcagccaagcatttgataaggtatggcacccaggattactttataaaatcaaaaaatctctacacaacaaatactttgacttattaaaatcatatccaaatcacagagaatttgaaactaaagtggaggatgaactatcaaaccgtaacaaaattcaatcaggagtcccacaaggtagtatactgggtccacttctttatgtactgtacacatccgatttaccaacctttccacaaaccacaattggagctttcgctgatgacacagcaatatttgcaactgaagagaattaaacagctgcagtcttaaaacttcaagaacacctagaccaaattggacagtggttaaagaaatggaagataaaagctaatgaaactaagtcaacacatataactgtcacactaagaaaagaccaatgcccaaatattagccttaatcaagtcaacataccccaacagaatatcgtcaaatacctggggcttcatcttgattctaaataaactggaaacaacgcattttaaagatgaataaacaaattgagttgagagtgaaagaaattaattggcttataggtcgaaaatcttgactctcaattgagaacaaactgctaatttataaaacagtcatcaaacttatatggacgtacggcatagaactatggagttgtgccagcaaatcaattacaaaaattatccaaagaactcaatcaaaaattctacgcaccatcgcaaatgccccgtggtacatctccaaccaaacccttcatagagacctaaacatcccgttagtcagcacagtattcaagaaagagccaacagacaccacgagaaattagaaggccaccccaaccaattaatattaccattactgcagccactaaacaacagaagattgcgaagattaaagttattgtacttgttatcaaattaactcatagaatatgtaattctgattgttaataaatgcttacaaaaaaaaaagaagcttcgaggccaaatatttcaacatccaccaaagtttctagacaaataaagaatattccaagaaaaaatacaatactatacatttttttttaaaatgctttcaaatatttcttattttctaattaatgaaatatacaaaattcacacaggtataaacataaatgatgaaaacagatattacttaattaatacgtttataacgataatttccacctccactagtttcatctctttttgtttcgcaatgtgttatgttttccatcttttgagctattttgcgggtaattagcgcgctcatcactgtataaaaaaaaacagttgtttttagaactctttagcgacgtattagtataaaataatatttatggattactgtcgaaggccatcatgataccaaaaaagaaaatgaatctgctgatttttctagtgacaatattgggtatgaatccagtatgaatctgtctgttgagtttattccgcctaagttaaaacaggttatagtgtgaattaataaaacttacactctaatattcatgtcctacaaataaacaaaactatcttgagctgacaactaggaaaacatgacctgcaacttttattgcaaccaatgttgtttaaacgtggtattccccaccatccaacttctcatcagaaataatattaaacaaccacttagcagtgctgtcttcaacccacaacaaatctatcagtaatccattgaagattcctaagacaacaccaccaagaacatccattatgtaatgtctgttcattaagatcctgctgaccgaaactgatatgctccaaacccagagaaaaggtattaaaagaaagtttaaaggccatagtttggtgtaaaagtatgctacaaatatagccctactagcatggcctgaaggaaaactaaatacgtccacatatttggcgagaggatcatctttgatgttttttggtggccgcttgcgcctgaagtaagctttggctactgctactagtattatatcagtagtaagacctaaaagcatgtttacttgcatttggactagattaggattattaaatagccagctaaaggcaatccaaaatgcaaaccatggaattccatggcaggaaatttctaaagctttacaatgaactctataagcatctaaatctaagattttgttagcccatgtaagaaactcgtttgtaatatatgcatcgtatttcaatattttttgtaatgctggtggaactctacttttaccctccgacattttgcagtatataatgtaaagtccagccaagacttatcttataatcttttacaaacttccaaaaatatataggtccgaaatgttgatgacacacttgtctattggaataaactgtttcgggatctattatattgttttttttaatgtgg

SEQ ID NO: 72 - DNA, 3164 bp, Diabrotica virgifera
  SmartBlast Evalue=1E-105; Info=Reverse transcriptase family member n=1 Tax=Glycine max RepID=Q1AKH8_SOYBN
aggcgcctttcaggattatatatattttgatccttggactgtccactgcttgttctcgggctttcgagcaaatcgatccattctgtaaaaattgcgaggtgaaaagcttcggttcctggacgacaacgtgcaatagcgttattaccctcaatatttgagatttgcaatgcttgggctaggacagaactatttatggtcggcgtggatctgcgcgaagtcttctgtcgtttatcggtaaatgaacatggttcaaaggaagtcagaagctgatacagactaggtacatactcctccaacccttttaactctgctaggaacaatcagtgccttggtaattttactatggagtggtctagcgaccgacgttctgtttgaatttttatcatcgtgtaaattaaccaactaactaaaatttctaccgccaacactggtggtgcaccctcgatattagaggggatacgttccatcgaaatggtccgatcatatttatcaaaatgtaaatgtttattaatctcagaataatatggggcgttaactgtgctctcttttcttttcaccattatctattttctatttctctttgccaacgtgaactggcaaagagtgccacgccacattctatgggatcccgtcttaatgcagattattatttttcttatgcaaacatatttattttaatagtatttaaggtaggtttaataataacagcaatgactattgtattacgtagatatataatatattctttaagttctgtagatacaatacgaaatgtgcaggtagctattattgttttttgttttttggtacaaaatattttaaattacttctaacaacataaatatataatgaggattccttttagagaaaagaagtaaaaagaaatacttcgcacagatttataggtgtgctttatcagttcttcatcaattatacgttaatggtctcgatttaacaatgatgtaagtactctttcagactaagacagtctgagaccgatgtgcgcccccggttttcaattgccccaaagcattggtaagccactaaaatcagccagacactaggaagtggctcgtctgtagtcgttcatttaaaaccatgctttgctgcaatttggcggacaccggtgtcagacaccagtgtcttagtcagaaagggtactaaatctccatacctattcaaaagtagataatacaaatatttcatcatcattctctttgccttattcctatgcggggccggcttccctagttgcatttctccacacaattctatcttgggtcatatcaatgttaatcccctttaccaacatgtcctgccttatcgtctccccccaggtcttctttggtcttcctctcctactccttccaggaatctgcacttcagctattcttcgtattgggtgattaacgtctcgacgttgaacatgaccaaaccatcttaacctatgctctctcattttggcatcaattggtgccacacctagacttcccctaatatactcatttctaattttatccttctttgtcactccactcatccatctaagcattctcatttccgccacatgcattcgttgttcctctttctttttcactgcccaacattcagttccgtacatcatagccggtcttatggctgttttatagaattttcccttcagcttcattggaatttttctgtcacacaacacaccactcgcttctttccacttcatccatccagccctaattctactgcatgcatctccatctatttctccattactctgtaataccgatcctaggtacttaaaactattgctttttacaatcattcaccatccaaagataccattttatttgtagtaactccatctttaaatgaacattccaaatactctgtttttgtcctactaagttttaaacctttttcctccagagcttgtctccactgttccagtttttgttctaagtctctttcactatttcctattaacactacatcatcagcatacattaggcaccatggaatactaccctgtagtttcgctgttatctggtccaaaactaatgagaataaataaggactaagcaccgagccttggtgcaatcctactttcacctgaaatttatcagtctctcccacacctgtcctaacactagtcgttactccctcatacatatctctcacaatctttacatattcgccagggactcctttcttattgagtgcccaccacagaatctctcgaggaactctatcatatgctttctcaagatcatgaataccaacgctcgtcttcatacttatctgctcttataataataacctttaaaacggtctattatcattccgcatcttttttttgcatattgtctgctaatagtttcatcttatgtttttctatttattctttatttcattcgcccgcttctttcttttgattgtttcaaccacgtgctagaagaagtatcggccctccgcgcaagagctagagtgacaatcttccatagaggtatcaatcatccaattaacaagccaaattactcatataaaggaaggagaagaagaagagcatgtgaatactagtaataggaatctaatcggctagtgaatagctttggagatatcaggtctttctgtctaatagtttttttacttcaatcggttttgtgtggacaaaaatgggcaaattgttatagtgtgacaatccttagaaatgtcttttatctcttgaatccatggtctactcagtttttccttgacacatttatcaatgcttatgttccaaccatatttttaagttgtattcatgtattgtattcgtgtattgttgtattcatgtgattttctgacatgagtttttccctattcaataattttcttgtaccctgtacgcgactgatttttcaattacttcatacatatgcgcgcgcatttttcattataaatatactcaaaaattcttgaaaacttttacagatgttctatcgttattcttaaaaacctttcttcatgttctgttgtcatttttgttatcttacgttctatgactaatgctatattcttatttttctaaatatctaccttttctaatcagatttcactttatatttttatttatcacgttttttattgtaccatattttcttttttgttataaataaacatgttaaaacgta

SEQ ID NO: 73 - DNA, 2917 bp, Diabrotica virgifera
  SmartBlast Evalue=2E-75; Info=Reverse transcriptase family member n=1 Tax=Glycine max RepID=Q1AKH8_SOYBN
ataaggtgcatgcaatgcatcactagattttagttttttttgttagtaggaactgctaatttagaattatttgctgcggtaaacttttattatctttttaggataatagggtaatttaaagacaatttaaatattgcctttaaattgttctttaacattatggttatttcgatgcgtcccctaacttttaagcatcagatccaggcatttttccgattttcaaaacaataattattttcgatatatttcatcatcatcatcatcattctctttgccttatccctatgcggggtcggcttccctaattgcatttctccacacaattctatcttgggtcatatcaatgttaatcccctttaccaacatgtcctgccttatcgtctccccccaggtcttctttggtcttcctctcctactccttccaggaatctgcacttcagctattcttcgtattgggtgattaacgtctcgacgttgaacatgaccaaaccatcttaacctatgctctctcattttggcatcaattggtgccacacctagacttcccctaatatactcatttctaattttatccttctttgtcactccactcatccatctaagcattctcatttccgccacatgcattcgttgttcctctttctttttcactgcccaacattcagttccgtacatcatagccggtcttatggctgttttatagaattttcccttcagcttcattggaatttttctgtcacacaacacaccactcgcttctttccacttcatccatccagccctaattctactgcatgcatctccatctatttctccattactctgtaataccgatcctaggtacttaaaactattgcttttcacaatcatttcaccatccaaagataccattttatttgtagtagctccatctttaaatgaacattccaaatactctgtttttgtcctactaagttttaaacctttttcctccagagcttgtctccactgttccagtttttgttctaaacttctttccctatttcctattaacactttcccaagtctattacaccagtcagtcctatccattgccaaccgttgccagtttgctgcgcctatttttctcccatcctcatctacaccatccttccatctaagttttggcctacccgtatttctacttcccacaggttgtgacataaggattcttctaggagggttgttatgctgtgatcttgctagatgtcctgcccatcttagtcttcctattttataagagatactacgtctttaccaccaaatatatgtttatatctgtggtatacctcgtagttgtacctcctcctccaaataccattttcacagatgccaccgaatattcctctcaggatccttcgttcaaatataagcagaaggttttcatctgccttggagatggtccatgtctccgatccatatgtcaacactggttgtataagggttttgtatatggttatttttgttttttggcttaagtttctgcttctcatatgtctactcagtccaaaatagcatttgttgctaggattatccttcgcttgatttcttcgtcataacgttctccttggtgatcagggagcctaagtatgtgaatttgtccaccacttcaacggtagagttatcaaccgtgaattggtgaccgatgtttctggcactattgttggatgttgatgctatcatcttagttttctcctcgtttactttcaggcccatattttttgaggcatttgagaaggtggtatacatttcttctagtttgcgtgttgtgcgggcaactaggtccacgtcatctgcatatgccaaaatttggtatgatttattaaaaatatttcctctgttgtctatttggtcatctataattagttattttaaagccttaatgttctacaagtaagttttgttgccaaataatgaaaatctatatatttttataataggtaattaattatttcgaatcgcaagaaaccaagatattgttttattacttattttgattaaaaacaatcaaaataaaattgcttgatttaactattttaataagaaactttttcagagagtttcagaagcttcgaattccaaaactggatcccagaacaccaatttggattccgacaagctcattctacagtgcaacaatgccatcgcatatcaaatgtaattaatagagcattggacaataaacaatattgcacagcagcctttctggacatcagccaagcatttgataaggtatggcacccaggattactttataaaatcaaaaaatctctacacaacaaatactttgacttattaaaatcatatccaaatcacagagaatttgaaactaaagtggaggatgaactatcaaaccgtaacaaaattcaatcaggagtcccacaaggtagtatactgggtccacttctttatgtactgtacacatccgatttaccaacctttccacaaaccacaattggagctttcgctgatgacacagcaatatttgcaactgaagagaattaaacagctgcagtcttaaaacttcaagaacacctagaccaaattggacagtggttaaagaaatggaagataaaagctaatgaaactaagtcaacacatataactgtcacactaagaaaagaccaatgcccaaatattagccttaatcaagtcaacataccccaacagaatatcgtcaaatacctggggcttcatcttgattctaaataaactggaaacaacacattttaaagaagaagaaacaaactgagttgagagtgaaagaaattaattggtttataggtcgaaaatctcgactctcaattgagaacaaactgctcatttataaaacagtcatcaaacctatatggacttacggtatacaactatggagttgtgccagcaaatcaaatacaaa

SEQ ID NO: 74 - DNA, 2923 bp, Diabrotica virgifera
  SmartBlast Evalue=2E-75; Info=Reverse transcriptase family member n=1 Tax=Glycine max RepID=Q1AKH8_SOYBN
ataaggtgcatgcaatgcatcactagattttagttttttttgttagtaggaactgctaatttagaattatttgctgcggtaaacttttattatctttttaggataatagggtaatttaaagacaatttaaatattgcctttaaattgttctttaacattatggttatttcgatgcgtcccctaacttttaagcatcagatccaggcatttttccgattttcaaaacaataattattttcgatatatttcatcatcatcatcatcattctctttgccttatccctatgcggggtcggcttccctaattgcatttctccacacaattctatcttgggtcatatcaatgttaatcccctttaccaacatgtcctgccttatcgtctccccccaggtcttctttggtcttcctctcctactccttccaggaatctgcacttcagctattcttcgtattgggtgattaacgtctcgacgttgaacatgaccaaaccatcttaacctatgctctctcattttggcatcaattggtgccacacctagacttcccctaatatactcatttctaattttatccttctttgtcactccactcatccatctaagcattctcatttccgccacatgcattcgttgttcctctttctttttcactgcccaacattcagttccgtacatcatagccggtcttatggctgttttatagaattttcccttcagcttcattggaatttttctgtcacacaacacaccactcgcttctttccacttcatccatccagccctaattctactgcatgcatctccatctatttctccattactctgtaataccgatcctaggtacttaaaactattgcttttcacaatcatttcaccatccaaagataccattttatttgtagtagctccatctttaaatgaacattccaaatactctgtttttgtcctactaagttttaaacctttttcctccagagcttgtctccactgttccagtttttgttctaaacttctttccctatttcctattaacactttcccaagtctattacaccagtcagtcctatccattgccaaccgttgccagtttgctgcgcctatttttctcccatcctcatctacaccatccttccatctaagttttggcctacccgtatttctacttcccacaggttgtgacataaggattcttctaggagggttgttatgctgtgatcttgctagatgtcctgcccatcttagtcttcctattttataagagatactacgtctttaccaccaaatatatgtttatatctgtggtatacctcgtagttgtacctcctcctccaaataccattttcacagatgccaccgaatattcctctcaggatccttcgttcaaatataagcagaaggttttcatctgccttggagatggtccatgtctccgatccatatgtcaacatcggttgtataagggttttgtataaatatggttatttttgttttttggcttaagtttctgcttctcatatgtctactcagtccaaaatagcatttgttcgctagaattatccttcgcttgatttcttccgtcatgacgttctccttggtgatcagggagcctaagtatgtgaatttgtccaccagttcaaaggtagagttatcaacagtgaattggtgaccgatgtttctggctctattgttgggtgttgatgccaacatcttagttttctcctcgtttactttcaggcccatattttttgaggcatttgagaaggtggtatacatttcttctagtttgcgtgttgtgcgggcaactaggtccacgtcatctgcatatgccaaaatttggtatgatttattaaaaatatttcctctgttgtctatttggtcatctataattagttattttaaagccttaatgttctacaagtaagttttgttgccaaataatgaaaatctatatatttttataataggtaattaattatttcgaatcgcaagaaaccaagatattgttttattacttattttgattaaaaacaatcaaaataaaattgcttgatttaactattttaataagaaactttttcagagagtttcagaagcttcgaattccaaaactggatcccagaacaccaatttggattccgacaagctcattctacagtgcaacaatgccatcgcatatcaaatgtaattaatagagcattggacaataaacaatattgcacagcagcctttctggacatcagccaagcatttgataaggtatggcacccaggattactttataaaatcaaaaaatctctacacaacaaatactttgacttattaaaatcatatccaaatcacagagaatttgaaactaaagtggaggatgaactatcaaaccgtaacaaaattcaatcaggagtcccacaaggtagtatactgggtccacttctttatgtactgtacacatccgatttaccaacctttccacaaaccacaattggagctttcgctgatgacacagcaatatttgcaactgaagagaattaaacagctgcagtcttaaaacttcaagaacacctagaccaaattggacagtggttaaagaaatggaagataaaagctaatgaaactaagtcaacacatataactgtcacactaagaaaagaccaatgcccaaatattagccttaatcaagtcaacataccccaacagaatatcgtcaaatacctggggcttcatcttgattctaaataaactggaaacaacacattttaaagaagaagaaacaaactgagttgagagtgaaagaaattaattggtttataggtcgaaaatctcgactctcaattgagaacaaactgctcatttataaaacagtcatcaaacctatatggacttacggtatacaactatggagttgtgccagcaaatcaaatacaaa

SEQ ID NO: 75 - DNA, 2771 bp, Diabrotica virgifera
  SmartBlast Evalue=5E-74; Info=Reverse transcriptase family member n=1 Tax=Glycine max RepID=Q1AKH8_SOYBN
aggcgcctttcaggattatatatattttgatccttggactgtccactgcttgttctcgggctttcgagcaaatcgatccattctgtaaaaattgcgaggtgaaaagcttcggttcctggacgacaacgtgcaatagcgttattaccctcaatatttgagatttgcaatgcttgggctaggacagaactatttatggtcggcgtggatctgcgcgaagtcttctgtcgtttatcggtaaatgaacatggttcaaaggaagtcagaagctgatacagactaggtacatactcctccaacccttttaactctgctaggaacaatcagtgccttggtaattttactatggagtggtctagcgaccgacgttctgtttgaatttttatcatcgtgtaaattaaccaactaactaaaatttctaccgccaacactggtggtgcaccctcgatattagaggggatacgttccatcgaaatggtccgatcatatttatcaaaatgtaaatgtttattaatctcagaataatatggggcgttaactgtgctctcttttcttttcaccattatctattttctatttctctttgccaacgtgaactggcaaagagtgccacgccacattctatgggatcccgtcttaatgcagattattatttttcttatgcaaacatatttattttaatagtatttaaggtaggtttaataataacagcaatgactattgtattacgtagatatataatatattctttaagttctgtagatacaatacgaaatgtgcaggtagctattattgttttttgttttttggtacaaaatattttaaattacttctaacaacataaatatataatgaggattccttttagagaaaagaagtaaaaagaaatacttcgcacagatttataggtgtgctttatcagttcttcatcaattatacgttaatggtctcgatttaacaatgatgtaagtactctttcagactaagacagtctgagaccgatgtgcgcccccggttttcaattgccccaaagcattggtaagccactaaaatcagccagacactaggaagtggctcgtctgtagtcgttcatttaaaaccatgctttgctgcaatttggcggacaccggtgtcagacaccagtgtcttagtcagaaagggtactaaatctccatacctattcaaaagtagataatacaaatatttcatcatcattctctttgccttattcctatgcggggccggcttccctagttgcatttctccacacaattctatcttgggtcatatcaatgttaatcccctttaccaacatgtcctgccttatcgtctccccccaggtcttctttggtcttcctctcctactccttccaggaatctgcacttcagctattcttcgtattgggtgattaacgtctcgacgttgaacatgaccaaaccatcttaacctatgctctctcattttggcatcaattggtgccacacctagacttcccctaatatactcatttctaattttatccttctttgtcactccactcatccatctaagcattctcatttccgccacatgcattcgttgttcctctttctttttcactgcccaacattcagttccgtacatcatagccggtcttatggctgttttatagaattttcccttcagcttcattggaatttttctgtcacacaacacaccactcgcttctttccacttcatccatccagccctaattctactgcatgcatctccatctatttctccattactctgtaataccgatcctaggtacttaaaactattgcttttcacaatcatttcaccatccaaagataccattttatttgtagtagctccatctttaaatgaacattccaaatactctgtttttgtcctactaagttttaaacctttttcctccagagcttgtctccactgttccagtttttgttctaaacttctttccctatttcctattaacactttcccaagtctattacaccagtcagtcctatccattgccaaccgttgccagtttgctgcgcctatttttctcccatcctcatctacaccatccttccatctaagttttggcctacccgtatttctacttcccacaggttgtgacataaggattcttctaggagggttgttatgctgtgatcttgctagatgtcctgcccatcttagtcttcctattttataagagatactacgtctttaccaccaaatatatgtttatatctgtggtatacctcgtagttgtacctcctcctccaaataccattttcacagatgccaccgaatattcctctcaggatccttcgttcaaatataagcagaaggttttcatctgccttggagatggtccatgtctccgatccatatgtcaacactggttgtataagggttttgtatatggttatttttgttttttggcttaagtttctgcttctcatatgtctactcagtccaaaatagcatttgttgctaggattatccttcgcttgatttcttcgtcataacgttctccttggtgatcagggagcctaagtatgtgaatttgtccaccacttcaacggtagagttatcaaccgtgaattggtgaccgatgtttctggcactattgttggatgttgatgctatcatcttagttttgtcctcgtttacttgcaggcccatattttttgaggcatttgagaaggtgatatacatttcttctagcttgcgtgttgtgcgggcaactaggttcacgtcatctgcataatatgcc

SEQ ID NO: 76 - DNA, 3019 bp, Diabrotica virgifera
  SmartBlast Evalue=2E-78; Info=Probable RNA-directed DNA polymerase from transposon X-element n=1 Tax=Drosophila melanogaster RepID=RTXE_DROME
gtttcaaagtgcggtactatcggtttcattttatatctctttataacggtgtcgcgagttttcttgtgaaaaatgatgtccaaagcagacacacaggaagatgcctccttcgccaaattggaaaatcagattgctatcatcaaatacgtaatactctttaccaacgttttgcaatgggctctcggtgcagcaatcttcgctctttgcctttggctacgattcgaggagggcattcaagaatggctccagaaattggattcagaacaattttacatcggagtatatgtacttatagtcgcttcactgatcgtcatgattgtgtcctttataggatgtattagtgccctgcaggagagtaccatggcccttttagtgtacatcggcacccaagtgctcagttttatattcggtttatccggttcggcggttcttctggataacagcgccagagattcccacttccaaccgaggatccgagagagtatgcgacgtcttatcatgaatgctcatcacgaccaatccagacaaacactagccatgattcaggaaaatgttggttgctgcggagctgatggcgcaacagactacctctctcttcagcagccccttccaagtcagtgcagagacaccgttactggaaacccattcttccacggatgtgtagatgaactcacctggttcttcgaagaaaaatgtggttggatagcaggtttagctatggcgatatgcatgattaacgtccttagtattgttttatctacggtactcatccaggcattgaaaaaagaagaagaagcatccgattcatacaggagatagatttagtgagatagagatataatgtagtaattagaatttaatgtatcttcaactaaattacttttttttagagatatacctgaaattgtaaagaacaggaaaattaaataagaaccaaaaactaaagtgaaccaacaataattgaacattccaaaatacactttttttgttaagttaactaaacgacataaatttttcattttttaagttttttattgtttttttagtattataatttggataaggtgtttttatattaagtgtgtaattataaagtttttttataggacggaacctaaattatatagaatcatacaataaactattgtctgctcattgaatttggaaaataaacatttggtatattaaaaataataatatatggcttagtgaggaactaatgaaaacgtctatacatttttgaatttaataccaacagatattgtaattattaattttaattaatcaactccaagtcaacatctagaaagcaatagaaattaaagtaattgactaactaataacattctagcaacctgtacatgtggttgtattactctgttttgacattgacaaaactagctatgtgatcagttatctctagcagtaataaactctagctgtattttgttttatatatttgtccaacaaaaaaaaattttcaaccaacattcctcttgaaataaaaagactagtagcagaaaaacgaaaagccagatcaatttggcaaagaactcacagaccagacgacaggacagtttataataacaaaacaagaaacttaaaaacagctctagaacagatgagaaacaactcatttgaaaactatgtatcaaacctttcgcgtcaagataactctatctggaaaccaatcaaaaacaaaaataaaccaataaatacttcacctccaattcggaaaaacacattaccaccaggaccatgggcaaaaagcaacaaagaaaaagctgatttatttgctgaacatctaactgaagtcttcgaccaagtacaagaagtagagcaggaactagccttaccaattaatcaacgagagcgactaactttaattacaccgaaggagatcaaagatgaaattaatcatttgaatgaaaagaaggcaccaggcactgatctcataacagcaacaatgctaaaacaacttcctaaaaaaggtatcatgaagttattgtacatattaaatgcaatcttaagacttaattattggcctatatcactaaaaattgcccaagtaattatgataccgaaacctggtaaagctttaacggatgtttcatcataccgcccaataagtctactgccaataatgtcaaaacttcttgaaaagctgttacttaaaaaattatgagcgacctagaattccaaaactggatcccagaacaccaatttggattccgacaagctcattctacagtgcaacaatgccatcgcatatcaaatgtaattaatagagcattggacaataaacaatattgcacagcagcctttctggacatcagccaagcatttgataaggtatggcacccaggattactttataaaatcaaaaaatctctacacaacaaatactttgacttattaaaatcatatccaaatcacagagaatttgaaactaaagtggaggatgaactatcaaaccgtaacaaaattcaatcaggagtcccacaaggtagtatactgggtccacttctttatgtactgtacacatccgatttaccaacctttccacaaaccacaattggagctttcgctgatgacacagcaatatttgcaactgaagagaattaaacagctgcagtcttaaaacttcaagaacacctagaccaaattggacagtggttaaagaaatggaagataaaagctaatgaaactaagtcaacacatataactgtcacactaagaaaagaccaatgcccaaatattagccttaatcaagtcaacataccccaacagaatatcgtcaaatacctggggcttcatcttgattctaaataaactggaaacaacacattttaaagaagaagaaacaaactgagttgagagtgaaagaaattaattggtttataggtcgaaaatctcgactctcaattgagaacaaactgctcatttataaaacagtcatcaaacctatatggacttacggtatacaactatggagttgtgccagcaaatcaaatacaaa

SEQ ID NO: 77 - DNA, 2988 bp, Diabrotica virgifera
gtggttgcaaaccttcagcacgctaaaattgcattgtcgcaccctgattatatttgaacgaattttttaacaacaaactctatttttaagtcacaatacttaaaatcacattcgaacataaatatagatgaaaagtgatcagtgtgatgttacaaactaacattgtagaacgtcagttcagtgattaaaattgcttccaaggctaaagctcttttcacatcaacacgacagtcgtgtatacgatgacgttaaacgacatcaagggtgaaaagtatacggagctattcacactagtacgacgtgtgtcgtctaaacgacacacgacagtcgtgagatcgcgtagggaagctgtgacttcccactgcattcatccggctgtcgtgtcgttcgaacgacatcggatacaggggtgggcaaactttttttagtaagggtcacaaaatatttttggcctattaccgagggccgcaatattttttaccttaacatgttcgaatttttaactttttactaattttgtttaaggggggggcatggtttgaaatcaacatttcaagcacctttgcttgaattttgtttgaaattatggtagaattattttatttttaaattaaataaacatattcagtacaattcaaagattattaaaaaaaaatcaaggccaaatattggaaaataagccaacggtggcaaatttttacaggcagctccaaaaaaatggattttgcagtagaactcgtcaatggatcatatgaaacaaaaaattcaaaaatatgttattagcttatgagtttctcgaggtaacgctgttgagttttttagttttaacgatttttgagtttttgatatcactcaaaataccagtcaaaataaggaaatttttgtaaaaagtgtgaaaatcaacatatttattattgttaaccaaaacatatctcgatagagttacttcacgaagtgaccaaagaaaatctatgaaaaattttaggtggagctgtcaagtaggtagtttttgagttacaatgtccaccgcctttgaaaaaagcagttttgagaaaaacgcatttggtttgacaacttttatttccctttgttttttgtctgtcaaatcgtaaagtgatgtacgccggaatatgtttttgaatcgtagagtaatttataaaagagacgagaacagctgttgtacgtttctccctacgctcaggctactgcaaagcgagtcgaaggtagggatattaaacatgctttacttccggtaattttactccagtcaagctgaaaattttagagagtagtcttgaagtttatttatttatttatttatgtactttcatttaaaatataaaaaaaaatcaaacatttaaaacaaaaaaaattttcaaaccgtaaccctcccctctaaacagcattcgcatttaattaagcatggtatttccctcaaatatatgtgtatctatatatttatttatttttattttatctctgaacctatttctttttccttaatattgttctgaagctatttgcttgtaacatcttatgcaatttactattttgtttgagaatgggccacaatttaagtttgaaattaaatttatttgacgttccgatttccacttcggaaatcgttatcaaaatgcaaaacattgataaattaagcatttatttaattagtttaatttattgatgttttgtattttgataatgatttccgatgtggaaatcgaaaataaatttaataaatttaatttcaaacttaaattgttgcttgttcccaaacaaaatagtgaattctgtgttcacattgctattagttacttaaatatttgaagggaaattccgtgcttaaatagatgcaaacacgcatcatacgtaatatgccacacgcgtcattaaaatcaaaataaacaaagttataaatttgaaaaatcttagattcccttcattgtttttgttttctttgaaagaattaaataatatcaaaatatgcacgatgatttaatcctattgaacgaataattaacaatattagttataattgaaatgacgttggcgttgactacttgcaaaacatttttgcacaatacctgctcatggattaagcagtgaaaaataataactaatgttctgaaaattgttcatggacgtaatctttaagttttctcaacactacaatatttgttcctcttaaatttggtgctccgtcagttgttacacttactaggtggttacagcgttaatttaaaattttccaaacagttccagactacttccaaaaatatcgtttccatttgttgaaatttcgtggatttcattcaggcagccgacaaaactctaccggaaacccaaataattgcccgcgttatgttgaaaatttgcggaaaaatcaatcgctgcgaaagtgttattgtattagctgtgttaatagctgcattatctgtatttatttaataatattagcaataaaattaaaaaaaaattaaattaaaatatttcacttttttccgcgggccgcaaaaaaatgtataaggggccgcactttgcccacccctggatagatggtaggcaagacgaggtagtggagctgttcacatcaatccggcaggttgtgcatacgactattttattagtttagcgtacacaagtgaattgaatttgagtggttggtaatatccacattgaaatgttaataacctttgtagcctggatatgtcagaataacattttttttaaatagttaaaaaactcttcttgatcttgatttttttttcttttacggcctttgggaacttcgcccatttagccagcaacgcttcttgaaagcgacgcctcaccatacaccaagaccattacgaatccattacaaaaacaatccagggtaggagtatttgatcttgatttaaatcattaaagagtacataaaatgccccggaatattttcttagcatgttgattcgatgcatccagtgcaacatatttcttctctgtctt

SEQ ID NO: 78 - DNA, 2988 bp, Diabrotica virgifera; identical to SEQ ID NO: 77

SEQ ID NO: 79 - DNA, 2999 bp, Diabrotica virgifera
  SmartBlast Evalue=8E-52; Info=Probable RNA-directed DNA polymerase from transposon X-element n=1 Tax=Drosophila melanogaster RepID=RTXE_DROME
caatgaactttttattatagcataatattatagctggtttattttaaacctatttttatacaacggactttcggctataacggacaccccgtccgcccaattagtccgttatatcgaggttttactgtagtcacacaataggacaacttttataaaagcctatgtgtttataaacataatcctggcaatccttcaagttaaataacaccatttttaaacaagatggggaatattgacttgtaaaataaagaacatatatatgccaagagaatgtgttgtgaagttgctctaacgtttttttcaccctactgacaaaattgaagatatttttttttgaatcttcttccatgatgagcaaaataaaaaaaaacttatatagctatagatatagctttgaatatcacgcgaaaactatgttatttgaaatcacaataggtacaagcttggctttttctgcactttttccaacaaaattaagataagtattatgtatgataaggaagctaggagcaataatgttgttgaacatttttcttgggctctataaataaaaaaacatacccaacaccgctaactttttctaaaacttaaaatacatatctgatttacagtgatagtaaaataaatatagttgcaggtcacttaatataaagataatattaatttatgatgccatggcacggagagctggaaccttttaagagacactaaggaacaaagtgaaatagtttattacatcaaatgaaaaggagtaggtacaggaataacaaaaataataaaaattcgaaagttacaatatttcgggcatacaatgaggcatccagaaggtataagcttctacacctgataataccaaaatcaccggaaatagaggcccagaccgaagaaggacatcctgggttcgaaattttcgagaatggtatcaagaaacaccctgtaatatgtttcgagctaccgtagacaaagttattattggcaaacattcgataatcggacagggtactgaaagaatatgacgtcatcaatcaatactaccaacataataccaaataatttgcaaaatggtcatcttatcatcatcatcaatggtgctacagccctatgaaagagcctcgaccttcccaaatctattacgccagtcagtcctatccattgccaaccgttaccagtttactgcgcgtatttttctcccatcctcatgtacaccatccttccatctaagttttggcctacccctatttctacttcccacaggttgtgacataaggattcttctaggagggttgttatgctgtgatcttgctagatgtcctgcccatcttagtcttcctattttataagagatactacgtctttaccaccaaatatatgtttatatctgtggtatacctcgtagttgtacctcctcctccaaataccattttcacagatgccaccgaatattcctctcaggatccttcgttcaaatataagcagaaggttttcatctgccttggagatggtccatgtctccgatccatatgtcaacactggttgtataagggttttgtatatggttatttttgttttttggcttaagtttctgcttctcatatgtctactcagtccaaaatagcatttgttgctaggattatccttcgcttgatttcttcgtcataacgttctccttggtgatcagggagcctaagtatgtgaatttgtccaccacttcaacggtagagttatcaaccgtgaattggtgaccgatgtttctggcactattgttggatgttgatgctatcatcttagttttctcctcgtttactttcaggcccatattttttgaggcatttgagaaggtggtatacatttcttctagtttgcgtgttgtgcgggcaactaggtccacgtcatctgcatatgccaaaatttggtatgatttattaaaaatatttcctctgttgtctatttggtcatctataattagttattttaaagccttaatgttctacaagtaagttttgttgccaaataatgaaaatctatatatttttataataggtaattaattatttcgaatcgcaagaaaccaagatattgttttattacttattttgattaaaaacaatcaaaataaaattgcttgatttaactattttaataagaaactttttcagagagtttcagaagcttcgaattccaaaactggatcccagaacaccaatttggattccgacaagctcattctacagtgcaacaatgccatcgcatatcaaatgtaattaatagagcattggacaataaacaatattgcacagcagcctttctggacatcagccaagcatttgataaggtatggcacccaggattactttataaaatcaaaaaatctctacacaacaaatactttgacttattaaaatcatatccaaatcacagagaatttgaaactaaagtggaggatgaactatcaaaccgtaacaaaattcaatcaggagtcccacaaggtagtatactgggtccacttctttatgtactgtacacatccgatttaccaacctttccacaaaccacaattggagctttcgctgatgacacagcaatatttgcaactgaagagaattaaacagctgcagtcttaaaacttcaagaacacctagaccaaattggacagtggttaaagaaatggaagataaaagctaatgaaactaagtcaacacatataactgtcacactaagaaaagaccaatgcccaaatattagccttaatcaagtcaacataccccaacagaatatcgtcaaatacctggggcttcatcttgattctaaataaactggaaacaacacattttaaagaagaagaaacaaactgagttgagagtgaaagaaattaattggtttataggtcgaaaatctcgactctcaattgagaacaaactgctcatttataaaacagtcatcaaacctatatggacttacggtatacaactatggagttgtgccagcaaatcaaatacaaa

SEQ ID NO: 80 - DNA, 3026 bp, Diabrotica virgifera
  SmartBlast Evalue=1E-107; Info=Reverse transcriptase family member n=1 Tax=Glycine max RepID=Q1AKH8_SOYBN
ataaggtgcatgcaatgcatcactagattttagttttttttgttagtaggaactgctaatttagaattatttgctgcggtaaacttttattatctttttaggataatagggtaatttaaagacaatttaaatattgcctttaaattgttctttaacattatggttatttcgatgcgtcccctaacttttaagcatcagatccaggcatttttccgattttcaaaacaataattattttcgatatatttcatcatcatcatcatcattctctttgccttatccctatgcggggtcggcttccctaattgcatttctccacacaattctatcttgggtcatatcaatgttaatcccctttaccaacatgtcctgccttatcgtctccccccaggtcttctttggtcttcctctcctactccttccaggaatctgcacttcagctattcttcgtattgggtgattaacgtctcgacgttgaacatgaccaaaccatcttaacctatgctctctcattttggcatcaattggtgccacacctagacttcccctaatatactcatttctaattttatccttctttgtcactccactcatccatctaagcattctcatttccgccacatgcattcgttgttcctctttctttttcactgcccaacattcagttccgtacatcatagccggtcttatggctgttttatagaattttcacttcagcttcattggaatttttctgtcacacaacacaccactcgcttctttccacttcatccatccagccctaattctactgcatgcatctccatctatttctccattactctgtaataccgatcccaggtatttaaaactattgctttttacaatcagttcaccatccaaagataccattttatttgtagtaattccatctttaaataaacatttcaaatactctgtttttgtcctactaagttttaaacctttttcctccagagcttgcctccactgttccagtttttgttctaagtctctttcgctatttcctattaacacgacatcatcagcatacattaagcaccatggaatgttatcctgtagtttcgctgttatctggtccaaaactaatgagagtaaatacggactaagcacagagccttggtgcaatcctactttcacatgaaatttatcagtctctccacacctgtcctaacactagtcgttactccctcatacacatcgctcacaatctttacatattcaccagggactccttacttatttagtgcctaccacagaatctctcgaggaactctatcataagctttctcaagatcaatgaatatcatatgagcgtttgtttctttactcctgtatttttccatcaactgccttataatgaaaattgcatctgttgttgatctgacctgcataaagccaaattgattctcgccaatttcggtctctttacttatccgtctatcaattactctttccctagataatacaaatttcctctagataatacaaatatttatttaattaaaatacaaatctaagttaacatcctccttctctatcttttatccttcgtaaggatgtagtggcgtcatgtaatttgtttgactatttctgtccaattatttcactcctgtgtgtgttgttttgcttcggagaatgagtaaacagtgatgccttttatttggtacgaccatcgtactggaaatcttcctctggatctttttccctctacgttgcctttaactctcattcgttctttgcctgctcctcttctagttatatgtccaaaatatctcagtacattttggttgatagttattgtgagtctagtttttatgttaagttttgttagtattgaattattttgtgcgatgtgtggtccatggtatgcgcaacattctacggtacacctacatttcaaatgccattatacgcttcagatcggctttttttatggtccaagtttctgaagcgtaggtggcgataggaaatattaatgctcgaacaaggcttaattttgttttgtaatgtcagtgttcttccatgtttttttgaatttgactgttgccgatctcaccgttgtgatgcgtcgaaggtcttcgcatcttgccactttgtaagctaccttgcttcttatttctgtttggttgtttctgattctatcaatgatcattactttggttttcggtatatttattttcaaaccatattccgtactcaccctacctagcctgttcataatttgctccagttcttctggtgaagacgccaatataacaatatcattagcataacgtaggttttgatttttctttcccctatatttgacccactttgccattccttgccagttaatatacagatattaaaaaatttcaattgatatattggagaaaaaaaaagagtcgcaaaaaatcctcggtacaataattattttttaatgtcatagacatatgaaattataatgttatattattgttaacatttccgttgctcaaaagcaatacgcgttaaatccaaagatgcaactttcgagaaaacagcaaaaaaaacttttgttgcttcttatctgtttaagctttaagtttaagtttaagtaaactaaattaagtaaaaaaaaactacttgttacataggtactaaaggcattggtttttactttaaaagcgacttttacctgttttgcttttgaaatttggatttttgcttttatgttggattctgagcaatttgcacattattagtaaaaaatttttgttccattttaaatttgtatatagtattttgtatataaaatagtatataaaagtaaagaacgtcgtttactttatttaaaaaataaatgtcatttctattgttaatgatcatcatgacaatcattagaatcttgaaaagttagtgtttcttcacttttgtcatacacatatatagcataattaagtactatatcagacaattgtgtcaacaactcactcatgcattcaagggcgttttcttaaaactgcaaaagtatacgccagacctaa

SEQ ID NO: 81 - DNA, 7363 bp, Diabrotica virgifera
  SmartBlast Evalue=0; Info=Catenin alpha n=3 Tax=Aculeata RepID= E2A263_9HYME
attttatacaaagcacagcgtgaaatctgtgcgcggacaaaaaacttgttatcgccgatttattataatttatatttatgaagtgactgtgtcggtacttaatagctttatgtatattgtgtttgttttcatttaaattttaaatttctataccaaagatatgagccggttgaacatattcagttttttgaaaatgcttcaagcattgtgttgtgtactgggagttacatcagcatcttcagacccagttatagtctccagagaagaatggggggcccgcgctcctaaaaacatagaaaatatggcgaacccagtaccttacgtcgttatccaccacagttatctaccaccagcttgttacaatttaaccgattgtttcaaagccatgcgttggatgcaagaccttcaccaagacaccaacggttgggcggatattggctacaactttggtgttggcggagatggtagagcctacgaaggaaggggatggtccagagttggtgctcatgctccctattacaacagcaaaagtattggaatatgtataattggagattggacagttgaacttccaccagaaaatcagctagcgacagttcatgagctaatacaaaaaggagtgagagaagggtacatccagaaggactacaaattggtaggccataggcaggttagacaaggtaccgaatgtccgggtgacaggctcttcaaagagatacacaagtggcagaatttttgtgaacaaccagacgagatagcagtaaggacaaacaacacttggttccttaaaaaaactgtacatgacaatagtagggataaggaagataaagatgaagacaataatgacaatggtattaataggttagaaaaaagaactgtttagatttaagtaatacattttatttattattaaaaaaacacctatgcagttatgattcatttttgagataaacaatagggtgaatttatttttcttttagtcagatttagtaataaactaagctcgtttagtagtgtatttactaccgatttacgttttattttgtatatagctaagtctcaattaaaaatgatgactgaccgcttcggtttaaaatgggacccgaaaaacttagagataagaaccatgtctgtggaaaagacattggaacccctagtgcttcaagttaccaccctcgtcaataccaaggggcctagcaaaaagaagaaaggaaagtctaaacgtgccaatgctctggttagtactgttgaaaaagccacggaaaacttcatagaaaagggggagcagatagcctatgagaatccagatattactgaggaaatgctggcagctgttgacgaagtcaagaaaacgggacatgctatgagcggagctgcaagagaattttcagaagacccatgttcttctttaaaaagaggaaatatggttagggctgctagaaatcttttatcggctgtaactcgtcttttaattctagcggacatggttgatgtccaccttttgctcaaatccttacatgtagttgaggatgacctcgaaaaactaaaaaatgcttcaagcaatggcgaacttttagacaatattaaagcctttggtcaaaatgccaacgaattaatgaatcaggctgctaaaaggcagcaagaactgaaagatccacaacttcgtgatgatctagcagctgctagagctgtacttaagaaacattccactatgttattaactgcctctaaggtttatgtacgtcatccagagctagcagctgccaaagcaaatagagattatgtcttgaaacaagtttgtgaagctgtgaataccattaatgatgtagctcagggaagaactcctcaacctgcttctggaccatatgatggacctggagagttggctgctgctttggatgattttgatgatcacatggtaatggagcctctagcatacaatgaagttcataccaggccttcattggaagaacgtctagaaagcattataagtggtgcagctcttatggcagattctagttgtactagggatgaaagaagggaaaggatagttgcagagtgtaatgctgtaagacaagctttgcaagacttgttgactgaatatatgacaaatatgggcaataaagataaaagtgagagcctaatacgagcaatcgacaatatgggtagaaagactaaggatttaagaagacaactgagaaaagctgttgtagatcatgtatctgacagtttcttggaaaccaacgtacctcttctcgttttaataaaggcagctcaaaatggcaacgaaaaggaggtagaagaatatgcagttgtatttactgaacattccaataagttagtagaagttgctaaccttgtctgcagcatgtctaataatgaagatggtgtcaaaatggttagatatgctgctgctcagatcgacaatctgtgtcctgaagtaataaatgcagctagaattttagccgctagacctcgcagtaaagttgctcaagaaaatatggacgcattcaagcaatcatgggagaatcaagtgagacttctgactgaagcagtcgatgacattactactatcgacgactttttggctgtttctgaaaaccatattctggaagatgttaataaatgtgtacttgccttgcaagaaggtgattctgacacattggatcgcactgccagtggtataagaggaagatccaatagggtgtgcaatgtagtaacagctgaaatggataattacgaaccttgcatttataccaaacgtgttcttgaagccgtcaaagtattgaatgatcaagtgatgcccaagtttactcaaagagtgcaagttgcagttcaagctttgggaaatagtcctcccaaagaagtggatgaaaacgattttatcgatgcttctagacttgtttacgatggagtgagagaaataagaagagccgttctaatgaatagagccgatgaagatttagatccagaagatgtcgaattggatgaaaactatctaatagaaacaagaagcaaatcgagcgctcacacaggcgaacatggagttgatgagtatccagatattagtggaattacaacggctagggaagctatgggtaaaatgccggaagaagataaacagaagattttgcaacaggttgagttcttcaggagtgaaaaactcaagtttgaccgtgaggtcgctaaatgggacgacactggcaacgatattatcgttcttgctaagcacatgtgtatgattatgatggaaatgacagattttaccaggggtcgtggccctctaaaaaccactatggacgttattaatgcggctaaaaagatttccgaagctggaaccaaattagataaacttactcgccaaatagctgaacagtgcccagagagttccaccaaaaaagatttgttggcttatttgcaacgtattgctctttactgccaccagatgaacattacatcaaaggttaaagccgatgttcaaaacatcagtggagaacttattgtatctgggttggacagtgctacttctttgattcaagctgctaagaacttgatgaatgctgtagttctcacagtaaaagcttcatatgtggcatccaccaaatacccaagacaaggaactattgcatcgccgattgttgtctggaagatgaaagcgccagagaagaagccgttagtcagaccagagaaacccgaagaagttcgtgccaaagtacgcaaaggctcacaaaagaaagttcaaaatccaattcacgctctttctgaattccaaagcccaactgagtctgtgtaaacgtaaacctttatccattaatatattaaccagatgttaactattatttgcctgattattctgtgacattttctatgtacctatagattcgtattaatataaagtctgattagaggcatgttcaagttcatttaacatttgaacagtacatagtaagtccgtagtttcatcaagtgttaaatacagtgtgttctaacgaaaatatgaccccctcccagaaactgagaagccaaggagtttcttcacaatttgaaaatcacgtcaatttgtattggaagagggacgaatgttcatgcaattcatgccctcagatgtaaccccctactgccccccagttttttgaaatagcaagtgtgtcgagttgcacatcatttgaaaggtagtttttttttctctacacgaccctctatttttttaatttgcgaaataactttaaagacagttttggatttaactaatttataatacatttgttaagttcaaaattgtcttcaaacttgttatgtaaattaaaaaaaaaatagtgtcgtgtagagaaaaaaattacctttcaaatgatgtgccactcgatcacacttgctatttaaaaaaaaagtgggggttgatgcggggcagtggagggttacatttgagggcatgaagtttgcatgaaagttcgttcccctcccattataaattgacgtatttttaaaatttttaagaagctcttggtttctgagtttctggggtggtcagattttcgatggaacagactgtatatgcgaaatgcatatggcacaattaaaagtacagctgtttcgctacaatatgcaactaacatcgaaaatatttgcaagtttaaaatacatatacacctatgttttaacatactttagacctagaacttaactaggtgctgcgcagaatgaaatttcccaccgttgggccaagtgttttccatttttttagtaaagcaaaaaatccggacatttctcatatccggacgccaatccggacatgccgttcaaatccggactgtccggatgaaatccggacgtatggtaaccctaagtattcatcaactgattcatgggttttgttcttttagacttgttttttcttcttgtgaagccctttgtagtcccatcaatagtattggactatcgcgtgctattaaatttaggatgtcatatgtgtaatattctcttggtgtagttggaactcttcttagaagtttgcctcaaaaatttgtatttcttgtcagcttcacgattctagaaatggtgagtctgatttaaagatcttgttaagctaccaagattatgaatttgcacgtgatttccacaggacttccacaaagtagccagcaaactatatttctactatatttctggctagtgctttgatttcagccagggtttccccatttctttctcttcgtccagtattgcccttttccaagtttttaagtctgcatactttctgtcagccttcagaattccaatccagcactgttcttacaatgtcatctgttgtgtcaatgttgtgtacggagtgtgtggtccaggcatctcgataattttcttcgccttatttgctttatggcatttttttggttggcttgggtctccacaaattttcatttaaaattcgatgaggccaaaatatcatcatcaatggtgctacagcactatgaaagagcctcgaccttctcaagtctattacgccagtcagtcctatccattgccaactgttgccagtttgctgcgcgatttttctaccatcgtctacaccatccttccatctgagttttggcctacccctatttctacttcccacaggttgtgacataaggattcttcaaggagggttgttatgctgtgatcttgctagatgttctgcccacttagtcttcctattttataagagatactacgtctttaccaccaaatatatgtttatatctgtggtatacctcgtagttgtacctcctcctccaaataccattttcacagatgccaccgaatattcctctcaggatccttcgttcaaatataagcagaaggttttcatctgccttggagatggtccatgtctccgatccatatgtcaacatcggttgtataagggttttgtataaatatggttatttttgttttttggcttaagtttctgcttctcatatgtctactcagtccaaaatagcatttgttcgctagaattatccttcgcttgatttcttccgtcatgacgttctccttggtgatcagggagcctaagtatgtgaatttgtccaccagttcaaaggtagagttatcaacagtgaattggtgaccgatgtttctggctctattgttgggtgttgatgccaacatcttagttttctcctcgtttactttcaggcccatattttttgaggcatttgagaaggtggtatacatttcttctagtttgcgtgttgtgcgggcaactaggtccacgtcatctgcatatgccaaaatttggtatgatttattaaaaatatttcctctgttgtctatttggtcatctataattagttattttaaagccttaatgttctacaagtaagttttgttgccaaataatgaaaatctatatatttttataataggtaattaattatttcgaatcgcaagaaaccaagatattgttttattacttattttgattaaaaacaatcaaaataaaattgcttgatttaactattttaataagaaactttttcagagagtttcagaagcttcgaattccaaaactggatcccagaacaccaatttggattccgacaagctcattctacagtgcaacaatgccatcgcatatcaaatgtaattaatagagcattggacaataaacaatattgcacagcagcctttctggacatcagccaagcatttgataaggtatggcacccaggattactttataaaatcaaaaaatctctacacaacaaatactttgacttattaaaatcatatccaaatcacagagaatttgaaactaaagtggaggatgaactatcaaaccgtaacaaaattcaatcaggagtcccacaaggtagtatactgggtccacttctttatgtactgtacacatccgatttaccaacctttccacaaaccacaattggagctttcgctgatgacacagcaatatttgcaactgaagagaattaaacagctgcagtcttaaaacttcaagaacacctagaccaaattggacagtggttaaagaaatggaagataaaagctaatgaaactaagtcaacacatataactgtcacactaagaaaagaccaatgcccaaatattagccttaatcaagtcaacataccccaacagaatatcgtcaaatacctggggcttcatcttgattctaaataaactggaaacaacacattttaaagaagaagaaacaaactgagttgagagtgaaagaaattaattggtttataggtcgaaaatctcgactctcaattgagaacaaactgctcatttataaaacagtcatcaaacctatatggacttacggtatacaactatggagttgtgccagcaaatcaaatacaaa

SEQ ID NO: 82 - DNA, 3005 bp, Diabrotica virgifera
  SmartBlast Evalue=8E-52; Info=Probable RNA-directed DNA polymerase from transposon X-element n=1 Tax=Drosophila melanogaster RepID=RTXE_DROME
caatgaactttttattatagcataatattatagctggtttattttaaacctatttttatacaacggactttcggctataacggacaccccgtccgcccaattagtccgttatatcgaggttttactgtagtcacacaataggacaacttttataaaagcctatgtgtttataaacataatcctggcaatccttcaagttaaataacaccatttttaaacaagatggggaatattgacttgtaaaataaagaacatatatatgccaagagaatgtgttgtgaagttgctctaacgtttttttcaccctactgacaaaattgaagatatttttttttgaatcttcttccatgatgagcaaaataaaaaaaaacttatatagctatagatatagctttgaatatcacgcgaaaactatgttatttgaaatcacaataggtacaagcttggctttttctgcactttttccaacaaaattaagataagtattatgtatgataaggaagctaggagcaataatgttgttgaacatttttcttgggctctataaataaaaaaacatacccaacaccgctaactttttctaaaacttaaaatacatatctgatttacagtgatagtaaaataaatatagttgcaggtcacttaatataaagataatattaatttatgatgccatggcacggagagctggaaccttttaagagacactaaggaacaaagtgaaatagtttattacatcaaatgaaaaggagtaggtacaggaataacaaaaataataaaaattcgaaagttacaatatttcgggcatacaatgaggcatccagaaggtataagcttctacacctgataataccaaaatcaccggaaatagaggcccagaccgaagaaggacatcctgggttcgaaattttcgagaatggtatcaagaaacaccctgtaatatgtttcgagctaccgtagacaaagttattattggcaaacattcgataatcggacagggtactgaaagaatatgacgtcatcaatcaatactaccaacataataccaaataatttgcaaaatggtcatcttatcatcatcatcaatggtgctacagccctatgaaagagcctcgaccttcccaaatctattacgccagtcagtcctatccattgccaaccgttaccagtttactgcgcgtatttttctcccatcctcatgtacaccatccttccatctaagttttggcctacccctatttctacttcccacaggttgtgacataaggattcttctaggagggttgttatgctgtgatcttgctagatgtcctgcccatcttagtcttcctattttataagagatactacgtctttaccaccaaatatatgtttatatctgtggtatacctcgtagttgtacctcctcctccaaataccattttcacagatgccaccgaatattcctctcaggatccttcgttcaaatataagcagaaggttttcatctgccttggagatggtccatgtctccgatccatatgtcaacatcggttgtataagggttttgtataaatatggttatttttgttttttggcttaagtttctgcttctcatatgtctactcagtccaaaatagcatttgttcgctagaattatccttcgcttgatttcttccgtcatgacgttctccttggtgatcagggagcctaagtatgtgaatttgtccaccagttcaaaggtagagttatcaacagtgaattggtgaccgatgtttctggctctattgttgggtgttgatgccaacatcttagttttctcctcgtttactttcaggcccatattttttgaggcatttgagaaggtggtatacatttcttctagtttgcgtgttgtgcgggcaactaggtccacgtcatctgcatatgccaaaatttggtatgatttattaaaaatatttcctctgttgtctatttggtcatctataattagttattttaaagccttaatgttctacaagtaagttttgttgccaaataatgaaaatctatatatttttataataggtaattaattatttcgaatcgcaagaaaccaagatattgttttattacttattttgattaaaaacaatcaaaataaaattgcttgatttaactattttaataagaaactttttcagagagtttcagaagcttcgaattccaaaactggatcccagaacaccaatttggattccgacaagctcattctacagtgcaacaatgccatcgcatatcaaatgtaattaatagagcattggacaataaacaatattgcacagcagcctttctggacatcagccaagcatttgataaggtatggcacccaggattactttataaaatcaaaaaatctctacacaacaaatactttgacttattaaaatcatatccaaatcacagagaatttgaaactaaagtggaggatgaactatcaaaccgtaacaaaattcaatcaggagtcccacaaggtagtatactgggtccacttctttatgtactgtacacatccgatttaccaacctttccacaaaccacaattggagctttcgctgatgacacagcaatatttgcaactgaagagaattaaacagctgcagtcttaaaacttcaagaacacctagaccaaattggacagtggttaaagaaatggaagataaaagctaatgaaactaagtcaacacatataactgtcacactaagaaaagaccaatgcccaaatattagccttaatcaagtcaacataccccaacagaatatcgtcaaatacctggggcttcatcttgattctaaataaactggaaacaacacattttaaagaagaagaaacaaactgagttgagagtgaaagaaattaattggtttataggtcgaaaatctcgactctcaattgagaacaaactgctcatttataaaacagtcatcaaacctatatggacttacggtatacaactatggagttgtgccagcaaatcaaatacaaa

SEQ ID NO: 83 - DNA, 2949 bp, Diabrotica virgifera
  SmartBlast Evalue=8E-52; Info=Probable RNA-directed DNA polymerase from transposon X-element n=1 Tax=Drosophila melanogaster RepID=RTXE_DROME
caatgaactttttattatagcataatattatagctggtttattttaaacctatttttatacaacggactttcggctataacggacaccccgtccgcccaattagtccgttatatcgaggttttactgtagtcacacaataggacaacttttataaaagcctatgtgtttataaacataatcctggcaatccttcaagttaaataacaccatttttaaacaagatggggaatattgacttgtaaaataaagaacatatatatgccaagagaatgtgttgtgaagttgctctaacgtttttttcaccctactgacaaaattgaagatatttttttttgaatcttcttccatgatgagcaaaataaaaaaaaacttatatagctatagatatagctttgaatatcacgcgaaaactatgttatttgaaatcacaataggtacaagcttggctttttctgcactttttccaacaaaattaagataagtattatgtatgataaggaagctaggagcaataatgttgttgaacatttttcttgggctctataaataaaaaaacatacccaacaccgctaactttttctaaaacttaaaatacatatctgatttacagtgatagtaaaataaatatagttgcaggtcacttaatataaagataatattaatttatgatgccatggcacggagagctgtagtaggaggagtaggtacaggaataacaaaaataataaaaattcgaaagttacaatatttcgggcatacaatgaggcatccagaaggtataagcttctacacctgataataccaaaatcaccggaaatagaggcccagaccgaagaaggacatcctgggttcgaaattttcgagaatggtatcaagaaacaccctgtaatatgtttcgagctaccgtagacaaagttattattggcaaacattcgataatcggacagggtactgaaagaatatgacgtcatcaatcaatactaccaacataataccaaataatttgcaaaatggtcatcttatcatcatcatcaatggtgctacagccctatgaaagagcctcgaccttcccaaatctattacgccagtcagtcctatccattgccaaccgttaccagtttactgcgcgtatttttctcccatcctcatgtacaccatccttccatctaagttttggcctacccctatttctacttcccacaggttgtgacataaggattcttctaggagggttgttatgctgtgatcttgctagatgtcctgcccatcttagtcttcctattttataagagatactacgtctttaccaccaaatatatgtttatatctgtggtatacctcgtagttgtacctcctcctccaaataccattttcacagatgccaccgaatattcctctcaggatccttcgttcaaatataagcagaaggttttcatctgccttggagatggtccatgtctccgatccatatgtcaacactggttgtataagggttttgtatatggttatttttgttttttggcttaagtttctgcttctcatatgtctactcagtccaaaatagcatttgttgctaggattatccttcgcttgatttcttcgtcataacgttctccttggtgatcagggagcctaagtatgtgaatttgtccaccacttcaacggtagagttatcaaccgtgaattggtgaccgatgtttctggcactattgttggatgttgatgctatcatcttagttttctcctcgtttactttcaggcccatattttttgaggcatttgagaaggtggtatacatttcttctagtttgcgtgttgtgcgggcaactaggtccacgtcatctgcatatgccaaaatttggtatgatttattaaaaatatttcctctgttgtctatttggtcatctataattagttattttaaagccttaatgttctacaagtaagttttgttgccaaataatgaaaatctatatatttttataataggtaattaattatttcgaatcgcaagaaaccaagatattgttttattacttattttgattaaaaacaatcaaaataaaattgcttgatttaactattttaataagaaactttttcagagagtttcagaagcttcgaattccaaaactggatcccagaacaccaatttggattccgacaagctcattctacagtgcaacaatgccatcgcatatcaaatgtaattaatagagcattggacaataaacaatattgcacagcagcctttctggacatcagccaagcatttgataaggtatggcacccaggattactttataaaatcaaaaaatctctacacaacaaatactttgacttattaaaatcatatccaaatcacagagaatttgaaactaaagtggaggatgaactatcaaaccgtaacaaaattcaatcaggagtcccacaaggtagtatactgggtccacttctttatgtactgtacacatccgatttaccaacctttccacaaaccacaattggagctttcgctgatgacacagcaatatttgcaactgaagagaattaaacagctgcagtcttaaaacttcaagaacacctagaccaaattggacagtggttaaagaaatggaagataaaagctaatgaaactaagtcaacacatataactgtcacactaagaaaagaccaatgcccaaatattagccttaatcaagtcaacataccccaacagaatatcgtcaaatacctggggcttcatcttgattctaaataaactggaaacaacacattttaaagaagaagaaacaaactgagttgagagtgaaagaaattaattggtttataggtcgaaaatctcgactctcaattgagaacaaactgctcatttataaaacagtcatcaaacctatatggacttacggtatacaactatggagttgtgccagcaaatcaaatacaaa

SEQ ID NO: 84 - DNA, 2955 bp, Diabrotica virgifera
  SmartBlast Evalue=8E-52; Info=Probable RNA-directed DNA polymerase from transposon X-element n=1 Tax=Drosophila melanogaster RepID=RTXE_DROME
caatgaactttttattatagcataatattatagctggtttattttaaacctatttttatacaacggactttcggctataacggacaccccgtccgcccaattagtccgttatatcgaggttttactgtagtcacacaataggacaacttttataaaagcctatgtgtttataaacataatcctggcaatccttcaagttaaataacaccatttttaaacaagatggggaatattgacttgtaaaataaagaacatatatatgccaagagaatgtgttgtgaagttgctctaacgtttttttcaccctactgacaaaattgaagatatttttttttgaatcttcttccatgatgagcaaaataaaaaaaaacttatatagctatagatatagctttgaatatcacgcgaaaactatgttatttgaaatcacaataggtacaagcttggctttttctgcactttttccaacaaaattaagataagtattatgtatgataaggaagctaggagcaataatgttgttgaacatttttcttgggctctataaataaaaaaacatacccaacaccgctaactttttctaaaacttaaaatacatatctgatttacagtgatagtaaaataaatatagttgcaggtcacttaatataaagataatattaatttatgatgccatggcacggagagctgtagtaggaggagtaggtacaggaataacaaaaataataaaaattcgaaagttacaatatttcgggcatacaatgaggcatccagaaggtataagcttctacacctgataataccaaaatcaccggaaatagaggcccagaccgaagaaggacatcctgggttcgaaattttcgagaatggtatcaagaaacaccctgtaatatgtttcgagctaccgtagacaaagttattattggcaaacattcgataatcggacagggtactgaaagaatatgacgtcatcaatcaatactaccaacataataccaaataatttgcaaaatggtcatcttatcatcatcatcaatggtgctacagccctatgaaagagcctcgaccttcccaaatctattacgccagtcagtcctatccattgccaaccgttaccagtttactgcgcgtatttttctcccatcctcatgtacaccatccttccatctaagttttggcctacccctatttctacttcccacaggttgtgacataaggattcttctaggagggttgttatgctgtgatcttgctagatgtcctgcccatcttagtcttcctattttataagagatactacgtctttaccaccaaatatatgtttatatctgtggtatacctcgtagttgtacctcctcctccaaataccattttcacagatgccaccgaatattcctctcaggatccttcgttcaaatataagcagaaggttttcatctgccttggagatggtccatgtctccgatccatatgtcaacatcggttgtataagggttttgtataaatatggttatttttgttttttggcttaagtttctgcttctcatatgtctactcagtccaaaatagcatttgttcgctagaattatccttcgcttgatttcttccgtcatgacgttctccttggtgatcagggagcctaagtatgtgaatttgtccaccagttcaaaggtagagttatcaacagtgaattggtgaccgatgtttctggctctattgttgggtgttgatgccaacatcttagttttctcctcgtttactttcaggcccatattttttgaggcatttgagaaggtggtatacatttcttctagtttgcgtgttgtgcgggcaactaggtccacgtcatctgcatatgccaaaatttggtatgatttattaaaaatatttcctctgttgtctatttggtcatctataattagttattttaaagccttaatgttctacaagtaagttttgttgccaaataatgaaaatctatatatttttataataggtaattaattatttcgaatcgcaagaaaccaagatattgttttattacttattttgattaaaaacaatcaaaataaaattgcttgatttaactattttaataagaaactttttcagagagtttcagaagcttcgaattccaaaactggatcccagaacaccaatttggattccgacaagctcattctacagtgcaacaatgccatcgcatatcaaatgtaattaatagagcattggacaataaacaatattgcacagcagcctttctggacatcagccaagcatttgataaggtatggcacccaggattactttataaaatcaaaaaatctctacacaacaaatactttgacttattaaaatcatatccaaatcacagagaatttgaaactaaagtggaggatgaactatcaaaccgtaacaaaattcaatcaggagtcccacaaggtagtatactgggtccacttctttatgtactgtacacatccgatttaccaacctttccacaaaccacaattggagctttcgctgatgacacagcaatatttgcaactgaagagaattaaacagctgcagtcttaaaacttcaagaacacctagaccaaattggacagtggttaaagaaatggaagataaaagctaatgaaactaagtcaacacatataactgtcacactaagaaaagaccaatgcccaaatattagccttaatcaagtcaacataccccaacagaatatcgtcaaatacctggggcttcatcttgattctaaataaactggaaacaacacattttaaagaagaagaaacaaactgagttgagagtgaaagaaattaattggtttataggtcgaaaatctcgactctcaattgagaacaaactgctcatttataaaacagtcatcaaacctatatggacttacggtatacaactatggagttgtgccagcaaatcaaatacaaa

SEQ ID NO: 85 - DNA, 2659 bp, Diabrotica virgifera
  SmartBlast Evalue=6E-64; Info=Reverse transcriptase family member n=1 Tax=Glycine max RepID=Q1AKH8_SOYBN
atcatcatcattctctttgcttatccctatgcggggtcggcttccctaattgcatttctccacacaattatattttgggtcatatcaatgttaatcccctttaccaacatgtcctgcttatcgtctccccccaggtcttctttggtcttcctctcctactctttccagaaacctgcacttcagctattcttcatattgggtgattaagtctcgacgttgaacatgaccaaaccatcttaacctatgctctctcattttggcatcaattggtgccacacctagacttcccctaatatactcatttctaattttatccttctttgtcactccactcatccatctaagcattctcatttccgccacatgcattcgttgttcctctttctttttcactgcccaacattcagttccgtacatcatagccggtcttatggctgttttatagaattttcccttcagcttcattggaatttttctgtcacacaacacaccactcgcttctttccacttcatccatccagccctaattctactgcatgcatctccatctatttctccattactctgtaataccgatcctaggtacttaaaactattgcttttcacaatcatttcaccatccaaagataccattttatttgtagtagctccatctttaaatgaacattccaaatactctgtttttgtcctactaagttttaaacctttttcctccagagcttgtctccactgttccagtttttgttctaaacttctttccctatttcctattaacactttcccaagtctattacaccagtcagtcctatccattgccaaccgttgccagtttgctgcgcctatttttctcccatcctcatctacaccatccttccatctaagttttggcctacccgtatttctacttcccacaggttgtgacataaggattcttctaggagggttgttatgctgtgatcttgctagatgtcctgcccatcttagtcttcctattttataagagatactacgtctttaccaccaaatatatgtttatatctgtggtatacctcgtagttgtacctcctcctccaaataccattttcacagatgccaccgaatattcctctcaggatccttcgttcaaatataagcagaaggttttcatctgccttggagatggtccatgtctccgatccatatgtcaacactggttgtataagggttttgtatatggttatttttgttttttggcttaagtttctgcttctcatatgtctactcagtccaaaatagcatttgttgctaggattatccttcgcttgatttcttcgtcataacgttctccttggtgatcagggagcctaagtatgtgaatttgtccaccacttcaacggtagagttatcaaccgtgaattggtgaccgatgtttctggcactattgttggatgttgatgctatcatcttagttttctcctcgtttactttcaggcccatattttttgaggcatttgagaaggtggtatacatttcttctagtttgcgtgttgtgcgggcaactaggtccacgtcatctgcatatgccaaaatttggtatgatttattaaaaatatttcctctgttgtctatttggtcatctataattagttattttaaagccttaatgttctacaagtaagttttgttgccaaataatgaaaatctatatatttttataataggtaattaattatttcgaatcgcaagaaaccaagatattgttttattacttattttgattaaaaacaatcaaaataaaattgcttgatttaactattttaataagaaactttttcagagagtttcagaagcttcgaattccaaaactggatcccagaacaccaatttggattccgacaagctcattctacagtgcaacaatgccatcgcatatcaaatgtaattaatagagcattggacaataaacaatattgcacagcagcctttctggacatcagccaagcatttgataaggtatggcacccaggattactttataaaatcaaaaaatctctacacaacaaatactttgacttattaaaatcatatccaaatcacagagaatttgaaactaaagtggaggatgaactatcaaaccgtaacaaaattcaatcaggagtcccacaaggtagtatactgggtccacttctttatgtactgtacacatccgatttaccaacctttccacaaaccacaattggagctttcgctgatgacacagcaatatttgcaactgaagagaattaaacagctgcagtcttaaaacttcaagaacacctagaccaaattggacagtggttaaagaaatggaagataaaagctaatgaaactaagtcaacacatataactgtcacactaagaaaagaccaatgcccaaatattagccttaatcaagtcaacataccccaacagaatatcgtcaaatacctggggcttcatcttgattctaaataaactggaaacaacacattttaaagaagaagaaacaaactgagttgagagtgaaagaaattaattggtttataggtcgaaaatctcgactctcaattgagaacaaactgctcatttataaaacagtcatcaaacctatatggacttacggtatacaactatggagttgtgccagcaaatcaaatacaaa

SEQ ID NO: 86 - DNA, 2665 bp, Diabrotica virgifera
  SmartBlast Evalue=6E-64; Info=Reverse transcriptase family member n=1 Tax=Glycine max RepID=Q1AKH8_SOYBN
atcatcatcattctctttgcttatccctatgcggggtcggcttccctaattgcatttctccacacaattatattttgggtcatatcaatgttaatcccctttaccaacatgtcctgcttatcgtctccccccaggtcttctttggtcttcctctcctactctttccagaaacctgcacttcagctattcttcatattgggtgattaagtctcgacgttgaacatgaccaaaccatcttaacctatgctctctcattttggcatcaattggtgccacacctagacttcccctaatatactcatttctaattttatccttctttgtcactccactcatccatctaagcattctcatttccgccacatgcattcgttgttcctctttctttttcactgcccaacattcagttccgtacatcatagccggtcttatggctgttttatagaattttcccttcagcttcattggaatttttctgtcacacaacacaccactcgcttctttccacttcatccatccagccctaattctactgcatgcatctccatctatttctccattactctgtaataccgatcctaggtacttaaaactattgcttttcacaatcatttcaccatccaaagataccattttatttgtagtagctccatctttaaatgaacattccaaatactctgtttttgtcctactaagttttaaacctttttcctccagagcttgtctccactgttccagtttttgttctaaacttctttccctatttcctattaacactttcccaagtctattacaccagtcagtcctatccattgccaaccgttgccagtttgctgcgcctatttttctcccatcctcatctacaccatccttccatctaagttttggcctacccgtatttctacttcccacaggttgtgacataaggattcttctaggagggttgttatgctgtgatcttgctagatgtcctgcccatcttagtcttcctattttataagagatactacgtctttaccaccaaatatatgtttatatctgtggtatacctcgtagttgtacctcctcctccaaataccattttcacagatgccaccgaatattcctctcaggatccttcgttcaaatataagcagaaggttttcatctgccttggagatggtccatgtctccgatccatatgtcaacatcggttgtataagggttttgtataaatatggttatttttgttttttggcttaagtttctgcttctcatatgtctactcagtccaaaatagcatttgttcgctagaattatccttcgcttgatttcttccgtcatgacgttctccttggtgatcagggagcctaagtatgtgaatttgtccaccagttcaaaggtagagttatcaacagtgaattggtgaccgatgtttctggctctattgttgggtgttgatgccaacatcttagttttctcctcgtttactttcaggcccatattttttgaggcatttgagaaggtggtatacatttcttctagtttgcgtgttgtgcgggcaactaggtccacgtcatctgcatatgccaaaatttggtatgatttattaaaaatatttcctctgttgtctatttggtcatctataattagttattttaaagccttaatgttctacaagtaagttttgttgccaaataatgaaaatctatatatttttataataggtaattaattatttcgaatcgcaagaaaccaagatattgttttattacttattttgattaaaaacaatcaaaataaaattgcttgatttaactattttaataagaaactttttcagagagtttcagaagcttcgaattccaaaactggatcccagaacaccaatttggattccgacaagctcattctacagtgcaacaatgccatcgcatatcaaatgtaattaatagagcattggacaataaacaatattgcacagcagcctttctggacatcagccaagcatttgataaggtatggcacccaggattactttataaaatcaaaaaatctctacacaacaaatactttgacttattaaaatcatatccaaatcacagagaatttgaaactaaagtggaggatgaactatcaaaccgtaacaaaattcaatcaggagtcccacaaggtagtatactgggtccacttctttatgtactgtacacatccgatttaccaacctttccacaaaccacaattggagctttcgctgatgacacagcaatatttgcaactgaagagaattaaacagctgcagtcttaaaacttcaagaacacctagaccaaattggacagtggttaaagaaatggaagataaaagctaatgaaactaagtcaacacatataactgtcacactaagaaaagaccaatgcccaaatattagccttaatcaagtcaacataccccaacagaatatcgtcaaatacctggggcttcatcttgattctaaataaactggaaacaacacattttaaagaagaagaaacaaactgagttgagagtgaaagaaattaattggtttataggtcgaaaatctcgactctcaattgagaacaaactgctcatttataaaacagtcatcaaacctatatggacttacggtatacaactatggagttgtgccagcaaatcaaatacaaa

SEQ ID NO: 87 - DNA, 2595 bp, Diabrotica virgifera
  SmartBlast Evalue=4E-66; Info=Reverse transcriptase family member n=1 Tax=Glycine max RepID=Q1AKH8_SOYBN
aattctatcttgggtcatatcaatgttaatcccctttaccaacatgtcctgccttatcgtctccccccaggtcttctttggtcttcctctcctactccttccaggaatctgcacttcagctattcttcgtattgggtgattaagtctcgacgttgaacatgaccaaaccatcttaacctatgctctctcattttggcatcaattggtgccacacctagacttcccctaatatactcatttctaattttatccttctttgtcactccactcatccatctaagcattctcatttccgccacatgcattcgttgttcctctttctttttcactgcccaacattcagttccgtacatcatagccggtcttatggctgttttatagaattttcccttcagcttcattggaatttttctgtcacacaacacaccactcgcttctttccacttcatccatccagccctaattctactgcatgcatctccatctatttctccattactctgtaataccgatcctaggtacttaaaactattgcttttcacaatcatttcaccatccaaagataccattttatttgtagtagctccatctttaaatgaacattccaaatactctgtttttgtcctactaagttttaaacctttttcctccagagcttgtctccactgttccagtttttgttctaaacttctttccctatttcctattaacactttcccaagtctattacaccagtcagtcctatccattgccaaccgttgccagtttgctgcgcctatttttctcccatcctcatctacaccatccttccatctaagttttggcctacccgtatttctacttcccacaggttgtgacataaggattcttctaggagggttgttatgctgtgatcttgctagatgtcctgcccatcttagtcttcctattttataagagatactacgtctttaccaccaaatatatgtttatatctgtggtatacctcgtagttgtacctcctcctccaaataccattttcacagatgccaccgaatattcctctcaggatccttcgttcaaatataagcagaaggttttcatctgccttggagatggtccatgtctccgatccatatgtcaacactggttgtataagggttttgtatatggttatttttgttttttggcttaagtttctgcttctcatatgtctactcagtccaaaatagcatttgttgctaggattatccttcgcttgatttcttcgtcataacgttctccttggtgatcagggagcctaagtatgtgaatttgtccaccacttcaacggtagagttatcaaccgtgaattggtgaccgatgtttctggcactattgttggatgttgatgctatcatcttagttttctcctcgtttactttcaggcccatattttttgaggcatttgagaaggtggtatacatttcttctagtttgcgtgttgtgcgggcaactaggtccacgtcatctgcatatgccaaaatttggtatgatttattaaaaatatttcctctgttgtctatttggtcatctataattagttattttaaagccttaatgttctacaagtaagttttgttgccaaataatgaaaatctatatatttttataataggtaattaattatttcgaatcgcaagaaaccaagatattgttttattacttattttgattaaaaacaatcaaaataaaattgcttgatttaactattttaataagaaactttttcagagagtttcagaagcttcgaattccaaaactggatcccagaacaccaatttggattccgacaagctcattctacagtgcaacaatgccatcgcatatcaaatgtaattaatagagcattggacaataaacaatattgcacagcagcctttctggacatcagccaagcatttgataaggtatggcacccaggattactttataaaatcaaaaaatctctacacaacaaatactttgacttattaaaatcatatccaaatcacagagaatttgaaactaaagtggaggatgaactatcaaaccgtaacaaaattcaatcaggagtcccacaaggtagtatactgggtccacttctttatgtactgtacacatccgatttaccaacctttccacaaaccacaattggagctttcgctgatgacacagcaatatttgcaactgaagagaattaaacagctgcagtcttaaaacttcaagaacacctagaccaaattggacagtggttaaagaaatggaagataaaagctaatgaaactaagtcaacacatataactgtcacactaagaaaagaccaatgcccaaatattagccttaatcaagtcaacataccccaacagaatatcgtcaaatacctggggcttcatcttgattctaaataaactggaaacaacacattttaaagaagaagaaacaaactgagttgagagtgaaagaaattaattggtttataggtcgaaaatctcgactctcaattgagaacaaactgctcatttataaaacagtcatcaaacctatatggacttacggtatacaactatggagttgtgccagcaaatcaaatacaaa

SEQ ID NO: 88 - DNA, 2601 bp, Diabrotica virgifera
  SmartBlast Evalue=4E-66; Info=Reverse transcriptase family member n=1 Tax=Glycine max RepID=Q1AKH8_SOYBN
aattctatcttgggtcatatcaatgttaatcccctttaccaacatgtcctgccttatcgtctccccccaggtcttctttggtcttcctctcctactccttccaggaatctgcacttcagctattcttcgtattgggtgattaagtctcgacgttgaacatgaccaaaccatcttaacctatgctctctcattttggcatcaattggtgccacacctagacttcccctaatatactcatttctaattttatccttctttgtcactccactcatccatctaagcattctcatttccgccacatgcattcgttgttcctctttctttttcactgcccaacattcagttccgtacatcatagccggtcttatggctgttttatagaattttcccttcagcttcattggaatttttctgtcacacaacacaccactcgcttctttccacttcatccatccagccctaattctactgcatgcatctccatctatttctccattactctgtaataccgatcctaggtacttaaaactattgcttttcacaatcatttcaccatccaaagataccattttatttgtagtagctccatctttaaatgaacattccaaatactctgtttttgtcctactaagttttaaacctttttcctccagagcttgtctccactgttccagtttttgttctaaacttctttccctatttcctattaacactttcccaagtctattacaccagtcagtcctatccattgccaaccgttgccagtttgctgcgcctatttttctcccatcctcatctacaccatccttccatctaagttttggcctacccgtatttctacttcccacaggttgtgacataaggattcttctaggagggttgttatgctgtgatcttgctagatgtcctgcccatcttagtcttcctattttataagagatactacgtctttaccaccaaatatatgtttatatctgtggtatacctcgtagttgtacctcctcctccaaataccattttcacagatgccaccgaatattcctctcaggatccttcgttcaaatataagcagaaggttttcatctgccttggagatggtccatgtctccgatccatatgtcaacatcggttgtataagggttttgtataaatatggttatttttgttttttggcttaagtttctgcttctcatatgtctactcagtccaaaatagcatttgttcgctagaattatccttcgcttgatttcttccgtcatgacgttctccttggtgatcagggagcctaagtatgtgaatttgtccaccagttcaaaggtagagttatcaacagtgaattggtgaccgatgtttctggctctattgttgggtgttgatgccaacatcttagttttctcctcgtttactttcaggcccatattttttgaggcatttgagaaggtggtatacatttcttctagtttgcgtgttgtgcgggcaactaggtccacgtcatctgcatatgccaaaatttggtatgatttattaaaaatatttcctctgttgtctatttggtcatctataattagttattttaaagccttaatgttctacaagtaagttttgttgccaaataatgaaaatctatatatttttataataggtaattaattatttcgaatcgcaagaaaccaagatattgttttattacttattttgattaaaaacaatcaaaataaaattgcttgatttaactattttaataagaaactttttcagagagtttcagaagcttcgaattccaaaactggatcccagaacaccaatttggattccgacaagctcattctacagtgcaacaatgccatcgcatatcaaatgtaattaatagagcattggacaataaacaatattgcacagcagcctttctggacatcagccaagcatttgataaggtatggcacccaggattactttataaaatcaaaaaatctctacacaacaaatactttgacttattaaaatcatatccaaatcacagagaatttgaaactaaagtggaggatgaactatcaaaccgtaacaaaattcaatcaggagtcccacaaggtagtatactgggtccacttctttatgtactgtacacatccgatttaccaacctttccacaaaccacaattggagctttcgctgatgacacagcaatatttgcaactgaagagaattaaacagctgcagtcttaaaacttcaagaacacctagaccaaattggacagtggttaaagaaatggaagataaaagctaatgaaactaagtcaacacatataactgtcacactaagaaaagaccaatgcccaaatattagccttaatcaagtcaacataccccaacagaatatcgtcaaatacctggggcttcatcttgattctaaataaactggaaacaacacattttaaagaagaagaaacaaactgagttgagagtgaaagaaattaattggtttataggtcgaaaatctcgactctcaattgagaacaaactgctcatttataaaacagtcatcaaacctatatggacttacggtatacaactatggagttgtgccagcaaatcaaatacaaa

SEQ ID NO: 89 - DNA, 2336 bp, Diabrotica virgifera
  SmartBlast Evalue=1E-151; Info=Endonuclease-reverse transcriptase HmRTE-e01 n=1 Tax=Heliconius melpomene RepID= C6Y4D5_9NEOP
ataaggtgcatgcaatgcatcactagattttagttttttttgttagtaggaactgctaatttagaattatttgctgcggtaaacttttattatctttttaggataatagggtaatttaaagacaatttaaatattgcctttaaattgttctttaacattatggttatttcgatgcgtcccctaacttttaagcatcagatccaggcatttttccgattttcaaaacaataattattttcgatatatttcatcatcatcatcatcattctctttgccttatccctatgcggggtcggcttccctaattgcatttctccacacaattctatcttgggtcatatcaatgttaatcccctttaccaacatgtcctgccttatcgtctccccccaggtcttctttggtcttcctctcctactccttccaggaatctgcacttcagctattcttcgtattgggtgattaacgtctcgacgttgaacatgaccaaaccatcttaacctatgctctctcattttggcatcaattggtgccacacctagacttcccctaatatactcatttctaattttatccttctttgtcactccactcatccatctaagcattctcatttccgccacatgcattcgttgttcctctttctttttcactgcccaacattcagttccgtacatcatagccggtcttatggctgttttatagaattttcccttcagcttcattggaatttttctgtcacacaacacaccactcgcttctttccacttcatccatccagccctaattctactgcatgcatctccatctatttctccattactctgtaataccgatcctaggtacttaaaactattgcttttcacaatcatttcaccatccaaagataccattttatttgtagtagctccatctttaaatgaacattccaaatactctgtttttgtcctactaagttttaaacctttttcctccagagcttgtctccactgttccagtttttgttctaagtctctttcactatttcctactaacacgacatcatcagcatacattaagcaccatggaatgttaccctgtagtttcgctgttatctggtccaaaactaatgagaataaatacggactaagcacagagccttggtgcaatcctactttcacatgaaatttatcagtctctcccacacctgtcctaacactagtcgttactccctcatacatatccctcacaatctttacatattcaccagggactcctttcttattgagtgcccaccacagaatctctcgaggaactctatcatatgctttctcaagatcaatgaataccatatgagcgtttgtttctttactcctgtatttttccatcaactgccttataatgaaaattgcatctgttgttgatctaccctgcataaagccaaattgattctcggatatttcggtctcttcacgtatccgtctatcaattactctttcccatattttcatggtgtggctaagcagttttatagccctgtagtttgtacattgttgtatatctcccttgtttttgtaaacaggtaccagtatactgcttctccattcgtctggcatttgtccaacttccataattctattaaatagacctgctagccaccttgttcctgtctctcccaatgctctccatacttccccaggaatatcatctggtcctaccgcttttcctttctttattttttgaagcgcttgagccacttcctcgttggttattttggtgaccattgctgctactgtctccgttgactctacaggctgtctgtcaaattcttcatttaataagctgtcaaagtactttctccatctctttttgacatccctttcgtgatgccatcatttcaggagatgccatcatttcagtataagtttttatttcgtttggagaaggtcttttcattattatggcctgaaaagatttttggatatttgatgcctgaatgccttttctatcagcaccataccctgccctgtcctgcacgtttagccaatacaccaccaatgcaaccaaagtgcagtattaccccacacccgcctgcatttttctgtataggccaggatccctactgtaaggactgccctataagccaatgtattgttgcccgtatcccgccactaggaggcacgtacttcattcgggatacaatttcagtattttataaatgctagaatgttccacacggtgatgtgagctttgagaaaaaaaaacactttttaattcgtacatccggtatacaatgaggatgtacctatttggcagcaatattattacagcgatattgttaaggaatgaggctacggca

SEQ ID NO: 90 - DNA, 2768 bp, Diabrotica virgifera
  SmartBlast Evalue=6E-96; Info=Reverse transcriptase family member n=1 Tax=Glycine max RepID=Q1AKH8_SOYBN
atcatcatcattctctttgcttatccctatgcggggtcggcttccctaattgcatttctccacacaattatattttgggtcatatcaatgttaatcccctttaccaacatgtcctgcttatcgtctccccccaggtcttctttggtcttcctctcctactctttccagaaacctgcacttcagctattcttcatattgggtgattaagtctcgacgttgaacatgaccaaaccatcttaacctatgctctctcattttggcatcaattggtgccacacctagacttcccctaatatactcatttctaattttatccttctttgtcactccactcatccatctaagcattctcatttccgccacatgcattcgttgttcctctttctttttcactgcccaacattcagttccgtacatcatagccggtcttatggctgttttatagaattttcacttcagcttcattggaatttttctgtcacacaacacaccactcgcttctttccacttcatccatccagccctaattctactgcatgcatctccatctatttctccattactctgtaataccgatcccaggtatttaaaactattgctttttacaatcagttcaccatccaaagataccattttatttgtagtaattccatctttaaataaacatttcaaatactctgtttttgtcctactaagttttaaacctttttcctccagagcttgcctccactgttccagtttttgttctaagtctctttcgctatttcctattaacacgacatcatcagcatacattaagcaccatggaatgttatcctgtagtttcgctgttatctggtccaaaactaatgagagtaaatacggactaagcacagagccttggtgcaatcctactttcacatgaaatttatcagtctctccacacctgtcctaacactagtcgttactccctcatacacatcgctcacaatctttacatattcaccagggactccttacttatttagtgcctaccacagaatctctcgaggaactctatcataagctttctcaagatcaatgaatatcatatgagcgtttgtttctttactcctgtatttttccatcaactgccttataatgaaaattgcatctgttgttgatctgacctgcataaagccaaattgattctcgccaatttcggtctctttacttatccgtctatcaattactctttccctagataatacaaatttcctctagataatacaaatatttatttaattaaaatacaaatctaagttaacatcctccttctctatcttttatccttcgtaaggatgtagtggcgtcatgtaatttgtttgactatttctgtccaattatttcactcctgtgtgtgttgttttgcttcggagaatgagtaaacagtgatgccttttatttggtacgaccatcgtactggaaatcttcctctggatctttttccctctacgttgcctttaactctcattcgttctttgcctgctcctcttctagttatatgtccaaaatatctcagtacattttggttgatagttattgtgagtctagtttttatgttaagttttgttagtattgaattattttgtgcgatgtgtggtccatggtatgcgcaacattctacggtacacctacatttcaaatgccattatacgcttcagatcggctttttttatggtccaagtttctgaagcgtaggtggcgataggaaatattaatgctcgaacaaggcttaattttgttttgtaatgtcagtgttcttccatgtttttttgaatttgactgttgccgatctcaccgttgtgatgcgtcgaaggtcttcgcatcttgccactttgtaagctaccttgcttcttatttctgtttggttgtttctgattctatcaatgatcattactttggttttcggtatatttattttcaaaccatattccgtactcaccctacctagcctgttcataatttgctccagttcttctggtgaagacgccaatataacaatatcattagcataacgtaggttttgatttttctttcccctatatttgacccactttgccattccttgccagttaatatacagatattaaaaaatttcaattgatatattggagaaaaaaaaagagtcgcaaaaaatcctcggtacaataattattttttaatgtcatagacatatgaaattataatgttatattattgttaacatttccgttgctcaaaagcaatacgcgttaaatccaaagatgcaactttcgagaaaacagcaaaaaaaacttttgttgcttcttatctgtttaagctttaagtttaagtttaagtaaactaaattaagtaaaaaaaaactacttgttacataggtactaaaggcattggtttttactttaaaagcgacttttacctgttttgcttttgaaatttggatttttgcttttatgttggattctgagcaatttgcacattattagtaaaaaatttttgttccattttaaatttgtatatagtattttgtatataaaatagtatataaaagtaaagaacgtcgtttactttatttaaaaaataaatgtcatttctattgttaatgatcatcatgacaatcattagaatcttgaaaagttagtgtttcttcacttttgtcatacacatatatagcataattaagtactatatcagacaattgtgtcaacaactcactcatgcattcaagggcgttttcttaaaactgcaaaagtatacgccagacctaa

SEQ ID NO: 91 - DNA, 2704 bp, Diabrotica virgifera
  SmartBlast Evalue=7E-98; Info=Reverse transcriptase family member n=1 Tax=Glycine max RepID=Q1AKH8_SOYBN
aattctatcttgggtcatatcaatgttaatcccctttaccaacatgtcctgccttatcgtctccccccaggtcttctttggtcttcctctcctactccttccaggaatctgcacttcagctattcttcgtattgggtgattaagtctcgacgttgaacatgaccaaaccatcttaacctatgctctctcattttggcatcaattggtgccacacctagacttcccctaatatactcatttctaattttatccttctttgtcactccactcatccatctaagcattctcatttccgccacatgcattcgttgttcctctttctttttcactgcccaacattcagttccgtacatcatagccggtcttatggctgttttatagaattttcacttcagcttcattggaatttttctgtcacacaacacaccactcgcttctttccacttcatccatccagccctaattctactgcatgcatctccatctatttctccattactctgtaataccgatcccaggtatttaaaactattgctttttacaatcagttcaccatccaaagataccattttatttgtagtaattccatctttaaataaacatttcaaatactctgtttttgtcctactaagttttaaacctttttcctccagagcttgcctccactgttccagtttttgttctaagtctctttcgctatttcctattaacacgacatcatcagcatacattaagcaccatggaatgttatcctgtagtttcgctgttatctggtccaaaactaatgagagtaaatacggactaagcacagagccttggtgcaatcctactttcacatgaaatttatcagtctctccacacctgtcctaacactagtcgttactccctcatacacatcgctcacaatctttacatattcaccagggactccttacttatttagtgcctaccacagaatctctcgaggaactctatcataagctttctcaagatcaatgaatatcatatgagcgtttgtttctttactcctgtatttttccatcaactgccttataatgaaaattgcatctgttgttgatctgacctgcataaagccaaattgattctcgccaatttcggtctctttacttatccgtctatcaattactctttccctagataatacaaatttcctctagataatacaaatatttatttaattaaaatacaaatctaagttaacatcctccttctctatcttttatccttcgtaaggatgtagtggcgtcatgtaatttgtttgactatttctgtccaattatttcactcctgtgtgtgttgttttgcttcggagaatgagtaaacagtgatgccttttatttggtacgaccatcgtactggaaatcttcctctggatctttttccctctacgttgcctttaactctcattcgttctttgcctgctcctcttctagttatatgtccaaaatatctcagtacattttggttgatagttattgtgagtctagtttttatgttaagttttgttagtattgaattattttgtgcgatgtgtggtccatggtatgcgcaacattctacggtacacctacatttcaaatgccattatacgcttcagatcggctttttttatggtccaagtttctgaagcgtaggtggcgataggaaatattaatgctcgaacaaggcttaattttgttttgtaatgtcagtgttcttccatgtttttttgaatttgactgttgccgatctcaccgttgtgatgcgtcgaaggtcttcgcatcttgccactttgtaagctaccttgcttcttatttctgtttggttgtttctgattctatcaatgatcattactttggttttcggtatatttattttcaaaccatattccgtactcaccctacctagcctgttcataatttgctccagttcttctggtgaagacgccaatataacaatatcattagcataacgtaggttttgatttttctttcccctatatttgacccactttgccattccttgccagttaatatacagatattaaaaaatttcaattgatatattggagaaaaaaaaagagtcgcaaaaaatcctcggtacaataattattttttaatgtcatagacatatgaaattataatgttatattattgttaacatttccgttgctcaaaagcaatacgcgttaaatccaaagatgcaactttcgagaaaacagcaaaaaaaacttttgttgcttcttatctgtttaagctttaagtttaagtttaagtaaactaaattaagtaaaaaaaaactacttgttacataggtactaaaggcattggtttttactttaaaagcgacttttacctgttttgcttttgaaatttggatttttgcttttatgttggattctgagcaatttgcacattattagtaaaaaatttttgttccattttaaatttgtatatagtattttgtatataaaatagtatataaaagtaaagaacgtcgtttactttatttaaaaaataaatgtcatttctattgttaatgatcatcatgacaatcattagaatcttgaaaagttagtgtttcttcacttttgtcatacacatatatagcataattaagtactatatcagacaattgtgtcaacaactcactcatgcattcaagggcgttttcttaaaactgcaaaagtatacgccagacctaa

SEQ ID NO: 92 - DNA, 6265 bp, Diabrotica virgifera
  SmartBlast Evalue=0; Info=Catenin alpha n=3 Tax=Aculeata RepID= E2A263_9HYME
attttatacaaagcacagcgtgaaatctgtgcgcggacaaaaaacttgttatcgccgatttattataatttatatttatgaagtgactgtgtcggtacttaatagctttatgtatattgtgtttgttttcatttaaattttaaatttctataccaaagatatgagccggttgaacatattcagttttttgaaaatgcttcaagcattgtgttgtgtactgggagttacatcagcatcttcagacccagttatagtctccagagaagaatggggggcccgcgctcctaaaaacatagaaaatatggcgaacccagtaccttacgtcgttatccaccacagttatctaccaccagcttgttacaatttaaccgattgtttcaaagccatgcgttggatgcaagaccttcaccaagacaccaacggttgggcggatattggctacaactttggtgttggcggagatggtagagcctacgaaggaaggggatggtccagagttggtgctcatgctccctattacaacagcaaaagtattggaatatgtataattggagattggacagttgaacttccaccagaaaatcagctagcgacagttcatgagctaatacaaaaaggagtgagagaagggtacatccagaaggactacaaattggtaggccataggcaggttagacaaggtaccgaatgtccgggtgacaggctcttcaaagagatacacaagtggcagaatttttgtgaacaaccagacgagatagcagtaaggacaaacaacacttggttccttaaaaaaactgtacatgacaatagtagggataaggaagataaagatgaagacaataatgacaatggtattaataggttagaaaaaagaactgtttagatttaagtaatacattttatttattattaaaaaaacacctatgcagttatgattcatttttgagataaacaatagggtgaatttatttttcttttagtcagatttagtaataaactaagctcgtttagtagtgtatttactaccgatttacgttttattttgtatatagctaagtctcaattaaaaatgatgactgaccgcttcggtttaaaatgggacccgaaaaacttagagataagaaccatgtctgtggaaaagacattggaacccctagtgcttcaagttaccaccctcgtcaataccaaggggcctagcaaaaagaagaaaggaaagtctaaacgtgccaatgctctggttagtactgttgaaaaagccacggaaaacttcatagaaaagggggagcagatagcctatgagaatccagatattactgaggaaatgctggcagctgttgacgaagtcaagaaaacgggacatgctatgagcggagctgcaagagaattttcagaagacccatgttcttctttaaaaagaggaaatatggttagggctgctagaaatcttttatcggctgtaactcgtcttttaattctagcggacatggttgatgtccaccttttgctcaaatccttacatgtagttgaggatgacctcgaaaaactaaaaaatgcttcaagcaatggcgaacttttagacaatattaaagcctttggtcaaaatgccaacgaattaatgaatcaggctgctaaaaggcagcaagaactgaaagatccacaacttcgtgatgatctagcagctgctagagctgtacttaagaaacattccactatgttattaactgcctctaaggtttatgtacgtcatccagagctagcagctgccaaagcaaatagagattatgtcttgaaacaagtttgtgaagctgtgaataccattaatgatgtagctcagggaagaactcctcaacctgcttctggaccatatgatggacctggagagttggctgctgctttggatgattttgatgatcacatggtaatggagcctctagcatacaatgaagttcataccaggccttcattggaagaacgtctagaaagcattataagtggtgcagctcttatggcagattctagttgtactagggatgaaagaagggaaaggatagttgcagagtgtaatgctgtaagacaagctttgcaagacttgttgactgaatatatgacaaatatgggcaataaagataaaagtgagagcctaatacgagcaatcgacaatatgggtagaaagactaaggatttaagaagacaactgagaaaagctgttgtagatcatgtatctgacagtttcttggaaaccaacgtacctcttctcgttttaataaaggcagctcaaaatggcaacgaaaaggaggtagaagaatatgcagttgtatttactgaacattccaataagttagtagaagttgctaaccttgtctgcagcatgtctaataatgaagatggtgtcaaaatggttagatatgctgctgctcagatcgacaatctgtgtcctgaagtaataaatgcagctagaattttagccgctagacctcgcagtaaagttgctcaagaaaatatggacgcattcaagcaatcatgggagaatcaagtgagacttctgactgaagcagtcgatgacattactactatcgacgactttttggctgtttctgaaaaccatattctggaagatgttaataaatgtgtacttgccttgcaagaaggtgattctgacacattggatcgcactgccagtggtataagaggaagatccaatagggtgtgcaatgtagtaacagctgaaatggataattacgaaccttgcatttataccaaacgtgttcttgaagccgtcaaagtattgaatgatcaagtgatgcccaagtttactcaaagagtgcaagttgcagttcaagctttgggaaatagtcctcccaaagaagtggatgaaaacgattttatcgatgcttctagacttgtttacgatggagtgagagaaataagaagagccgttctaatgaatagagccgatgaagatttagatccagaagatgtcgaattggatgaaaactatctaatagaaacaagaagcaaatcgagcgctcacacaggcgaacatggagttgatgagtatccagatattagtggaattacaacggctagggaagctatgggtaaaatgccggaagaagataaacagaagattttgcaacaggttgagttcttcaggagtgaaaaactcaagtttgaccgtgaggtcgctaaatgggacgacactggcaacgatattatcgttcttgctaagcacatgtgtatgattatgatggaaatgacagattttaccaggggtcgtggccctctaaaaaccactatggacgttattaatgcggctaaaaagatttccgaagctggaaccaaattagataaacttactcgccaaatagctgaacagtgcccagagagttccaccaaaaaagatttgttggcttatttgcaacgtattgctctttactgccaccagatgaacattacatcaaaggttaaagccgatgttcaaaacatcagtggagaacttattgtatctgggttggacagtgctacttctttgattcaagctgctaagaacttgatgaatgctgtagttctcacagtaaaagcttcatatgtggcatccaccaaatacccaagacaaggaactattgcatcgccgattgttgtctggaagatgaaagcgccagagaagaagccgttagtcagaccagagaaacccgaagaagttcgtgccaaagtacgcaaaggctcacaaaagaaagttcaaaatccaattcacgctctttctgaattccaaagcccaactgagtctgtgtaaacgtaaacctttatccattaatatattaaccagatgttaactattatttgcctgattattctgtgacattttctatgtacctatagattcgtattaatataaagtctgattagaggcatgttcaagttcatttaacatttgaacagtacatagtaagtccgtagtttcatcaagtgttaaatacagtgtgttctaacgaaaatatgaccccctcccagaaactgagaagccaaggagtttcttcacaatttgaaaatcacgtcaatttgtattggaagagggacgaatgttcatgcaattcatgccctcagatgtaaccccctactgccccccagttttttgaaatagcaagtgtgtcgagttgcacatcatttgaaaggtagtttttttttctctacacgaccctctatttttttaatttgcgaaataactttaaagacagttttggatttaactaatttataatacatttgttaagttcaaaattgtcttcaaacttgttatgtaaattaaaaaaaaaatagtgtcgtgtagagaaaaaaattacctttcaaatgatgtgccactcgatcacacttgctatttaaaaaaaaagtgggggttgatgcggggcagtggagggttacatttgagggcatgaagtttgcatgaaagttcgttcccctcccattataaattgacgtatttttaaaatttttaagaagctcttggtttctgagtttctggggtggtcagattttcgatggaacagactgtatatgcgaaatgcatatggcacaattaaaagtacagctgtttcgctacaatatgcaactaacatcgaaaatatttgcaagtttaaaatacatatacacctatgttttaacatactttagacctagaacttaactaggtgctgcgcagaatgaaatttcccaccgttgggccaagtgttttccatttttttagtaaagcaaaaaatccggacatttctcatatccggacgccaatccggacatgccgttcaaatccggactgtccggatgaaatccggacgtatggtaaccctaagtattcatcaactgattcatgggttttgttcttttagacttgttttttcttcttgtgaagccctttgtagtcccatcaatagtattggactatcgcgtgctattaaatttaggatgtcatatgtgtaatattctcttggtgtagttggaactcttcttagaagtttgcctcaaaaatttgtatttcttgtcagcttcacgattctagaaatggtgagtctgatttaaagatcttgttaagctaccaagattatgaatttgcacgtgatttccacaggacttccacaaagtagccagcaaactatatttctactatatttctggctagtgctttgatttcagccagggtttccccatttctttctcttcgtccagtattgcccttttccaagtttttaagtctgcatactttctgtcagccttcagaattccaatccagcactgttcttacaatgtcatctgttgtgtcaatgttgtgtacggagtgtgtggtccaggcatctcgataattttcttcgccttatttgctttatggcatttttttggttggcttgggtctccacaaattttcatttaaaattcgatgaggccaaaatatcatcatcaatggtgctacagcactatgaaagagcctcgaccttctcaagtctattacgccagtcagtcctatccattgccaactgttgccagtttgctgcgcgatttttctaccatcgtctacaccatccttccatctgagttttggcctacccctatttctacttcccacaggttgtgacataaggattcttcaaggagggttgttatgctgtgatcttgctagatgttctgcccacttagtcttcctattttataagagatactacgtctttaccaccaaatatatgtttatatctgtggtatacctcgtagttgtacctcctcctccaaataccattttcacagatgccaccgaatattcctctcaggatccttcgttcaaatataagcagaaggttttcatctgccttggagatggtccatgtctccgatccatatgtcaacactggttgtataagggttttgtatatggttatttttgttttttggcttaagtttctgcttctcatatgtctactcagtccaaaatagcatttgttgctaggattatccttcgcttgatttcttcgtcataacgttctccttggtgatcagggagcctaagtatgtgaatttgtccaccacttcaacggtagagttatcaaccgtgaattggtgaccgatgtttctggcactattgttggatgttgatgctatcatcttagttttgtcctcgtttacttgcaggcccatattttttgaggcatttgagaaggtgatatacatttcttctagcttgcgtgttgtgcgggcaactaggttcacgtcatctgcataatatgcc

SEQ ID NO: 93 - DNA, 2558 bp, Diabrotica virgifera
  SmartBlast Evalue=2E-35; Info=Endonuclease-reverse transcriptase n=1 Tax=Bombyx mori RepID=D7F170_BOMMO
tggttctttgatgtacccagtacaatttaatgttataagtcttgctgtgtaacagcttttatcgatgtggtgctataaagataattttagcgaatcttgcataacataagtctttatttccaattttttctttgtttttctctctctctcttgagcagtattcatagggttaccataatttattaaggccaaatccggacaggggtagtccatggggttgtaggaaagctaaaatgtgaatttgactgtgtgtggctacctctacattgtacatacagtgtgttccaacgaaaatttgacccctcctccaaactcagaaactaagagtttcttcacaaaaacacgtcaatttgtattggaggggggacgaattttcatgcaaaattcatgctctcaaatgtaaccccctactgaccccagtgttttttaattagcaagtgtgtcgagttgcacatcatttgaaaggtagtttttttttctctacacgaccctctatttttttaatttgcgaaataactttaaagacagttttggatttaactaatttataatacatttgttaagttcaaaattgtcttcaaacttgttatgtaaattaaaaaaaaaatagtgtcgtgtagagaaaaaaattacctttcaaatgatgtgccactcgatcacacttgctatttaaaaaaaaagtgggggttgatgcggggcagtggagggttacatttgagggcatgaagtttgcatgaaagttcgttcccctcccattataaattgacgtatttttaaaatttttaagaagctcttggtttctgagtttctggggtggtcagattttcgatggaacagactgtatatgcgaaatgcatatggcacaattaaaagtacagctgtttcgctacaatatgcaactaacatcgaaaatatttgcaagtttaaaatacatatacacctatgttttaacatactttagacctagaacttaactaggtgctgcgcagaatgaaatttcccaccgttgggccaagtgttttccatttttttagtaaagcaaaaaatccggacatttctcatatccggacgccaatccggacatgccgttcaaatccggactgtccggatgaaatccggacgtatggtaaccctaagtattcatcaactgattcatgggttttgttcttttagacttgttttttcttcttgtgaagccctttgtagtcccatcaatagtattggactatcgcgtgctattaaatttaggatgtcatatgtgtaatattctcttggtgtagttggaactcttcttagaagtttgcctcaaaaatttgtatttcttgtcagcttcacgattctagaaatggtgagtctgatttaaagatcttgttaagctaccaagattatgaatttgcacgtgatttccacaggacttccacaaagtagccagcaaactatatttctactatatttctggctagtgctttgatttcagccagggtttccccatttctttctcttcgtccagtattgcccttttccaagtttttaagtctgcatactttctgtcagccttcagaattccaatccagcactgttcttacaatgtcatctgttgtgtcaatgttgtgtacggagtgtgtggtccaggcatctcgataattttcttcgccttatttgctttatggcatttttttggttggcttgggtctccacaaattttcatttaaaattcgatgaggccaaaatatcatcatcaatggtgctacagcactatgaaagagcctcgaccttctcaagtctattacgccagtcagtcctatccattgccaactgttgccagtttgctgcgcgatttttctaccatcgtctacaccatccttccatctgagttttggcctacccctatttctacttcccacaggttgtgacataaggattcttcaaggagggttgttatgctgtgatcttgctagatgttctgcccacttagtcttcctattttataagagatactacgtctttaccaccaaatatatgtttatatctgtggtatacctcgtagttgtacctcctcctccaaataccattttcacagatgccaccgaatattcctctcaggatccttcgttcaaatataagcagaaggttttcatctgccttggagatggtccatgtctccgatccatatgtcaacactggttgtataagggttttgtatatggttatttttgttttttggcttaagtttctgcttctcatatgtctactcagtccaaaatagcatttgttgctaggattatccttcgcttgatttcttcgtcataacgttctccttggtgatcagggagcctaagtatgtgaatttgtccaccacttcaacggtagagttatcaaccgtgaattggtgaccgatgtttctggcactattgttggatgttgatgctatcatcttagttttgtcctcgtttacttgcaggcccatattttttgaggcatttgagaaggtgatatacatttcttctagcttgcgtgttgtgcgggcaactaggttcacgtcatctgcataatatgcc

SEQ ID NO: 94 - DNA, 2078 bp, Diabrotica virgifera
  SmartBlast Evalue=1E-139; Info=Endonuclease-reverse transcriptase HmRTE-e01 n=1 Tax=Heliconius melpomene RepID= C6Y4D5_9NEOP
atcatcatcattctctttgcttatccctatgcggggtcggcttccctaattgcatttctccacacaattatattttgggtcatatcaatgttaatcccctttaccaacatgtcctgcttatcgtctccccccaggtcttctttggtcttcctctcctactctttccagaaacctgcacttcagctattcttcatattgggtgattaagtctcgacgttgaacatgaccaaaccatcttaacctatgctctctcattttggcatcaattggtgccacacctagacttcccctaatatactcatttctaattttatccttctttgtcactccactcatccatctaagcattctcatttccgccacatgcattcgttgttcctctttctttttcactgcccaacattcagttccgtacatcatagccggtcttatggctgttttatagaattttcccttcagcttcattggaatttttctgtcacacaacacaccactcgcttctttccacttcatccatccagccctaattctactgcatgcatctccatctatttctccattactctgtaataccgatcctaggtacttaaaactattgcttttcacaatcatttcaccatccaaagataccattttatttgtagtagctccatctttaaatgaacattccaaatactctgtttttgtcctactaagttttaaacctttttcctccagagcttgtctccactgttccagtttttgttctaagtctctttcactatttcctactaacacgacatcatcagcatacattaagcaccatggaatgttaccctgtagtttcgctgttatctggtccaaaactaatgagaataaatacggactaagcacagagccttggtgcaatcctactttcacatgaaatttatcagtctctcccacacctgtcctaacactagtcgttactccctcatacatatccctcacaatctttacatattcaccagggactcctttcttattgagtgcccaccacagaatctctcgaggaactctatcatatgctttctcaagatcaatgaataccatatgagcgtttgtttctttactcctgtatttttccatcaactgccttataatgaaaattgcatctgttgttgatctaccctgcataaagccaaattgattctcggatatttcggtctcttcacgtatccgtctatcaattactctttcccatattttcatggtgtggctaagcagttttatagccctgtagtttgtacattgttgtatatctcccttgtttttgtaaacaggtaccagtatactgcttctccattcgtctggcatttgtccaacttccataattctattaaatagacctgctagccaccttgttcctgtctctcccaatgctctccatacttccccaggaatatcatctggtcctaccgcttttcctttctttattttttgaagcgcttgagccacttcctcgttggttattttggtgaccattgctgctactgtctccgttgactctacaggctgtctgtcaaattcttcatttaataagctgtcaaagtactttctccatctctttttgacatccctttcgtgatgccatcatttcaggagatgccatcatttcagtataagtttttatttcgtttggagaaggtcttttcattattatggcctgaaaagatttttggatatttgatgcctgaatgccttttctatcagcaccataccctgccctgtcctgcacgtttagccaatacaccaccaatgcaaccaaagtgcagtattaccccacacccgcctgcatttttctgtataggccaggatccctactgtaaggactgccctataagccaatgtattgttgcccgtatcccgccactaggaggcacgtacttcattcgggatacaatttcagtattttataaatgctagaatgttccacacggtgatgtgagctttgagaaaaaaaaacactttttaattcgtacatccggtatacaatgaggatgtacctatttggcagcaatattattacagcgatattgttaaggaatgaggctacggca

SEQ ID NO: 95 - DNA, 2214 bp, Diabrotica virgifera
  SmartBlast Evalue=4E-98; Info=Reverse transcriptase family member n=1 Tax=Glycine max RepID=Q1AKH8_SOYBN
aggcgcctttcaggattatatatattttgatccttggactgtccactgcttgttctcgggctttcgagcaaatcgatccattctgtaaaaattgcgaggtgaaaagcttcggttcctggacgacaacgtgcaatagcgttattaccctcaatatttgagatttgcaatgcttgggctaggacagaactatttatggtcggcgtggatctgcgcgaagtcttctgtcgtttatcggtaaatgaacatggttcaaaggaagtcagaagctgatacagactaggtacatactcctccaacccttttaactctgctaggaacaatcagtgccttggtaattttactatggagtggtctagcgaccgacgttctgtttgaatttttatcatcgtgtaaattaaccaactaactaaaatttctaccgccaacactggtggtgcaccctcgatattagaggggatacgttccatcgaaatggtccgatcatatttatcaaaatgtaaatgtttattaatctcagaataatatggggcgttaactgtgctctcttttcttttcaccattatctattttctatttctctttgccaacgtgaactggcaaagagtgccacgccacattctatgggatcccgtcttaatgcagattattatttttcttatgcaaacatatttattttaatagtatttaaggtaggtttaataataacagcaatgactattgtattacgtagatatataatatattctttaagttctgtagatacaatacgaaatgtgcaggtagctattattgttttttgttttttggtacaaaatattttaaattacttctaacaacataaatatataatgaggattccttttagagaaaagaagtaaaaagaaatacttcgcacagatttataggtgtgctttatcagttcttcatcaattatacgttaatggtctcgatttaacaatgatgtaagtactctttcagactaagacagtctgagaccgatgtgcgcccccggttttcaattgccccaaagcattggtaagccactaaaatcagccagacactaggaagtggctcgtctgtagtcgttcatttaaaaccatgctttgctgcaatttggcggacaccggtgtcagacaccagtgtcttagtcagaaagggtactaaatctccatacctattcaaaagtagataatacaaatatttcatcatcattctctttgccttattcctatgcggggccggcttccctagttgcatttctccacacaattctatcttgggtcatatcaatgttaatcccctttaccaacatgtcctgccttatcgtctccccccaggtcttctttggtcttcctctcctactccttccaggaatctgcacttcagctattcttcgtattgggtgattaacgtctcgacgttgaacatgaccaaaccatcttaacctatgctctctcattttggcatcaattggtgccacacctagacttcccctaatatactcatttctaattttatccttctttgtcactccactcatccatctaagcattctcatttccgccacatgcattcgttgttcctctttctttttcactgcccaacattcagttccgtacatcatagccggtcttatggctgttttatagaattttcccttcagcttcattggaatttttctgtcacacaacacaccactcgcttctttccacttcatccatccagccctaattctactgcatgcatctccatctatttctccattactctgtaataccgatcctaggtacttaaaactattgcttttcacaatcatttcaccatccaaagataccattttatttgtagtagctccatctttaaatgaacattccaaatactctgtttttgtcctactaagttttaaacctttttcctccagagcttgtctccactgttccagtttttgttctaagtctctttcactatttcctactaacacgacatcatcagcatacattaagcaccatggaatgttaccctgtattttcgctgttatctggtccaaaactaatgagaataaatacggactaagcacagaaccttgatgcaatcctactttcacatgaaatttatcagtctctcccacacctgtcctaacactagtcgttactccctcatacatatccctcacaatactttacatattcaccagggactcctttcttattgagt

SEQ ID NO: 96 - DNA, 2218 bp, Diabrotica virgifera
  SmartBlast Evalue=1E-107; Info=Reverse transcriptase family member n=1 Tax=Glycine max RepID=Q1AKH8_SOYBN
ataaggtgcatgcaatgcatcactagattttagttttttttgttagtaggaactgctaatttagaattatttgctgcggtaaacttttattatctttttaggataatagggtaatttaaagacaatttaaatattgcctttaaattgttctttaacattatggttatttcgatgcgtcccctaacttttaagcatcagatccaggcatttttccgattttcaaaacaataattattttcgatatatttcatcatcatcatcatcattctctttgccttatccctatgcggggtcggcttccctaattgcatttctccacacaattctatcttgggtcatatcaatgttaatcccctttaccaacatgtcctgccttatcgtctccccccaggtcttctttggtcttcctctcctactccttccaggaatctgcacttcagctattcttcgtattgggtgattaacgtctcgacgttgaacatgaccaaaccatcttaacctatgctctctcattttggcatcaattggtgccacacctagacttcccctaatatactcatttctaattttatccttctttgtcactccactcatccatctaagcattctcatttccgccacatgcattcgttgttcctctttctttttcactgcccaacattcagttccgtacatcatagccggtcttatggctgttttatagaattttcccttcagcttcattggaatttttctgtcacacaacacaccactcgcttctttccacttcatccatccagccctaattctactgcatgcatctccatctatttctccattactctgtaataccgatcctaggtacttaaaactattgctttttacaatcattcaccatccaaagataccattttatttgtagtaactccatctttaaatgaacattccaaatactctgtttttgtcctactaagttttaaacctttttcctccagagcttgtctccactgttccagtttttgttctaagtctctttcactatttcctattaacactacatcatcagcatacattaggcaccatggaatactaccctgtagtttcgctgttatctggtccaaaactaatgagaataaataaggactaagcaccgagccttggtgcaatcctactttcacctgaaatttatcagtctctcccacacctgtcctaacactagtcgttactccctcatacatatctctcacaatctttacatattcgccagggactcctttcttattgagtgcccaccacagaatctctcgaggaactctatcatatgctttctcaagatcatgaataccaacgctcgtcttcatacttatctgctcttataataataacctttaaaacggtctattatcattccgcatcttttttttgcatattgtctgctaatagtttcatcttatgtttttctatttattctttatttcattcgcccgcttctttcttttgattgtttcaaccacgtgctagaagaagtatcggccctccgcgcaagagctagagtgacaatcttccatagaggtatcaatcatccaattaacaagccaaattactcatataaaggaaggagaagaagaagagcatgtgaatactagtaataggaatctaatcggctagtgaatagctttggagatatcaggtctttctgtctaatagtttttttacttcaatcggttttgtgtggacaaaaatgggcaaattgttatagtgtgacaatccttagaaatgtcttttatctcttgaatccatggtctactcagtttttccttgacacatttatcaatgcttatgttccaaccatatttttaagttgtattcatgtattgtattcgtgtattgttgtattcatgtgattttctgacatgagtttttccctattcaataattttcttgtaccctgtacgcgactgatttttcaattacttcatacatatgcgcgcgcatttttcattataaatatactcaaaaattcttgaaaacttttacagatgttctatcgttattcttaaaaacctttcttcatgttctgttgtcatttttgttatcttacgttctatgactaatgctatattcttatttttctaaatatctaccttttctaatcagatttcactttatatttttatttatcacgttttttattgtaccatattttcttttttgttataaataaacatgttaaaacgta

SEQ ID NO: 97 - DNA, 2014 bp, Diabrotica virgifera
  SmartBlast Evalue=1E-143; Info=Endonuclease-reverse transcriptase HmRTE-e01 n=1 Tax=Heliconius melpomene RepID= C6Y4D5_9NEOP
aattctatcttgggtcatatcaatgttaatcccctttaccaacatgtcctgccttatcgtctccccccaggtcttctttggtcttcctctcctactccttccaggaatctgcacttcagctattcttcgtattgggtgattaagtctcgacgttgaacatgaccaaaccatcttaacctatgctctctcattttggcatcaattggtgccacacctagacttcccctaatatactcatttctaattttatccttctttgtcactccactcatccatctaagcattctcatttccgccacatgcattcgttgttcctctttctttttcactgcccaacattcagttccgtacatcatagccggtcttatggctgttttatagaattttcccttcagcttcattggaatttttctgtcacacaacacaccactcgcttctttccacttcatccatccagccctaattctactgcatgcatctccatctatttctccattactctgtaataccgatcctaggtacttaaaactattgcttttcacaatcatttcaccatccaaagataccattttatttgtagtagctccatctttaaatgaacattccaaatactctgtttttgtcctactaagttttaaacctttttcctccagagcttgtctccactgttccagtttttgttctaagtctctttcactatttcctactaacacgacatcatcagcatacattaagcaccatggaatgttaccctgtagtttcgctgttatctggtccaaaactaatgagaataaatacggactaagcacagagccttggtgcaatcctactttcacatgaaatttatcagtctctcccacacctgtcctaacactagtcgttactccctcatacatatccctcacaatctttacatattcaccagggactcctttcttattgagtgcccaccacagaatctctcgaggaactctatcatatgctttctcaagatcaatgaataccatatgagcgtttgtttctttactcctgtatttttccatcaactgccttataatgaaaattgcatctgttgttgatctaccctgcataaagccaaattgattctcggatatttcggtctcttcacgtatccgtctatcaattactctttcccatattttcatggtgtggctaagcagttttatagccctgtagtttgtacattgttgtatatctcccttgtttttgtaaacaggtaccagtatactgcttctccattcgtctggcatttgtccaacttccataattctattaaatagacctgctagccaccttgttcctgtctctcccaatgctctccatacttccccaggaatatcatctggtcctaccgcttttcctttctttattttttgaagcgcttgagccacttcctcgttggttattttggtgaccattgctgctactgtctccgttgactctacaggctgtctgtcaaattcttcatttaataagctgtcaaagtactttctccatctctttttgacatccctttcgtgatgccatcatttcaggagatgccatcatttcagtataagtttttatttcgtttggagaaggtcttttcattattatggcctgaaaagatttttggatatttgatgcctgaatgccttttctatcagcaccataccctgccctgtcctgcacgtttagccaatacaccaccaatgcaaccaaagtgcagtattaccccacacccgcctgcatttttctgtataggccaggatccctactgtaaggactgccctataagccaatgtattgttgcccgtatcccgccactaggaggcacgtacttcattcgggatacaatttcagtattttataaatgctagaatgttccacacggtgatgtgagctttgagaaaaaaaaacactttttaattcgtacatccggtatacaatgaggatgtacctatttggcagcaatattattacagcgatattgttaaggaatgaggctacggca

SEQ ID NO: 98 - DNA, 2354 bp, Diabrotica virgifera
  SmartBlast Evalue=3E-71; Info=CD9 antigen n=1 Tax=Harpegnathos saltator RepID=E2B773_9HYME
gtttcaaagtgcggtactatcggtttcattttatatctctttataacggtgtcgcgagttttcttgtgaaaaatgatgtccaaagcagacacacaggaagatgcctccttcgccaaattggaaaatcagattgctatcatcaaatacgtaatactctttaccaacgttttgcaatgggctctcggtgcagcaatcttcgctctttgcctttggctacgattcgaggagggcattcaagaatggctccagaaattggattcagaacaattttacatcggagtatatgtacttatagtcgcttcactgatcgtcatgattgtgtcctttataggatgtattagtgccctgcaggagagtaccatggcccttttagtgtacatcggcacccaagtgctcagttttatattcggtttatccggttcggcggttcttctggataacagcgccagagattcccacttccaaccgaggatccgagagagtatgcgacgtcttatcatgaatgctcatcacgaccaatccagacaaacactagccatgattcaggaaaatgttggttgctgcggagctgatggcgcaacagactacctctctcttcagcagccccttccaagtcagtgcagagacaccgttactggaaacccattcttccacggatgtgtagatgaactcacctggttcttcgaagaaaaatgtggttggatagcaggtttagctatggcgatatgcatgattaacgtccttagtattgttttatctacggtactcatccaggcattgaaaaaagaagaagaagcatccgattcatacaggagatagatttagtgagatagagatataatgtagtaattagaatttaatgtatcttcaactaaattacttttttttagagatatacctgaaattgtaaagaacaggaaaattaaataagaaccaaaaactaaagtgaaccaacaataattgaacattccaaaatacactttttttgttaagttaactaaacgacataaatttttcattttttaagttttttattgtttttttagtattataatttggataaggtgtttttatattaagtgtgtaattataaagtttttttataggacggaacctaaattatatagaatcatacaataaactattgtctgctcattgaatttggaaaataaacatttggtatattaaaaataataatatatggcttagtgaggaactaatgaaaacgtctatacatttttgaatttaataccaacagatattgtaattattaattttaattaatcaactccaagtcaacatctagaaagcaatagaaattaaagtaattgactaactaataacattctagcaacctgtacatgtggttgtattactctgttttgacattgacaaaactagctatgtgatcagttatctctagcagtaataaactctagctgtattttgttttatatatttgtccaaagaattggtttattttaaagcaaatataatggttcaaccaattttgtccgattgactaaaaaaattcaagccaaaattatgttttaagtttaatgatatatattatatgtataagtcgtaagtaggtacaaagtttaacataatcgtataaaaatatcagaaataattagaaattaggtattccgtcacatacatagataggtttctaaaaataaattacattttccgcaaatcgccaggaaattttgacattcctgtcaaaatttcttgaagaaaaagtcaggacttccttactgtaaggaaatgtcatttccttactgtaaggaaatgatatttccgtacagttgttagtgttctacataaatccataaaacgtctgtatgcattttcgtacttttctcttgatttctttggcaataattctaatgaagcagtattcactgcctcaaccagctctggaggagtcccaggaatggaaatttcatcatcacttatcattttactttcgagaacaccagcaattaaatttataagcgtcaagtttgacaattcaacctcaatacgtttccatagtaacccaagtaattttattaggaatttcaaagcaccatttatttgggaataaaattatcgcgtttttttttaaatcaatcaatatctgtcgaattttaaacgatttgcggaaaaatagtatgtttacctcgtaggaaaagccacattcctggactctgtgttgctaagtctcggcttgcgcctcgacttagcaatcttcacagtcgtccaggaatgttaagcttttcctacccggtaaacaatgtactattaatcacttttatttataccatttataatatttaactttttcattaataaattcttaacaaaaa

SEQ ID NO: 99 - DNA, 2132 bp, Diabrotica virgifera
  SmartBlast Evalue=5E-92; Info=Reverse transcriptase family member n=1 Tax=Glycine max RepID=Q1AKH8_SOYBN
aggcgcctttcaggattatatatattttgatccttggactgtccactgcttgttctcgggctttcgagcaaatcgatccattctgtaaaaattgcgaggtgaaaagcttcggttcctggacgacaacgtgcaatagcgttattaccctcaatatttgagatttgcaatgcttgggctaggacagaactatttatggtcggcgtggatctgcgcgaagtcttctgtcgtttatcggtaaatgaacatggttcaaaggaagtcagaagctgatacagactaggtacatactcctccaacccttttaactctgctaggaacaatcagtgccttggtaattttactatggagtggtctagcgaccgacgttctgtttgaatttttatcatcgtgtaaattaaccaactaactaaaatttctaccgccaacactggtggtgcaccctcgatattagaggggatacgttccatcgaaatggtccgatcatatttatcaaaatgtaaatgtttattaatctcagaataatatggggcgttaactgtgctctcttttcttttcaccattatctattttctatttctctttgccaacgtgaactggcaaagagtgccacgccacattctatgggatcccgtcttaatgcagattattatttttcttatgcaaacatatttattttaatagtatttaaggtaggtttaataataacagcaatgactattgtattacgtagatatataatatattctttaagttctgtagatacaatacgaaatgtgcaggtagctattattgttttttgttttttggtacaaaatattttaaattacttctaacaacataaatatataatgaggattccttttagagaaaagaagtaaaaagaaatacttcgcacagatttataggtgtgctttatcagttcttcatcaattatacgttaatggtctcgatttaacaatgatgtaagtactctttcagactaagacagtctgagaccgatgtgcgcccccggttttcaattgccccaaagcattggtaagccactaaaatcagccagacactaggaagtggctcgtctgtagtcgttcatttaaaaccatgctttgctgcaatttggcggacaccggtgtcagacaccagtgtcttagtcagaaagggtactaaatctccatacctattcaaaagtagataatacaaatatttcatcatcattctctttgccttattcctatgcggggccggcttccctagttgcatttctccacacaattctatcttgggtcatatcaatgttaatcccctttaccaacatgtcctgccttatcgtctccccccaggtcttctttggtcttcctctcctactccttccaggaatctgcacttcagctattcttcgtattgggtgattaacgtctcgacgttgaacatgaccaaaccatcttaacctatgctctctcattttggcatcaattggtgccacacctagacttcccctaatatactcatttctaattttatccttctttgtcactccactcatccatctaagcattctcatttccgccacatgcattcgttgttcctctttctttttcactgcccaacattcagttccgtacatcatagccggtcttatggctgttttatagaattttcccttcagcttcattggaatttttctgtcacacaacacaccactcgcttctttccacttcatccatccagccctaattctactgcatgcatctccatctatttctccattactctgtaataccgatcctaggtacttaaaactattgcttttcacaatcatttcaccatccaaagataccattttatttgtagtagctccatctttaaatgaacattccaaatactctgtttttgtcctactaagttttaaacctttttcctccagagcttgtctccactgttccagtttttgttctaagtctctttcactatttcctactaacactacatcatcagcatacattaaacaccatggaatgttaccctgtagtttcgctgttttctggtccaaaactaatgagaataaatacggactaagcaccgagccttggtgcaatcctactttcatatgaaatttatcagtctctcccacacct

SEQ ID NO: 100 - DNA, 2173 bp, Diabrotica virgifera
  SmartBlast Evalue=1E-64; Info=Reverse transcriptase family member n=1 Tax=Glycine max RepID=Q1AKH8_SOYBN
aggcgcctttcaggattatatatattttgatccttggactgtccactgcttgttctcgggctttcgagcaaatcgatccattctgtaaaaattgcgaggtgaaaagcttcggttcctggacgacaacgtgcaatagcgttattaccctcaatatttgagatttgcaatgcttgggctaggacagaactatttatggtcggcgtggatctgcgcgaagtcttctgtcgtttatcggtaaatgaacatggttcaaaggaagtcagaagctgatacagactaggtacatactcctccaacccttttaactctgctaggaacaatcagtgccttggtaattttactatggagtggtctagcgaccgacgttctgtttgaatttttatcatcgtgtaaattaaccaactaactaaaatttctaccgccaacactggtggtgcaccctcgatattagaggggatacgttccatcgaaatggtccgatcatatttatcaaaatgtaaatgtttattaatctcagaataatatggggcgttaactgtgctctcttttcttttcaccattatctattttctatttctctttgccaacgtgaactggcaaagagtgccacgccacattctatgggatcccgtcttaatgcagattattatttttcttatgcaaacatatttattttaatagtatttaaggtaggtttaataataacagcaatgactattgtattacgtagatatataatatattctttaagttctgtagatacaatacgaaatgtgcaggtagctattattgttttttgttttttggtacaaaatattttaaattacttctaacaacataaatatataatgaggattccttttagagaaaagaagtaaaaagaaatacttcgcacagatttataggtgtgctttatcagttcttcatcaattatacgttaatggtctcgatttaacaatgatgtaagtactctttcagactaagacagtctgagaccgatgtgcgcccccggttttcaattgccccaaagcattggtaagccactaaaatcagccagacactaggaagtggctcgtctgtagtcgttcatttaaaaccatgctttgctgcaatttggcggacaccggtgtcagacaccagtgtcttagtcagaaagggtactaaatctccatacctattcaaaagtagataatacaaatatttcatcatcattctctttgccttattcctatgcggggccggcttccctagttgcatttctccacacaattctatcttgggtcatatcaatgttaatcccctttaccaacatgtcctgccttatcgtctccccccaggtcttctttggtcttcctctcctactccttccaggaatctgcacttcagctattcttcgtattgggtgattaacgtctcgacgttgaacatgaccaaaccatcttaacctatgctctctcattttggcatcaattggtgccacacctagacttcccctaatatactcatttctaattttatccttctttgtcactccactcatccatctaagcattctcatttccgccacatgcattcgttgttcctctttctttttcactgcccaacattcagttccgtacatcatagccggtcttatggctgttttatagaattttcccttcagcttcattggaatttttctgtcacacaacacaccactcgcttctttccacttcatccatccagccctaattctactgcatgcatctccatctatttctccattactctgtaataccgatcctaggtacttaaaactattgcttttcacaatcatttcaccatccaaagataccattttatttgtagtagctccatctttaaatgaacattccaaatactctgttcttgttatattattatattattggtatatagttaaatataaatgtacattataactttataaaatacgtccaccgataatagccatttcctgtttattataatgacagtaggtacaaatttctacttataatttttctgaaatgaatataacttgaattcaccatttcttgttgtgttttttacaatatacagaatacttttaataacataacgttaatattacttttcttcttataatttttttgggtctatggccttgacaattgtccagtaaccaggaccaata

SEQ ID NO: 101 - DNA, 1825 bp, Diabrotica virgifera
  SmartBlast Evalue=1E-75; Info=Reverse transcriptase family member n=1 Tax=Glycine max RepID=Q1AKH8_SOYBN
ataaggtgcatgcaatgcatcactagattttagttttttttgttagtaggaactgctaatttagaattatttgctgcggtaaacttttattatctttttaggataatagggtaatttaaagacaatttaaatattgcctttaaattgttctttaacattatggttatttcgatgcgtcccctaacttttaagcatcagatccaggcatttttccgattttcaaaacaataattattttcgatatatttcatcatcatcatcatcattctctttgccttatccctatgcggggtcggcttccctaattgcatttctccacacaattctatcttgggtcatatcaatgttaatcccctttaccaacatgtcctgccttatcgtctccccccaggtcttctttggtcttcctctcctactccttccaggaatctgcacttcagctattcttcgtattgggtgattaacgtctcgacgttgaacatgaccaaaccatcttaacctatgctctctcattttggcatcaattggtgccacacctagacttcccctaatatactcatttctaattttatccttctttgtcactccactcatccatctaagcattctcatttccgccacatgcattcgttgttcctctttctttttcactgcccaacattcagttccgtacatcatagccggtcttatggctgttttatagaattttcccttcagcttcattggaatttttctgtcacacaacacaccactcgcttctttccacttcatccatccagccctaattctactgcatgcatctccatctatttctccattactctgtaataccgatcctaggtacttaaaactattgcttttcacaatcatttcaccatccaaagataccattttatttgtagtagctccatctttaaatgaacattccaaatactctgtttttgtcctactaagttttaaacctttttcctccagagcttgtctccactgttccagtttttgttctaaacttctttccctatttcctattaacactttcccaagtctattacaccagtcagtcctatccattgccaaccgttgccagtttgctgcgcctatttttctcccatcctcatctacaccatccttccatctaagttttggcctacccgtatttctacttcccacaggttgtgacataaggattcttctaggagggttgttatgctgtgatcttgctagatgtcctgcccatcttagtcttcctattttataagagatactacgtctttaccaccaaatatatgtttatatctgtggtatacctcgtagttgtacctcctcctccaaataccattttcacagatgccaccgaatattcctctcaggatccttcgttcaaatataagcagaaggttttcatctgccttggagatggtccatgtctccgatccatatgtcaacactggttgtataagggttttgtatatggttatttttgttttttggcttaagtttctgcttctcatatgtctactcagtccaaaatagcatttgttgctaggattatccttcgcttgatttcttcgtcataacgttctccttggtgatcagggagcctaagtatgtgaatttgtccaccacttcaacggtagagttatcaaccgtgaattggtgaccgatgtttctggcactattgttggatgttgatgctatcatcttagttttgtcctcgtttacttgcaggcccatattttttgaggcatttgagaaggtgatatacatttcttctagcttgcgtgttgtgcgggcaactaggttcacgtcatctgcataatatgcc

SEQ ID NO: 102 - DNA, 2309 bp, Diabrotica virgifera
  SmartBlast Evalue=1E-47; Info=Presqualene diphosphate phosphatase n=1 Tax=Culex quinquefasciatus RepID=B0W3S1_CULQU
ctttacccaactttgatttattaaaatcatatctaaatcacggagaatttgaaactctatcaaaccataacaaaattcaatcaggagtcccacaaggtagttcactgggtccacttctttatgtactgtacacatccgatttaccaacctctccacaaaccaccgttggaactttcgctgatgacacagcaatatttgcaactgaagaggatccaacattgcagtattaaaacttcaagaacacctagaccaaattggacagtggttaaagaaatggaagataaaagctaatgaaactaagtcaacacatataactgtcacactaagaaaagaccaatgcccaaatattagccttaatcaagtcaacataccccaacagaatatcgtcaaatacctggggcttcatcttgattctaaataaactggaaacaacgcattttaaagatgaataaacaaattgagttgagagtgaaagaaattaattggcttataggtcgaaaatcttgactctcaattgagaacaaactgctaatttataaaacagtcatcaaacttatatggacgtacggcatagaactatggagttgtgccagcaaatcaattacaaaaattatccaaagaactcaatcaaaaattctacgcaccatcgcaaatgccccgtggtacatctccaaccaaacccttcatagagacctaaacatcccgttagtcagcacagtattcaagaaagagccaacagacaccacgagaaattagaaggccaccccaaccaattaatattaccattactgcagccactaaacaacagaagattgcgaagattaaagttattgtacttgttatcaaattaactcatagaatatgtaattctgattgttaataaatgcttacaaaaaaaaaagaagcttcgaggccaaatatttcaacatccaccaaagtttctagacaaataaagaatattccaagaaaaaatacaatactatacatttttttttaaaatgctttcaaatatttcttattttctaattaatgaaatatacaaaattcacacaggtataaacataaatgatgaaaacagatattacttaattaatacgtttataacgataatttccacctccactagtttcatctctttttgtttcgcaatgtgttatgttttccatcttttgagctattttgcgggtaattagcgcgctcatcactgtataaaaaaaaacagttgtttttagaactctttagcgacgtattagtataaaataatatttatggattactgtcgaaggccatcatgataccaaaaaagaaaatgaatctgctgatttttctagtgacaatattgggtatgaatccagtatgaatctgtctgttgagtttattccgcctaagttaaaacaggttatagtgtgaattaataaaacttacactctaatattcatgtcctacaaataaacaaaactatcttgagctgacaactaggaaaacatgacctgcaacttttattgcaaccaatgttgtttaaacgtggtattccccaccatccaacttctcatcagaaataatattaaacaaccacttagcagtgctgtcttcaacccacaacaaatctatcagtaatccattgaagattcctaagacaacaccaccaagaacatccattatgtaatgtctgttcattaagatcctgctgaccgaaactgatatgctccaaacccagagaaaaggtattaaaagaaagtttaaaggccatagtttggtgtaaaagtatgctacaaatatagccctactagcatggcctgaaggaaaactaaatacgtccacatatttggcgagaggatcatctttgatgttttttggtggccgcttgcgcctgaagtaagctttggctactgctactagtattatatcagtagtaagacctaaaagcatgtttacttgcatttggactagattaggattattaaatagccagctaaaggcaatccaaaatgcaaaccatggaattccatggcaggaaatttctaaagctttacaatgaactctataagcatctaaatctaagattttgttagcccatgtaagaaactcgtttgtaatatatgcatcgtatttcaatattttttgtaatgctggtggaactctacttttaccctccgacattttgcagtatataatgtaaagtccagccaagacttatcttataatcttttacaaacttccaaaaatatataggtccgaaatgttgatgacacacttgtctattggaataaactgtttcgggatctattatattgttttttttaatgtgg

SEQ ID NO: 103 - DNA, 5564 bp, Diabrotica virgifera
  SmartBlast Evalue=1E-73; Info=Reverse transcriptase family member n=1 Tax=Glycine max RepID=Q1AKH8_SOYBN
aggcgcctttcaggattatatatattttgatccttggactgtccactgcttgttctcgggctttcgagcaaatcgatccattctgtaaaaattgcgaggtgaaaagcttcggttcctggacgacaacgtgcaatagcgttattaccctcaatatttgagatttgcaatgcttgggctaggacagaactatttatggtcggcgtggatctgcgcgaagtcttctgtcgtttatcggtaaatgaacatggttcaaaggaagtcagaagctgatacagactaggtacatactcctccaacccttttaactctgctaggaacaatcagtgccttggtaattttactatggagtggtctagcgaccgacgttctgtttgaatttttatcatcgtgtaaattaaccaactaactaaaatttctaccgccaacactggtggtgcaccctcgatattagaggggatacgttccatcgaaatggtccgatcatatttatcaaaatgtaaatgtttattaatctcagaataatatggggcgttaactgtgctctcttttcttttcaccattatctattttctatttctctttgccaacgtgaactggcaaagagtgccacgccacattctatgggatcccgtcttaatgcagattattatttttcttatgcaaacatatttattttaatagtatttaaggtaggtttaataataacagcaatgactattgtattacgtagatatataatatattctttaagttctgtagatacaatacgaaatgtgcaggtagctattattgttttttgttttttggtacaaaatattttaaattacttctaacaacataaatatataatgaggattccttttagagaaaagaagtaaaaagaaatacttcgcacagatttataggtgtgctttatcagttcttcatcaattatacgttaatggtctcgatttaacaatgatgtaagtactctttcagactaagacagtctgagaccgatgtgcgcccccggttttcaattgccccaaagcattggtaagccactaaaatcagccagacactaggaagtggctcgtctgtagtcgttcatttaaaaccatgctttgctgcaatttggcggacaccggtgtcagacaccagtgtcttagtcagaaagggtactaaatctccatacctattcaaaagtagataatacaaatatttcatcatcattctctttgccttattcctatgcggggccggcttccctagttgcatttctccacacaattctatcttgggtcatatcaatgttaatcccctttaccaacatgtcctgccttatcgtctccccccaggtcttctttggtcttcctctcctactccttccaggaatctgcacttcagctattcttcgtattgggtgattaacgtctcgacgttgaacatgaccaaaccatcttaacctatgctctctcattttggcatcaattggtgccacacctagacttcccctaatatactcatttctaattttatccttctttgtcactccactcatccatctaagcattctcatttccgccacatgcattcgttgttcctctttctttttcactgcccaacattcagttccgtacatcatagccggtcttatggctgttttatagaattttcccttcagcttcattggaatttttctgtcacacaacacaccactcgcttctttccacttcatccatccagccctaattctactgcatgcatctccatctatttctccattactctgtaataccgatcctaggtacttaaaactattgcttttcacaatcatttcaccatccaaagataccattttatttgtagtagctccatctttaaatgaacattccaaatactctgtttttgtcctactaagttttaaacctttttcctccagagcttgtctccactgttccagtttttgttctaaacttctttccctatttcctattaacactttcccaagtctattacaccagtcagtcctatccattgccaaccgttgccagtttgctgcgcctatttttctcccatcctcatctacaccatccttccatctaagttttggcctacccgtatttctacttcccacaggttgtgacataaggattcttctaggagggttgttatgctgtgatcttgctagatgtcctgcccatcttagtcttcctattttataagagatactacgtctttaccaccaaatatatgtttatatctgtggtatacctcgtagttgtacctcctcctccaaataccattttcacagatgccaccgaatattcctctcaggatccttcgttcaaatataagcagaaggttttcatctgccttggagatggtccatgtctccgatccatatgtcaacactggttgtataagggttttgtatatggttatttttgttttttggcttaagtttctgcttctcatatgtctactcagtccaaaatagcatttgttgctaggattatccttcgcttgatttcttcgtcataacgttctccttggtgatcagggagcctaagtatgtgaatttgtccaccacttcaacggtagagttatcaaccgtgaattggtgaccgatgtttctggcactattgttggatgttgatgctatcatcttagttttctcctcgtttactttcaggcccatattttttgaggcatttgagaaggtggtatacatttcttctagtttgcgtgttgtgcgggcaactaggtccacgtcatctgcatatgccaaaatttggtatgatttattaaaaatatttcctctgttgtctatttggtcatctataattagttattttaaagccttaatgttctacaagtaagttttgttgccaaataatgaaaatctatatatttttataataggtaattaattatttcgaatcgcaagaaaccaagatattgttttattacttattttgattaaaaacaatcaaaataaaattgcttgatttaactattttaataagaaactttttcagagagtttcagaagcttcgaattccaaaactggatcccagaacaccaatttggattccgacaagctcattctacagtgcaacaatgccatcgcatatcaaatgtaattaatagagcattggacaataaacaatattgcacagcagcctttctggacatcagccaagcatttgataaggtatggcacccaggattactttataaaatcaaaaaatctctacacaacaaatactttgacttattaaaatcatatccaaatcacagagaatttgaaactaaagtggaggatgaactatcaaaccgtaacaaaattcaatcaggagtcccacaaggtagtatactgggtccacttctttatgtactgtacacatccgatttaccaacctttccacaaaccacaattggagctttcgctgatgacacagcaatatttgcaactgaagagaattaaacagctgcagtcttaaaacttcaagaacacctagaccaaattggacagtggttaaagaaatggaagataaaagctaatgaaactaagtcaacacatataactgtcacactaagaaaagaccaatgcccaaatattagccttaatcaagtcaacataccccaacagaatatcgtcaaatacctggggcttcatcttgattctaaataaactggaaacaacgcattttaaagatgaataaacaaattgagttgagagtgaaagaaattaattggcttataggtcgaaaatcttgactctcaattgagaacaaactgctaatttataaaacagtcatcaaacttatatggacgtacggcatagaactatggagttgtgccagcaaatcaattacaaaaattatccaaagaactcaatcaaaaattctacgcaccatcgcaaatgccccgtggtacatctccaaccaaacccttcatagagacctaaacatcccgttagtcagcacagtattcaagaaagagccaacagacaccacgagaaattagaaggccaccccaaccaattaatattaccattactgcagccactaaacaacagaagattgcgaagattaaagttattgtacttgttatcaaattaactcatagaatatgtaattctgattgttaataaatgcttacaaaaaaaaaagaagcttcgaggccaaatatttcaacatccaccaaagtttctagacaaataaagaatattccaagaaaaaatacaatactatacatttttttttaaaatgctttcaaatatttcttattttctaattaatgaaatatacaaaattcacacaggtataaacataaatgatgaaaacagatattacttaattaatacgtttataacgataatttccacctccactagtttcatctctttttgtttcgcaatgtgttatgttttccatcttttgagctattttgcgggtaattagcgcgctcatcactgtataaaaaaaaacagttgtttttagaactctttagcgacgtattagtataaaataatatttatggattactgtcgaaggccatcatgataccaaaaaagaaaatgaatctgctgatttttctagtgacaatattgggtatgaatccagtatgaatctgtctgttgagtttattccgcctaagttaaaacaggttatagtgtgaattaataaaacttacactctaatattcatgtcctacaaataaacaaaactatcttgagctgacaactaggaaaacatgacctgcaacttttattgcaaccaatgttgtttaaacgtggtattccccaccatccaacttctcatcagaaataatattaaacaaccacttagcagtgctgtcttcaacccacaacaaatctatcagtaatccattgaagattcctaagacaacaccaccaagaacatccattatgtaatgtctgttcattaagatcctgctgaccgaaactgatatgctccaaacccagagaaaaggtattaaaagaaagtttaaaggccatagtttggtgtaaaagtatgctacaaatatagccctactagcatggcctgaaggaaaactaaatacgtccacatatttggcgagaggatcatctttgatgttttttggtggccgcttgcgcctgaagtaagctttggctactgctactagtattatatcagtagtaagacctaaaagcatgtttacttgcatttggactagattaggattattaaatagccagctaaaggcaatccaaaatgcaaaccatggaattccatggcaggaaatttctaaagctttacaatgaactctataagcatctaaatctaagattttgttagcccatgtaagaaactcgtttgtaatatatgcatcgtatttcaatattttttgtaatgctggtggaactctacttttaccctccgacattttgcagtatataatgtaaagtccagccaagacttatcttataatcttttacaaacttccaaaaatatataggtccgaaatgttgatgacacacttgtctattggaataaactgtttcgggatctattatattgttttttttaatgtgg

SEQ ID NO: 104 - DNA, 2197 bp, Diabrotica virgifera
  SmartBlast Evalue=1E-101; Info=Probable RNA-directed DNA polymerase from transposon X-element n=1 Tax=Drosophila melanogaster RepID=RTXE_DROME
acagatgtagtaccaagttttgatttatcatcagatcatagtcccataattgccacaattagcacaacgttgataatcaaaaaccaacacctcgactgcatagctttaaaacaaactgggacacataccgactaatcatagaacaggaagtaaatctactagtgagattgcaaactcccgaacaaatagaaacagaaactagtaatctaatcgacttacttcaaaatgctgccaaacagtctacccctcaacctggacaaaaaaaaattttcaaccaacattcctcttgaaataaaaagactagtagcagaaaaacgaaaagccagatcaatttggcaaagaactcacagaccagacgacaggacagtttataataacaaaacaagaaacttaaaaacagctctagaacagatgagaaacaactcatttgaaaactatgtatcaaacctttcgcgtcaagataactctatctggaaaccaatcaaaaacaaaaataaaccaataaatacttcacctccaattcggaaaaacacattaccaccaggaccatgggcaaaaagcaacaaagaaaaagctgatttatttgctgaacatctaactgaagtcttcgaccaagtacaagaagtagagcaggaactagccttaccaattaatcaacgagagcgactaactttaattacaccgaaggagatcaaagatgaaattaatcatttgaatgaaaagaaggcaccaggcactgatctcataacagcaacaatgctaaaacaacttcctaaaaaaggtatcatgaagttattgtacatattaaatgcaatcttaagacttaattattggcctatatcactaaaaattgcccaagtaattatgataccgaaacctggtaaagctttaacggatgtttcatcataccgcccaataagtctactgccaataatgtcaaaacttcttgaaaagctgttacttaaaaaattatgagcgacctagaattccaaaactggatcccagaacaccaatttggattccggcaaggtcattctacagtgcaacaatgccatcgcatatcaaatgtaattaatagagctttggacaataaacagtattgcacagcagcctttctggacattagccaagcatttgataaggtatggcacccaggattactttataaaatcaaaaaatccctacccaacaaatactttgacttattaaaatcatatctaaatcacagagaatttgaaactaaagtggaggatgaactatcaaaccgtaacaaaattcaatcaggagtcccacaaggtagtatattgggtccacttctttatgtactgtacacatccgatttaccaacctctccacaaaccaccattggaactttcgctgatgacacagcaatatttgcaactgaagaggatccaagaactgcagtattaaaacttcaagaacacctagaccaaattggacagtggttaaagaaatggaagataaaagctaacgaaactaagtcaacacatataactttcacactaaggaaagaccaatgcccaaatattagccttaatcaagtcaacataccacaacagaacatcgtcaaatacctggggcttcatcttgattctaaattaaactggaaacaacacattttaaagaagaagaaacaaattgagttgagagtgaaagaaataaattggcttataggtagaaaatctcgactctcaattgagaacaaactgctgatttataaaacagtcatcaaacctatatggacgtacggtatagaactatggagttgtgccagcaaatcaaacacaaaaattatccaaagaactcaatcaaaaattctacgcaccatcgcaaatgccccgtggtacatttccaaccaaacccttcatacagacctaaacatcccgttagtcagcacagtaattcaagaaagagccaacagacatcacgagaaattggaagaccaccccaaccaattaatattaccattactgcagccactaaacaacagaagattgcgaagattatggcccatagatcttcgctgaaactgaggtgaaaccgctgggtgatgtacctcataacgccattttagtgtacaataatacattgatatatgttattgtacttgttatcaaattagcttatataatatgtaattatgattgctaataaatgcttacaaaaaaaaaaaaat

SEQ ID NO: 105 - DNA, 1960 bp, Diabrotica virgifera
  SmartBlast Evalue=6E-96; Info=Reverse transcriptase family member n=1 Tax=Glycine max RepID=Q1AKH8_SOYBN
atcatcatcattctctttgcttatccctatgcggggtcggcttccctaattgcatttctccacacaattatattttgggtcatatcaatgttaatcccctttaccaacatgtcctgcttatcgtctccccccaggtcttctttggtcttcctctcctactctttccagaaacctgcacttcagctattcttcatattgggtgattaagtctcgacgttgaacatgaccaaaccatcttaacctatgctctctcattttggcatcaattggtgccacacctagacttcccctaatatactcatttctaattttatccttctttgtcactccactcatccatctaagcattctcatttccgccacatgcattcgttgttcctctttctttttcactgcccaacattcagttccgtacatcatagccggtcttatggctgttttatagaattttcccttcagcttcattggaatttttctgtcacacaacacaccactcgcttctttccacttcatccatccagccctaattctactgcatgcatctccatctatttctccattactctgtaataccgatcctaggtacttaaaactattgctttttacaatcattcaccatccaaagataccattttatttgtagtaactccatctttaaatgaacattccaaatactctgtttttgtcctactaagttttaaacctttttcctccagagcttgtctccactgttccagtttttgttctaagtctctttcactatttcctattaacactacatcatcagcatacattaggcaccatggaatactaccctgtagtttcgctgttatctggtccaaaactaatgagaataaataaggactaagcaccgagccttggtgcaatcctactttcacctgaaatttatcagtctctcccacacctgtcctaacactagtcgttactccctcatacatatctctcacaatctttacatattcgccagggactcctttcttattgagtgcccaccacagaatctctcgaggaactctatcatatgctttctcaagatcatgaataccaacgctcgtcttcatacttatctgctcttataataataacctttaaaacggtctattatcattccgcatcttttttttgcatattgtctgctaatagtttcatcttatgtttttctatttattctttatttcattcgcccgcttctttcttttgattgtttcaaccacgtgctagaagaagtatcggccctccgcgcaagagctagagtgacaatcttccatagaggtatcaatcatccaattaacaagccaaattactcatataaaggaaggagaagaagaagagcatgtgaatactagtaataggaatctaatcggctagtgaatagctttggagatatcaggtctttctgtctaatagtttttttacttcaatcggttttgtgtggacaaaaatgggcaaattgttatagtgtgacaatccttagaaatgtcttttatctcttgaatccatggtctactcagtttttccttgacacatttatcaatgcttatgttccaaccatatttttaagttgtattcatgtattgtattcgtgtattgttgtattcatgtgattttctgacatgagtttttccctattcaataattttcttgtaccctgtacgcgactgatttttcaattacttcatacatatgcgcgcgcatttttcattataaatatactcaaaaattcttgaaaacttttacagatgttctatcgttattcttaaaaacctttcttcatgttctgttgtcatttttgttatcttacgttctatgactaatgctatattcttatttttctaaatatctaccttttctaatcagatttcactttatatttttatttatcacgttttttattgtaccatattttcttttttgttataaataaacatgttaaaacgta

SEQ ID NO: 106 - DNA, 2114 bp, Diabrotica virgifera
tggttctttgatgtacccagtacaatttaatgttataagtcttgctgtgtaacagcttttatcgatgtggtgctataaagataattttagcgaatcttgcataacataagtctttatttccaattttttctttgtttttctctctctctcttgagcagtattcatagggttaccataatttattaaggccaaatccggacaggggtagtccatggggttgtaggaaagctaaaatgtgaatttgactgtgtgtggctacctctacattgtacatacagtgtgttccaacgaaaatttgacccctcctccaaactcagaaactaagagtttcttcacaaaaacacgtcaatttgtattggaggggggacgaattttcatgcaaaattcatgctctcaaatgtaaccccctactgaccccagtgttttttaattagcaagtgtgtcgagttgcacatcatttgaaaggtagtttttttttctctacacgaccctctatttttttaatttgcgaaataactttaaagacagttttggatttaactaatttataatacatttgttaagttcaaaattgtcttcaaacttgttatgtaaattaaaaaaaaaatagtgtcgtgtagagaaaaaaattacctttcaaatgatgtgccactcgatcacacttgctatttaaaaaaaaagtgggggttgatgcggggcagtggagggttacatttgagggcatgaagtttgcatgaaagttcgttcccctcccattataaattgacgtatttttaaaatttttaagaagctcttggtttctgagtttctggggtggtcagattttcgatggaacagactgtatatgcgaaatgcatatggcacaattaaaagtacagctgtttcgctacaatatgcaactaacatcgaaaatatttgcaagtttaaaatacatatacacctatgttttaacatactttagacctagaacttaactaggtgctgcgcagaatgaaatttcccaccgttgggccaagtgttttccatttttttagtaaagcaaaaaatccggacatttctcatatccggacgccaatccggacatgccgttcaaatccggactgtccggatgaaatccggacgtatggtaaccctaagtattcatcaactgattcatgggttttgttcttttagacttgttttttcttcttgtgaagccctttgtagtcccatcaatagtattggactatcgcgtgctattaaatttaggatgtcatatgtgtaatattctcttggtgtagttggaactcttcttagaagtttgcctcaaaaatttgtatttcttgtcagcttcacgattctagaaatggtgagtctgatttaaagatcttgttaagctaccaagattatgaatttgcacgtgatttccacaggacttccacaaagtagccagcaaactatatttctactatatttctggctagtgctttgatttcagccagggtttccccatttctttctcttcgtccagtattgcccttttccaagtttttaagtctgcatactttctgtcagccttcagaattccaatccagcactgttcttacaatgtcatctgttgtgtcaatgttgtgtacggagtgtgtggtccaggcatctcgataattttcttcgccttatttgctttatggcatttttttggttggcttgggtctccacaaattttcatttaaaattcgatgaggccaaaatatcatcatcaatggtgctacagcactatgaaagagcctcgaccttctcaagtctattacgccagtcagtcctatccattgccaactgttgccagtttgctgcgcgtatttttctaccattttggcctacccctatttctacttcccacaggttgtgacataaggattcttctaggagggttgttatgctgtgatcttgctagatgtcctgcccatcttagtcttcctattcttataagagatactacgtctttaccaccaaatttttgttatatctgtggtataccatacctcgtagttgtacctcggaaacaccattttcacagatgccacggaatattcccctcaggatccttcgttcaaatataagcagaaggttttcat

SEQ ID NO: 107 - DNA, 1896 bp, Diabrotica virgifera
  SmartBlast Evalue=4E-98; Info=Reverse transcriptase family member n=1 Tax=Glycine max RepID=Q1AKH8_SOYBN
aattctatcttgggtcatatcaatgttaatcccctttaccaacatgtcctgccttatcgtctccccccaggtcttctttggtcttcctctcctactccttccaggaatctgcacttcagctattcttcgtattgggtgattaagtctcgacgttgaacatgaccaaaccatcttaacctatgctctctcattttggcatcaattggtgccacacctagacttcccctaatatactcatttctaattttatccttctttgtcactccactcatccatctaagcattctcatttccgccacatgcattcgttgttcctctttctttttcactgcccaacattcagttccgtacatcatagccggtcttatggctgttttatagaattttcccttcagcttcattggaatttttctgtcacacaacacaccactcgcttctttccacttcatccatccagccctaattctactgcatgcatctccatctatttctccattactctgtaataccgatcctaggtacttaaaactattgctttttacaatcattcaccatccaaagataccattttatttgtagtaactccatctttaaatgaacattccaaatactctgtttttgtcctactaagttttaaacctttttcctccagagcttgtctccactgttccagtttttgttctaagtctctttcactatttcctattaacactacatcatcagcatacattaggcaccatggaatactaccctgtagtttcgctgttatctggtccaaaactaatgagaataaataaggactaagcaccgagccttggtgcaatcctactttcacctgaaatttatcagtctctcccacacctgtcctaacactagtcgttactccctcatacatatctctcacaatctttacatattcgccagggactcctttcttattgagtgcccaccacagaatctctcgaggaactctatcatatgctttctcaagatcatgaataccaacgctcgtcttcatacttatctgctcttataataataacctttaaaacggtctattatcattccgcatcttttttttgcatattgtctgctaatagtttcatcttatgtttttctatttattctttatttcattcgcccgcttctttcttttgattgtttcaaccacgtgctagaagaagtatcggccctccgcgcaagagctagagtgacaatcttccatagaggtatcaatcatccaattaacaagccaaattactcatataaaggaaggagaagaagaagagcatgtgaatactagtaataggaatctaatcggctagtgaatagctttggagatatcaggtctttctgtctaatagtttttttacttcaatcggttttgtgtggacaaaaatgggcaaattgttatagtgtgacaatccttagaaatgtcttttatctcttgaatccatggtctactcagtttttccttgacacatttatcaatgcttatgttccaaccatatttttaagttgtattcatgtattgtattcgtgtattgttgtattcatgtgattttctgacatgagtttttccctattcaataattttcttgtaccctgtacgcgactgatttttcaattacttcatacatatgcgcgcgcatttttcattataaatatactcaaaaattcttgaaaacttttacagatgttctatcgttattcttaaaaacctttcttcatgttctgttgtcatttttgttatcttacgttctatgactaatgctatattcttatttttctaaatatctaccttttctaatcagatttcactttatatttttatttatcacgttttttattgtaccatattttcttttttgttataaataaacatgttaaaacgta

SEQ ID NO: 108 - DNA, 1907 bp, Diabrotica virgifera
  SmartBlast Evalue=5E-24; Info=Putative uncharacterized transposon-derived protein F52C9.6 (Fragment) n=2 Tax= Camponotus floridanus RepID=E2ALS0_9HYME
caatgaactttttattatagcataatattatagctggtttattttaaacctatttttatacaacggactttcggctataacggacaccccgtccgcccaattagtccgttatatcgaggttttactgtagtcacacaataggacaacttttataaaagcctatgtgtttataaacataatcctggcaatccttcaagttaaataacaccatttttaaacaagatggggaatattgacttgtaaaataaagaacatatatatgccaagagaatgtgttgtgaagttgctctaacgtttttttcaccctactgacaaaattgaagatatttttttttgaatcttcttccatgatgagcaaaataaaaaaaaacttatatagctatagatatagctttgaatatcacgcgaaaactatgttatttgaaatcacaataggtacaagcttggctttttctgcactttttccaacaaaattaagataagtattatgtatgataaggaagctaggagcaataatgttgttgaacatttttcttgggctctataaataaaaaaacatacccaacaccgctaactttttctaaaacttaaaatacatatctgatttacagtgatagtaaaataaatatagttgcaggtcacttaatataaagataatattaatttatgatgccatggcacggagagctggaaccttttaagagacactaaggaacaaagtgaaatagtttattacatcaaatgaaaaggagtaggtacaggaataacaaaaataataaaaattcgaaagttacaatatttcgggcatacaatgaggcatccagaaggtataagcttctacacctgataataccaaaatcaccggaaatagaggcccagaccgaagaaggacatcctgggttcgaaattttcgagaatggtatcaagaaacaccctgtaatatgtttcgagctaccgtagacaaagttattattggcaaacattcgataatcggacagggtactgaaagaatatgacgtcatcaatcaatactaccaacataataccaaataatttgcaaaatggtcatcttatcatcatcatcaatggtgctacagccctatgaaagagcctcgaccttcccaaatctattacgccagtcagtcctatccattgccaaccgttaccagtttactgcgcgtatttttctcccatcctcatgtacaccatccttccatctaagttttggcctacccctatttctacttcccacaggttgtgacataaggattcttctaggagggttgttatgctgtgatcttgctagatgtcctgcccatcttagtcttcctattttataagagatactacgtctttaccaccaaatatatgtttatatctgtggtatacctcgtagttgtacctcctcctccaaataccattttcacagatgccaccgaatattcctctcaggatccttcgttcaaatataagcagaaggttttcatctgccttggagatggtccatgtctccgatccatatgtcaacactggttgtataagggttttgtatatggttatttttgttttttggcttaagtttctgcttctcatatgtctactcagtccaaaatagcatttgttgctaggattatccttcgcttgatttcttcgtcataacgttctccttggtgatcagggagcctaagtatgtgaatttgtccaccacttcaacggtagagttatcaaccgtgaattggtgaccgatgtttctggcactattgttggatgttgatgctatcatcttagttttgtcctcgtttacttgcaggcccatattttttgaggcatttgagaaggtgatatacatttcttctagcttgcgtgttgtgcgggcaactaggttcacgtcatctgcataatatgcc

SEQ ID NO: 109 - DNA, 1857 bp, Diabrotica virgifera
  SmartBlast Evalue=5E-24; Info=Putative uncharacterized transposon-derived protein F52C9.6 (Fragment) n=2 Tax= Camponotus floridanus RepID=E2ALS0_9HYME
caatgaactttttattatagcataatattatagctggtttattttaaacctatttttatacaacggactttcggctataacggacaccccgtccgcccaattagtccgttatatcgaggttttactgtagtcacacaataggacaacttttataaaagcctatgtgtttataaacataatcctggcaatccttcaagttaaataacaccatttttaaacaagatggggaatattgacttgtaaaataaagaacatatatatgccaagagaatgtgttgtgaagttgctctaacgtttttttcaccctactgacaaaattgaagatatttttttttgaatcttcttccatgatgagcaaaataaaaaaaaacttatatagctatagatatagctttgaatatcacgcgaaaactatgttatttgaaatcacaataggtacaagcttggctttttctgcactttttccaacaaaattaagataagtattatgtatgataaggaagctaggagcaataatgttgttgaacatttttcttgggctctataaataaaaaaacatacccaacaccgctaactttttctaaaacttaaaatacatatctgatttacagtgatagtaaaataaatatagttgcaggtcacttaatataaagataatattaatttatgatgccatggcacggagagctgtagtaggaggagtaggtacaggaataacaaaaataataaaaattcgaaagttacaatatttcgggcatacaatgaggcatccagaaggtataagcttctacacctgataataccaaaatcaccggaaatagaggcccagaccgaagaaggacatcctgggttcgaaattttcgagaatggtatcaagaaacaccctgtaatatgtttcgagctaccgtagacaaagttattattggcaaacattcgataatcggacagggtactgaaagaatatgacgtcatcaatcaatactaccaacataataccaaataatttgcaaaatggtcatcttatcatcatcatcaatggtgctacagccctatgaaagagcctcgaccttcccaaatctattacgccagtcagtcctatccattgccaaccgttaccagtttactgcgcgtatttttctcccatcctcatgtacaccatccttccatctaagttttggcctacccctatttctacttcccacaggttgtgacataaggattcttctaggagggttgttatgctgtgatcttgctagatgtcctgcccatcttagtcttcctattttataagagatactacgtctttaccaccaaatatatgtttatatctgtggtatacctcgtagttgtacctcctcctccaaataccattttcacagatgccaccgaatattcctctcaggatccttcgttcaaatataagcagaaggttttcatctgccttggagatggtccatgtctccgatccatatgtcaacactggttgtataagggttttgtatatggttatttttgttttttggcttaagtttctgcttctcatatgtctactcagtccaaaatagcatttgttgctaggattatccttcgcttgatttcttcgtcataacgttctccttggtgatcagggagcctaagtatgtgaatttgtccaccacttcaacggtagagttatcaaccgtgaattggtgaccgatgtttctggcactattgttggatgttgatgctatcatcttagttttgtcctcgtttacttgcaggcccatattttttgaggcatttgagaaggtgatatacatttcttctagcttgcgtgttgtgcgggcaactaggttcacgtcatctgcataatatgcc

SEQ ID NO: 110 - DNA, 1567 bp, Diabrotica virgifera
  SmartBlast Evalue=3E-64; Info=Reverse transcriptase family member n=1 Tax=Glycine max RepID=Q1AKH8_SOYBN
atcatcatcattctctttgcttatccctatgcggggtcggcttccctaattgcatttctccacacaattatattttgggtcatatcaatgttaatcccctttaccaacatgtcctgcttatcgtctccccccaggtcttctttggtcttcctctcctactctttccagaaacctgcacttcagctattcttcatattgggtgattaagtctcgacgttgaacatgaccaaaccatcttaacctatgctctctcattttggcatcaattggtgccacacctagacttcccctaatatactcatttctaattttatccttctttgtcactccactcatccatctaagcattctcatttccgccacatgcattcgttgttcctctttctttttcactgcccaacattcagttccgtacatcatagccggtcttatggctgttttatagaattttcccttcagcttcattggaatttttctgtcacacaacacaccactcgcttctttccacttcatccatccagccctaattctactgcatgcatctccatctatttctccattactctgtaataccgatcctaggtacttaaaactattgcttttcacaatcatttcaccatccaaagataccattttatttgtagtagctccatctttaaatgaacattccaaatactctgtttttgtcctactaagttttaaacctttttcctccagagcttgtctccactgttccagtttttgttctaaacttctttccctatttcctattaacactttcccaagtctattacaccagtcagtcctatccattgccaaccgttgccagtttgctgcgcctatttttctcccatcctcatctacaccatccttccatctaagttttggcctacccgtatttctacttcccacaggttgtgacataaggattcttctaggagggttgttatgctgtgatcttgctagatgtcctgcccatcttagtcttcctattttataagagatactacgtctttaccaccaaatatatgtttatatctgtggtatacctcgtagttgtacctcctcctccaaataccattttcacagatgccaccgaatattcctctcaggatccttcgttcaaatataagcagaaggttttcatctgccttggagatggtccatgtctccgatccatatgtcaacactggttgtataagggttttgtatatggttatttttgttttttggcttaagtttctgcttctcatatgtctactcagtccaaaatagcatttgttgctaggattatccttcgcttgatttcttcgtcataacgttctccttggtgatcagggagcctaagtatgtgaatttgtccaccacttcaacggtagagttatcaaccgtgaattggtgaccgatgtttctggcactattgttggatgttgatgctatcatcttagttttgtcctcgtttacttgcaggcccatattttttgaggcatttgagaaggtgatatacatttcttctagcttgcgtgttgtgcgggcaactaggttcacgtcatctgcataatatgcc

SEQ ID NO: 111 - DNA, 1503 bp, Diabrotica virgifera
  SmartBlast Evalue=2E-66; Info=Reverse transcriptase family member n=1 Tax=Glycine max RepID=Q1AKH8_SOYBN
aattctatcttgggtcatatcaatgttaatcccctttaccaacatgtcctgccttatcgtctccccccaggtcttctttggtcttcctctcctactccttccaggaatctgcacttcagctattcttcgtattgggtgattaagtctcgacgttgaacatgaccaaaccatcttaacctatgctctctcattttggcatcaattggtgccacacctagacttcccctaatatactcatttctaattttatccttctttgtcactccactcatccatctaagcattctcatttccgccacatgcattcgttgttcctctttctttttcactgcccaacattcagttccgtacatcatagccggtcttatggctgttttatagaattttcccttcagcttcattggaatttttctgtcacacaacacaccactcgcttctttccacttcatccatccagccctaattctactgcatgcatctccatctatttctccattactctgtaataccgatcctaggtacttaaaactattgcttttcacaatcatttcaccatccaaagataccattttatttgtagtagctccatctttaaatgaacattccaaatactctgtttttgtcctactaagttttaaacctttttcctccagagcttgtctccactgttccagtttttgttctaaacttctttccctatttcctattaacactttcccaagtctattacaccagtcagtcctatccattgccaaccgttgccagtttgctgcgcctatttttctcccatcctcatctacaccatccttccatctaagttttggcctacccgtatttctacttcccacaggttgtgacataaggattcttctaggagggttgttatgctgtgatcttgctagatgtcctgcccatcttagtcttcctattttataagagatactacgtctttaccaccaaatatatgtttatatctgtggtatacctcgtagttgtacctcctcctccaaataccattttcacagatgccaccgaatattcctctcaggatccttcgttcaaatataagcagaaggttttcatctgccttggagatggtccatgtctccgatccatatgtcaacactggttgtataagggttttgtatatggttatttttgttttttggcttaagtttctgcttctcatatgtctactcagtccaaaatagcatttgttgctaggattatccttcgcttgatttcttcgtcataacgttctccttggtgatcagggagcctaagtatgtgaatttgtccaccacttcaacggtagagttatcaaccgtgaattggtgaccgatgtttctggcactattgttggatgttgatgctatcatcttagttttgtcctcgtttacttgcaggcccatattttttgaggcatttgagaaggtgatatacatttcttctagcttgcgtgttgtgcgggcaactaggttcacgtcatctgcataatatgcc

SEQ ID NO: 112 - DNA, 1809 bp, Diabrotica virgifera
  SmartBlast Evalue=1E-78; Info=Probable RNA-directed DNA polymerase from transposon X-element n=1 Tax=Drosophila melanogaster RepID=RTXE_DROME
acagatgtagtaccaagttttgatttatcatcagatcatagtcccataattgccacaattagcacaacgttgataatcaaaaaccaacacctcgactgcatagctttaaaacaaactgggacacataccgactaatcatagaacaggaagtaaatctactagtgagattgcaaactcccgaacaaatagaaacagaaactagtaatctaatcgacttacttcaaaatgctgccaaacagtctacccctcaacctggacaaaaaaaaattttcaaccaacattcctcttgaaataaaaagactagtagcagaaaaacgaaaagccagatcaatttggcaaagaactcacagaccagacgacaggacagtttataataacaaaacaagaaacttaaaaacagctctagaacagatgagaaacaactcatttgaaaactatgtatcaaacctttcgcgtcaagataactctatctggaaaccaatcaaaaacaaaaataaaccaataaatacttcacctccaattcggaaaaacacattaccaccaggaccatgggcaaaaagcaacaaagaaaaagctgatttatttgctgaacatctaactgaagtcttcgaccaagtacaagaagtagagcaggaactagccttaccaattaatcaacgagagcgactaactttaattacaccgaaggagatcaaagatgaaattaatcatttgaatgaaaagaaggcaccaggcactgatctcataacagcaacaatgctaaaacaacttcctaaaaaaggtatcatgaagttattgtacatattaaatgcaatcttaagacttaattattggcctatatcactaaaaattgcccaagtaattatgataccgaaacctggtaaagctttaacggatgtttcatcataccgcccaataagtctactgccaataatgtcaaaacttcttgaaaagctgttacttaaaaaattatgagcgacctagaattccaaaactggatcccagaacaccaatttggattccgacaagctcattctacagtgcaacaatgccatcgcatatcaaatgtaattaatagagcattggacaataaacaatattgcacagcagcctttctggacatcagccaagcatttgataaggtatggcacccaggattactttataaaatcaaaaaatctctacacaacaaatactttgacttattaaaatcatatccaaatcacagagaatttgaaactaaagtggaggatgaactatcaaaccgtaacaaaattcaatcaggagtcccacaaggtagtatactgggtccacttctttatgtactgtacacatccgatttaccaacctttccacaaaccacaattggagctttcgctgatgacacagcaatatttgcaactgaagagaattaaacagctgcagtcttaaaacttcaagaacacctagaccaaattggacagtggttaaagaaatggaagataaaagctaatgaaactaagtcaacacatataactgtcacactaagaaaagaccaatgcccaaatattagccttaatcaagtcaacataccccaacagaatatcgtcaaatacctggggcttcatcttgattctaaataaactggaaacaacacattttaaagaagaagaaacaaactgagttgagagtgaaagaaattaattggtttataggtcgaaaatctcgactctcaattgagaacaaactgctcatttataaaacagtcatcaaacctatatggacttacggtatacaactatggagttgtgccagcaaatcaaatacaaa

SEQ ID NO: 113 - DNA, 1631 bp, Diabrotica virgifera
tggttctttgatgtacccagtacaatttaatgttataagtcttgctgtgtaacagcttttatcgatgtggtgctataaagataattttagcgaatcttgcataacataagtctttatttccaattttttctttgtttttctctctctctcttgagcagtattcatagggttaccataatttattaaggccaaatccggacaggggtagtccatggggttgtaggaaagctaaaatgtgaatttgactgtgtgtggctacctctacattgtacatacagtgtgttccaacgaaaatttgacccctcctccaaactcagaaactaagagtttcttcacaaaaacacgtcaatttgtattggaggggggacgaattttcatgcaaaattcatgctctcaaatgtaaccccctactgaccccagtgttttttaattagcaagtgtgtcgagttgcacatcatttgaaaggtagtttttttttctctacacgaccctctatttttttaatttgcgaaataactttaaagacagttttggatttaactaatttataatacatttgttaagttcaaaattgtcttcaaacttgttatgtaaattaaaaaaaaaatagtgtcgtgtagagaaaaaaattacctttcaaatgatgtgccactcgatcacacttgctatttaaaaaaaaagtgggggttgatgcggggcagtggagggttacatttgagggcatgaagtttgcatgaaagttcgttcccctcccattataaattgacgtatttttaaaatttttaagaagctcttggtttctgagtttctggggtggtcagattttcgatggaacagactgtatatgcgaaatgcatatggcacaattaaaagtacagctgtttcgctacaatatgcaactaacatcgaaaatatttgcaagtttaaaatacatatacacctatgttttaacatactttagacctagaacttaactaggtgctgcgcagaatgaaatttcccaccgttgggccaagtgttttccatttttttagtaaagcaaaaaatccggacatttctcatatccggacgccaatccggacatgccgttcaaatccggactgtccggatgaaatccggacgtatggtaaccctagttataacgaatataacattaaacaaatcaagagttattgatgaatttaagcaaacaatatttcttttctgattttttttcttagataacttatccggtttttcaccggttattacttaaaaagaaaaaaaccagttaaaaccgggacaaaaaaacaaccgataaaaccggttttaagttaaaaccggcaggtttttcccatccctagcccaagcgtaatgcattaatatacgaaatatgttaggtaaagtccgtgattgataatacacatttataacatttattctaacatgacattttagttaaatctgacagttgtcatattttatttgcaatttggtatttttaaatggtattttctttgatttgtatagtcttataaattgtacagcttatattcgtagatatattatataattcgtaattttttttcgattatagcgccatctatcgacaactagaataaatgttataaatgtctctaatcacagacgtg

SEQ ID NO: 114 - DNA, 5570 bp, Diabrotica virgifera
  SmartBlast Evalue=1E-73; Info=Reverse transcriptase family member n=1 Tax=Glycine max RepID=Q1AKH8_SOYBN
aggcgcctttcaggattatatatattttgatccttggactgtccactgcttgttctcgggctttcgagcaaatcgatccattctgtaaaaattgcgaggtgaaaagcttcggttcctggacgacaacgtgcaatagcgttattaccctcaatatttgagatttgcaatgcttgggctaggacagaactatttatggtcggcgtggatctgcgcgaagtcttctgtcgtttatcggtaaatgaacatggttcaaaggaagtcagaagctgatacagactaggtacatactcctccaacccttttaactctgctaggaacaatcagtgccttggtaattttactatggagtggtctagcgaccgacgttctgtttgaatttttatcatcgtgtaaattaaccaactaactaaaatttctaccgccaacactggtggtgcaccctcgatattagaggggatacgttccatcgaaatggtccgatcatatttatcaaaatgtaaatgtttattaatctcagaataatatggggcgttaactgtgctctcttttcttttcaccattatctattttctatttctctttgccaacgtgaactggcaaagagtgccacgccacattctatgggatcccgtcttaatgcagattattatttttcttatgcaaacatatttattttaatagtatttaaggtaggtttaataataacagcaatgactattgtattacgtagatatataatatattctttaagttctgtagatacaatacgaaatgtgcaggtagctattattgttttttgttttttggtacaaaatattttaaattacttctaacaacataaatatataatgaggattccttttagagaaaagaagtaaaaagaaatacttcgcacagatttataggtgtgctttatcagttcttcatcaattatacgttaatggtctcgatttaacaatgatgtaagtactctttcagactaagacagtctgagaccgatgtgcgcccccggttttcaattgccccaaagcattggtaagccactaaaatcagccagacactaggaagtggctcgtctgtagtcgttcatttaaaaccatgctttgctgcaatttggcggacaccggtgtcagacaccagtgtcttagtcagaaagggtactaaatctccatacctattcaaaagtagataatacaaatatttcatcatcattctctttgccttattcctatgcggggccggcttccctagttgcatttctccacacaattctatcttgggtcatatcaatgttaatcccctttaccaacatgtcctgccttatcgtctccccccaggtcttctttggtcttcctctcctactccttccaggaatctgcacttcagctattcttcgtattgggtgattaacgtctcgacgttgaacatgaccaaaccatcttaacctatgctctctcattttggcatcaattggtgccacacctagacttcccctaatatactcatttctaattttatccttctttgtcactccactcatccatctaagcattctcatttccgccacatgcattcgttgttcctctttctttttcactgcccaacattcagttccgtacatcatagccggtcttatggctgttttatagaattttcccttcagcttcattggaatttttctgtcacacaacacaccactcgcttctttccacttcatccatccagccctaattctactgcatgcatctccatctatttctccattactctgtaataccgatcctaggtacttaaaactattgcttttcacaatcatttcaccatccaaagataccattttatttgtagtagctccatctttaaatgaacattccaaatactctgtttttgtcctactaagttttaaacctttttcctccagagcttgtctccactgttccagtttttgttctaaacttctttccctatttcctattaacactttcccaagtctattacaccagtcagtcctatccattgccaaccgttgccagtttgctgcgcctatttttctcccatcctcatctacaccatccttccatctaagttttggcctacccgtatttctacttcccacaggttgtgacataaggattcttctaggagggttgttatgctgtgatcttgctagatgtcctgcccatcttagtcttcctattttataagagatactacgtctttaccaccaaatatatgtttatatctgtggtatacctcgtagttgtacctcctcctccaaataccattttcacagatgccaccgaatattcctctcaggatccttcgttcaaatataagcagaaggttttcatctgccttggagatggtccatgtctccgatccatatgtcaacatcggttgtataagggttttgtataaatatggttatttttgttttttggcttaagtttctgcttctcatatgtctactcagtccaaaatagcatttgttcgctagaattatccttcgcttgatttcttccgtcatgacgttctccttggtgatcagggagcctaagtatgtgaatttgtccaccagttcaaaggtagagttatcaacagtgaattggtgaccgatgtttctggctctattgttgggtgttgatgccaacatcttagttttctcctcgtttactttcaggcccatattttttgaggcatttgagaaggtggtatacatttcttctagtttgcgtgttgtgcgggcaactaggtccacgtcatctgcatatgccaaaatttggtatgatttattaaaaatatttcctctgttgtctatttggtcatctataattagttattttaaagccttaatgttctacaagtaagttttgttgccaaataatgaaaatctatatatttttataataggtaattaattatttcgaatcgcaagaaaccaagatattgttttattacttattttgattaaaaacaatcaaaataaaattgcttgatttaactattttaataagaaactttttcagagagtttcagaagcttcgaattccaaaactggatcccagaacaccaatttggattccgacaagctcattctacagtgcaacaatgccatcgcatatcaaatgtaattaatagagcattggacaataaacaatattgcacagcagcctttctggacatcagccaagcatttgataaggtatggcacccaggattactttataaaatcaaaaaatctctacacaacaaatactttgacttattaaaatcatatccaaatcacagagaatttgaaactaaagtggaggatgaactatcaaaccgtaacaaaattcaatcaggagtcccacaaggtagtatactgggtccacttctttatgtactgtacacatccgatttaccaacctttccacaaaccacaattggagctttcgctgatgacacagcaatatttgcaactgaagagaattaaacagctgcagtcttaaaacttcaagaacacctagaccaaattggacagtggttaaagaaatggaagataaaagctaatgaaactaagtcaacacatataactgtcacactaagaaaagaccaatgcccaaatattagccttaatcaagtcaacataccccaacagaatatcgtcaaatacctggggcttcatcttgattctaaataaactggaaacaacgcattttaaagatgaataaacaaattgagttgagagtgaaagaaattaattggcttataggtcgaaaatcttgactctcaattgagaacaaactgctaatttataaaacagtcatcaaacttatatggacgtacggcatagaactatggagttgtgccagcaaatcaattacaaaaattatccaaagaactcaatcaaaaattctacgcaccatcgcaaatgccccgtggtacatctccaaccaaacccttcatagagacctaaacatcccgttagtcagcacagtattcaagaaagagccaacagacaccacgagaaattagaaggccaccccaaccaattaatattaccattactgcagccactaaacaacagaagattgcgaagattaaagttattgtacttgttatcaaattaactcatagaatatgtaattctgattgttaataaatgcttacaaaaaaaaaagaagcttcgaggccaaatatttcaacatccaccaaagtttctagacaaataaagaatattccaagaaaaaatacaatactatacatttttttttaaaatgctttcaaatatttcttattttctaattaatgaaatatacaaaattcacacaggtataaacataaatgatgaaaacagatattacttaattaatacgtttataacgataatttccacctccactagtttcatctctttttgtttcgcaatgtgttatgttttccatcttttgagctattttgcgggtaattagcgcgctcatcactgtataaaaaaaaacagttgtttttagaactctttagcgacgtattagtataaaataatatttatggattactgtcgaaggccatcatgataccaaaaaagaaaatgaatctgctgatttttctagtgacaatattgggtatgaatccagtatgaatctgtctgttgagtttattccgcctaagttaaaacaggttatagtgtgaattaataaaacttacactctaatattcatgtcctacaaataaacaaaactatcttgagctgacaactaggaaaacatgacctgcaacttttattgcaaccaatgttgtttaaacgtggtattccccaccatccaacttctcatcagaaataatattaaacaaccacttagcagtgctgtcttcaacccacaacaaatctatcagtaatccattgaagattcctaagacaacaccaccaagaacatccattatgtaatgtctgttcattaagatcctgctgaccgaaactgatatgctccaaacccagagaaaaggtattaaaagaaagtttaaaggccatagtttggtgtaaaagtatgctacaaatatagccctactagcatggcctgaaggaaaactaaatacgtccacatatttggcgagaggatcatctttgatgttttttggtggccgcttgcgcctgaagtaagctttggctactgctactagtattatatcagtagtaagacctaaaagcatgtttacttgcatttggactagattaggattattaaatagccagctaaaggcaatccaaaatgcaaaccatggaattccatggcaggaaatttctaaagctttacaatgaactctataagcatctaaatctaagattttgttagcccatgtaagaaactcgtttgtaatatatgcatcgtatttcaatattttttgtaatgctggtggaactctacttttaccctccgacattttgcagtatataatgtaaagtccagccaagacttatcttataatcttttacaaacttccaaaaatatataggtccgaaatgttgatgacacacttgtctattggaataaactgtttcgggatctattatattgttttttttaatgtgg

SEQ ID NO: 115 - DNA, 1268 bp, Diabrotica virgifera
  SmartBlast Evalue=1E-100; Info=Reverse transcriptase family member n=1 Tax=Glycine max RepID=Q1AKH8_SOYBN
ataaggtgcatgcaatgcatcactagattttagttttttttgttagtaggaactgctaatttagaattatttgctgcggtaaacttttattatctttttaggataatagggtaatttaaagacaatttaaatattgcctttaaattgttctttaacattatggttatttcgatgcgtcccctaacttttaagcatcagatccaggcatttttccgattttcaaaacaataattattttcgatatatttcatcatcatcatcatcattctctttgccttatccctatgcggggtcggcttccctaattgcatttctccacacaattctatcttgggtcatatcaatgttaatcccctttaccaacatgtcctgccttatcgtctccccccaggtcttctttggtcttcctctcctactccttccaggaatctgcacttcagctattcttcgtattgggtgattaacgtctcgacgttgaacatgaccaaaccatcttaacctatgctctctcattttggcatcaattggtgccacacctagacttcccctaatatactcatttctaattttatccttctttgtcactccactcatccatctaagcattctcatttccgccacatgcattcgttgttcctctttctttttcactgcccaacattcagttccgtacatcatagccggtcttatggctgttttatagaattttcccttcagcttcattggaatttttctgtcacacaacacaccactcgcttctttccacttcatccatccagccctaattctactgcatgcatctccatctatttctccattactctgtaataccgatcctaggtacttaaaactattgcttttcacaatcatttcaccatccaaagataccattttatttgtagtagctccatctttaaatgaacattccaaatactctgtttttgtcctactaagttttaaacctttttcctccagagcttgtctccactgttccagtttttgttctaagtctctttcactatttcctactaacacgacatcatcagcatacattaagcaccatggaatgttaccctgtattttcgctgttatctggtccaaaactaatgagaataaatacggactaagcacagaaccttgatgcaatcctactttcacatgaaatttatcagtctctcccacacctgtcctaacactagtcgttactccctcatacatatccctcacaatactttacatattcaccagggactcctttcttattgagt

SEQ ID NO: 116 - DNA, 1186 bp, Diabrotica virgifera
  SmartBlast Evalue=9E-94; Info=Reverse transcriptase family member n=1 Tax=Glycine max RepID=Q1AKH8_SOYBN
ataaggtgcatgcaatgcatcactagattttagttttttttgttagtaggaactgctaatttagaattatttgctgcggtaaacttttattatctttttaggataatagggtaatttaaagacaatttaaatattgcctttaaattgttctttaacattatggttatttcgatgcgtcccctaacttttaagcatcagatccaggcatttttccgattttcaaaacaataattattttcgatatatttcatcatcatcatcatcattctctttgccttatccctatgcggggtcggcttccctaattgcatttctccacacaattctatcttgggtcatatcaatgttaatcccctttaccaacatgtcctgccttatcgtctccccccaggtcttctttggtcttcctctcctactccttccaggaatctgcacttcagctattcttcgtattgggtgattaacgtctcgacgttgaacatgaccaaaccatcttaacctatgctctctcattttggcatcaattggtgccacacctagacttcccctaatatactcatttctaattttatccttctttgtcactccactcatccatctaagcattctcatttccgccacatgcattcgttgttcctctttctttttcactgcccaacattcagttccgtacatcatagccggtcttatggctgttttatagaattttcccttcagcttcattggaatttttctgtcacacaacacaccactcgcttctttccacttcatccatccagccctaattctactgcatgcatctccatctatttctccattactctgtaataccgatcctaggtacttaaaactattgcttttcacaatcatttcaccatccaaagataccattttatttgtagtagctccatctttaaatgaacattccaaatactctgtttttgtcctactaagttttaaacctttttcctccagagcttgtctccactgttccagtttttgttctaagtctctttcactatttcctactaacactacatcatcagcatacattaaacaccatggaatgttaccctgtagtttcgctgttttctggtccaaaactaatgagaataaatacggactaagcaccgagccttggtgcaatcctactttcatatgaaatttatcagtctctcccacacct

SEQ ID NO: 117 - DNA, 1227 bp, Diabrotica virgifera
  SmartBlast Evalue=3E-66; Info=Reverse transcriptase family member n=1 Tax=Glycine max RepID=Q1AKH8_SOYBN
ataaggtgcatgcaatgcatcactagattttagttttttttgttagtaggaactgctaatttagaattatttgctgcggtaaacttttattatctttttaggataatagggtaatttaaagacaatttaaatattgcctttaaattgttctttaacattatggttatttcgatgcgtcccctaacttttaagcatcagatccaggcatttttccgattttcaaaacaataattattttcgatatatttcatcatcatcatcatcattctctttgccttatccctatgcggggtcggcttccctaattgcatttctccacacaattctatcttgggtcatatcaatgttaatcccctttaccaacatgtcctgccttatcgtctccccccaggtcttctttggtcttcctctcctactccttccaggaatctgcacttcagctattcttcgtattgggtgattaacgtctcgacgttgaacatgaccaaaccatcttaacctatgctctctcattttggcatcaattggtgccacacctagacttcccctaatatactcatttctaattttatccttctttgtcactccactcatccatctaagcattctcatttccgccacatgcattcgttgttcctctttctttttcactgcccaacattcagttccgtacatcatagccggtcttatggctgttttatagaattttcccttcagcttcattggaatttttctgtcacacaacacaccactcgcttctttccacttcatccatccagccctaattctactgcatgcatctccatctatttctccattactctgtaataccgatcctaggtacttaaaactattgcttttcacaatcatttcaccatccaaagataccattttatttgtagtagctccatctttaaatgaacattccaaatactctgttcttgttatattattatattattggtatatagttaaatataaatgtacattataactttataaaatacgtccaccgataatagccatttcctgtttattataatgacagtaggtacaaatttctacttataatttttctgaaatgaatataacttgaattcaccatttcttgttgtgttttttacaatatacagaatacttttaataacataacgttaatattacttttcttcttataatttttttgggtctatggccttgacaattgtccagtaaccaggaccaata

SEQ ID NO: 118 - DNA, 1010 bp, Diabrotica virgifera
  SmartBlast Evalue=2E-88; Info=Reverse transcriptase family member n=1 Tax=Glycine max RepID=Q1AKH8_SOYBN
atcatcatcattctctttgcttatccctatgcggggtcggcttccctaattgcatttctccacacaattatattttgggtcatatcaatgttaatcccctttaccaacatgtcctgcttatcgtctccccccaggtcttctttggtcttcctctcctactctttccagaaacctgcacttcagctattcttcatattgggtgattaagtctcgacgttgaacatgaccaaaccatcttaacctatgctctctcattttggcatcaattggtgccacacctagacttcccctaatatactcatttctaattttatccttctttgtcactccactcatccatctaagcattctcatttccgccacatgcattcgttgttcctctttctttttcactgcccaacattcagttccgtacatcatagccggtcttatggctgttttatagaattttcccttcagcttcattggaatttttctgtcacacaacacaccactcgcttctttccacttcatccatccagccctaattctactgcatgcatctccatctatttctccattactctgtaataccgatcctaggtacttaaaactattgcttttcacaatcatttcaccatccaaagataccattttatttgtagtagctccatctttaaatgaacattccaaatactctgtttttgtcctactaagttttaaacctttttcctccagagcttgtctccactgttccagtttttgttctaagtctctttcactatttcctactaacacgacatcatcagcatacattaagcaccatggaatgttaccctgtattttcgctgttatctggtccaaaactaatgagaataaatacggactaagcacagaaccttgatgcaatcctactttcacatgaaatttatcagtctctcccacacctgtcctaacactagtcgttactccctcatacatatccctcacaatactttacatattcaccagggactcctttcttattgagt

SEQ ID NO: 119 - DNA, 946 bp, Diabrotica virgifera
  SmartBlast Evalue=1E-90; Info=Reverse transcriptase family member n=1 Tax=Glycine max RepID=Q1AKH8_SOYBN
aattctatcttgggtcatatcaatgttaatcccctttaccaacatgtcctgccttatcgtctccccccaggtcttctttggtcttcctctcctactccttccaggaatctgcacttcagctattcttcgtattgggtgattaagtctcgacgttgaacatgaccaaaccatcttaacctatgctctctcattttggcatcaattggtgccacacctagacttcccctaatatactcatttctaattttatccttctttgtcactccactcatccatctaagcattctcatttccgccacatgcattcgttgttcctctttctttttcactgcccaacattcagttccgtacatcatagccggtcttatggctgttttatagaattttcccttcagcttcattggaatttttctgtcacacaacacaccactcgcttctttccacttcatccatccagccctaattctactgcatgcatctccatctatttctccattactctgtaataccgatcctaggtacttaaaactattgcttttcacaatcatttcaccatccaaagataccattttatttgtagtagctccatctttaaatgaacattccaaatactctgtttttgtcctactaagttttaaacctttttcctccagagcttgtctccactgttccagtttttgttctaagtctctttcactatttcctactaacacgacatcatcagcatacattaagcaccatggaatgttaccctgtattttcgctgttatctggtccaaaactaatgagaataaatacggactaagcacagaaccttgatgcaatcctactttcacatgaaatttatcagtctctcccacacctgtcctaacactagtcgttactccctcatacatatccctcacaatactttacatattcaccagggactcctttcttattgagt

SEQ ID NO: 120 - DNA, 928 bp, Diabrotica virgifera
  SmartBlast Evalue=2E-82; Info=Reverse transcriptase family member n=1 Tax=Glycine max RepID=Q1AKH8_SOYBN
atcatcatcattctctttgcttatccctatgcggggtcggcttccctaattgcatttctccacacaattatattttgggtcatatcaatgttaatcccctttaccaacatgtcctgcttatcgtctccccccaggtcttctttggtcttcctctcctactctttccagaaacctgcacttcagctattcttcatattgggtgattaagtctcgacgttgaacatgaccaaaccatcttaacctatgctctctcattttggcatcaattggtgccacacctagacttcccctaatatactcatttctaattttatccttctttgtcactccactcatccatctaagcattctcatttccgccacatgcattcgttgttcctctttctttttcactgcccaacattcagttccgtacatcatagccggtcttatggctgttttatagaattttcccttcagcttcattggaatttttctgtcacacaacacaccactcgcttctttccacttcatccatccagccctaattctactgcatgcatctccatctatttctccattactctgtaataccgatcctaggtacttaaaactattgcttttcacaatcatttcaccatccaaagataccattttatttgtagtagctccatctttaaatgaacattccaaatactctgtttttgtcctactaagttttaaacctttttcctccagagcttgtctccactgttccagtttttgttctaagtctctttcactatttcctactaacactacatcatcagcatacattaaacaccatggaatgttaccctgtagtttcgctgttttctggtccaaaactaatgagaataaatacggactaagcaccgagccttggtgcaatcctactttcatatgaaatttatcagtctctcccacacct

SEQ ID NO: 121 - DNA, 969 bp, Diabrotica virgifera
  SmartBlast Evalue=3E-55; Info=Reverse transcriptase family member n=1 Tax=Glycine max RepID=Q1AKH8_SOYBN
atcatcatcattctctttgcttatccctatgcggggtcggcttccctaattgcatttctccacacaattatattttgggtcatatcaatgttaatcccctttaccaacatgtcctgcttatcgtctccccccaggtcttctttggtcttcctctcctactctttccagaaacctgcacttcagctattcttcatattgggtgattaagtctcgacgttgaacatgaccaaaccatcttaacctatgctctctcattttggcatcaattggtgccacacctagacttcccctaatatactcatttctaattttatccttctttgtcactccactcatccatctaagcattctcatttccgccacatgcattcgttgttcctctttctttttcactgcccaacattcagttccgtacatcatagccggtcttatggctgttttatagaattttcccttcagcttcattggaatttttctgtcacacaacacaccactcgcttctttccacttcatccatccagccctaattctactgcatgcatctccatctatttctccattactctgtaataccgatcctaggtacttaaaactattgcttttcacaatcatttcaccatccaaagataccattttatttgtagtagctccatctttaaatgaacattccaaatactctgttcttgttatattattatattattggtatatagttaaatataaatgtacattataactttataaaatacgtccaccgataatagccatttcctgtttattataatgacagtaggtacaaatttctacttataatttttctgaaatgaatataacttgaattcaccatttcttgttgtgttttttacaatatacagaatacttttaataacataacgttaatattacttttcttcttataatttttttgggtctatggccttgacaattgtccagtaaccaggaccaata

SEQ ID NO: 122 - DNA, 864 bp, Diabrotica virgifera
  SmartBlast Evalue=1E-84; Info="Polyprotein, putative n=1 Tax= Solanum demissum RepID=Q6L4B3_SOLDE"
aattctatcttgggtcatatcaatgttaatcccctttaccaacatgtcctgccttatcgtctccccccaggtcttctttggtcttcctctcctactccttccaggaatctgcacttcagctattcttcgtattgggtgattaagtctcgacgttgaacatgaccaaaccatcttaacctatgctctctcattttggcatcaattggtgccacacctagacttcccctaatatactcatttctaattttatccttctttgtcactccactcatccatctaagcattctcatttccgccacatgcattcgttgttcctctttctttttcactgcccaacattcagttccgtacatcatagccggtcttatggctgttttatagaattttcccttcagcttcattggaatttttctgtcacacaacacaccactcgcttctttccacttcatccatccagccctaattctactgcatgcatctccatctatttctccattactctgtaataccgatcctaggtacttaaaactattgcttttcacaatcatttcaccatccaaagataccattttatttgtagtagctccatctttaaatgaacattccaaatactctgtttttgtcctactaagttttaaacctttttcctccagagcttgtctccactgttccagtttttgttctaagtctctttcactatttcctactaacactacatcatcagcatacattaaacaccatggaatgttaccctgtagtttcgctgttttctggtccaaaactaatgagaataaatacggactaagcaccgagccttggtgcaatcctactttcatatgaaatttatcagtctctcccacacct

SEQ ID NO: 123 - DNA, 905 bp, Diabrotica virgifera
  SmartBlast Evalue=3E-57; Info=Reverse transcriptase family member n=1 Tax=Glycine max RepID=Q1AKH8_SOYBN
aattctatcttgggtcatatcaatgttaatcccctttaccaacatgtcctgccttatcgtctccccccaggtcttctttggtcttcctctcctactccttccaggaatctgcacttcagctattcttcgtattgggtgattaagtctcgacgttgaacatgaccaaaccatcttaacctatgctctctcattttggcatcaattggtgccacacctagacttcccctaatatactcatttctaattttatccttctttgtcactccactcatccatctaagcattctcatttccgccacatgcattcgttgttcctctttctttttcactgcccaacattcagttccgtacatcatagccggtcttatggctgttttatagaattttcccttcagcttcattggaatttttctgtcacacaacacaccactcgcttctttccacttcatccatccagccctaattctactgcatgcatctccatctatttctccattactctgtaataccgatcctaggtacttaaaactattgcttttcacaatcatttcaccatccaaagataccattttatttgtagtagctccatctttaaatgaacattccaaatactctgttcttgttatattattatattattggtatatagttaaatataaatgtacattataactttataaaatacgtccaccgataatagccatttcctgtttattataatgacagtaggtacaaatttctacttataatttttctgaaatgaatataacttgaattcaccatttcttgttgtgttttttacaatatacagaatacttttaataacataacgttaatattacttttcttcttataatttttttgggtctatggccttgacaattgtccagtaaccaggaccaata

SEQ ID NO: 124 - DNA, 890 bp, Diabrotica virgifera
aaatgatatttccgtacagttgttagtgttctacataaatgatagaaaacacattgctattaaaaccttgtaaattaccttaatcattaaattttctttatctggagcttcctggataaatttttcaatttcttccttcgttaaaatcttcgatttctttgccctataaccttgagcttgccgtttcaataaagaacgaagttttgagtatgtagatatatctacattgtgtttaagtgcaagggttgacttcagcattgaataattggcccataatgttgaagatttcatctttaaacaaaggtctaggaagtatgccattacaacattttctgagaaagaactcgtatttttactcatgcgataatccataaaacgtctgtatgcattttcgtacttttctcttgatttctttggcaataattctaatgaagcagtattcactgcctcaaccagctctggaggagtcccaggaatggaaatttcatcatcacttatcattttactttcgagaacaccagcaattaaatttataagcgtcaagtttgacaattcaacctcaatacgtttccatagtaacccaagtaattttattaggaatttcaaagcaccatttatttgggaataaaattatcgcgtttttttttaaatcaatcaatatctgtcgaattttaaacgatttgcggaaaaatagtatgtttacctcgtaggaaaagccacattcctggactctgtgttgctaagtctcggcttgcgcctcgacttagcaatcttcacagtcgtccaggaatgttaagcttttcctacccggtaaacaatgtactattaatcacttttatttataccatttataatatttaactttttcattaataaattcttaacaaaaa

SEQ ID NO: 125 - DNA, 5821 bp, Diabrotica virgifera
  SmartBlast Evalue=0; Info=Catenin alpha n=3 Tax=Aculeata RepID= E2A263_9HYME
attttatacaaagcacagcgtgaaatctgtgcgcggacaaaaaacttgttatcgccgatttattataatttatatttatgaagtgactgtgtcggtacttaatagctttatgtatattgtgtttgttttcatttaaattttaaatttctataccaaagatatgagccggttgaacatattcagttttttgaaaatgcttcaagcattgtgttgtgtactgggagttacatcagcatcttcagacccagttatagtctccagagaagaatggggggcccgcgctcctaaaaacatagaaaatatggcgaacccagtaccttacgtcgttatccaccacagttatctaccaccagcttgttacaatttaaccgattgtttcaaagccatgcgttggatgcaagaccttcaccaagacaccaacggttgggcggatattggctacaactttggtgttggcggagatggtagagcctacgaaggaaggggatggtccagagttggtgctcatgctccctattacaacagcaaaagtattggaatatgtataattggagattggacagttgaacttccaccagaaaatcagctagcgacagttcatgagctaatacaaaaaggagtgagagaagggtacatccagaaggactacaaattggtaggccataggcaggttagacaaggtaccgaatgtccgggtgacaggctcttcaaagagatacacaagtggcagaatttttgtgaacaaccagacgagatagcagtaaggacaaacaacacttggttccttaaaaaaactgtacatgacaatagtagggataaggaagataaagatgaagacaataatgacaatggtattaataggttagaaaaaagaactgtttagatttaagtaatacattttatttattattaaaaaaacacctatgcagttatgattcatttttgagataaacaatagggtgaatttatttttcttttagtcagatttagtaataaactaagctcgtttagtagtgtatttactaccgatttacgttttattttgtatatagctaagtctcaattaaaaatgatgactgaccgcttcggtttaaaatgggacccgaaaaacttagagataagaaccatgtctgtggaaaagacattggaacccctagtgcttcaagttaccaccctcgtcaataccaaggggcctagcaaaaagaagaaaggaaagtctaaacgtgccaatgctctggttagtactgttgaaaaagccacggaaaacttcatagaaaagggggagcagatagcctatgagaatccagatattactgaggaaatgctggcagctgttgacgaagtcaagaaaacgggacatgctatgagcggagctgcaagagaattttcagaagacccatgttcttctttaaaaagaggaaatatggttagggctgctagaaatcttttatcggctgtaactcgtcttttaattctagcggacatggttgatgtccaccttttgctcaaatccttacatgtagttgaggatgacctcgaaaaactaaaaaatgcttcaagcaatggcgaacttttagacaatattaaagcctttggtcaaaatgccaacgaattaatgaatcaggctgctaaaaggcagcaagaactgaaagatccacaacttcgtgatgatctagcagctgctagagctgtacttaagaaacattccactatgttattaactgcctctaaggtttatgtacgtcatccagagctagcagctgccaaagcaaatagagattatgtcttgaaacaagtttgtgaagctgtgaataccattaatgatgtagctcagggaagaactcctcaacctgcttctggaccatatgatggacctggagagttggctgctgctttggatgattttgatgatcacatggtaatggagcctctagcatacaatgaagttcataccaggccttcattggaagaacgtctagaaagcattataagtggtgcagctcttatggcagattctagttgtactagggatgaaagaagggaaaggatagttgcagagtgtaatgctgtaagacaagctttgcaagacttgttgactgaatatatgacaaatatgggcaataaagataaaagtgagagcctaatacgagcaatcgacaatatgggtagaaagactaaggatttaagaagacaactgagaaaagctgttgtagatcatgtatctgacagtttcttggaaaccaacgtacctcttctcgttttaataaaggcagctcaaaatggcaacgaaaaggaggtagaagaatatgcagttgtatttactgaacattccaataagttagtagaagttgctaaccttgtctgcagcatgtctaataatgaagatggtgtcaaaatggttagatatgctgctgctcagatcgacaatctgtgtcctgaagtaataaatgcagctagaattttagccgctagacctcgcagtaaagttgctcaagaaaatatggacgcattcaagcaatcatgggagaatcaagtgagacttctgactgaagcagtcgatgacattactactatcgacgactttttggctgtttctgaaaaccatattctggaagatgttaataaatgtgtacttgccttgcaagaaggtgattctgacacattggatcgcactgccagtggtataagaggaagatccaatagggtgtgcaatgtagtaacagctgaaatggataattacgaaccttgcatttataccaaacgtgttcttgaagccgtcaaagtattgaatgatcaagtgatgcccaagtttactcaaagagtgcaagttgcagttcaagctttgggaaatagtcctcccaaagaagtggatgaaaacgattttatcgatgcttctagacttgtttacgatggagtgagagaaataagaagagccgttctaatgaatagagccgatgaagatttagatccagaagatgtcgaattggatgaaaactatctaatagaaacaagaagcaaatcgagcgctcacacaggcgaacatggagttgatgagtatccagatattagtggaattacaacggctagggaagctatgggtaaaatgccggaagaagataaacagaagattttgcaacaggttgagttcttcaggagtgaaaaactcaagtttgaccgtgaggtcgctaaatgggacgacactggcaacgatattatcgttcttgctaagcacatgtgtatgattatgatggaaatgacagattttaccaggggtcgtggccctctaaaaaccactatggacgttattaatgcggctaaaaagatttccgaagctggaaccaaattagataaacttactcgccaaatagctgaacagtgcccagagagttccaccaaaaaagatttgttggcttatttgcaacgtattgctctttactgccaccagatgaacattacatcaaaggttaaagccgatgttcaaaacatcagtggagaacttattgtatctgggttggacagtgctacttctttgattcaagctgctaagaacttgatgaatgctgtagttctcacagtaaaagcttcatatgtggcatccaccaaatacccaagacaaggaactattgcatcgccgattgttgtctggaagatgaaagcgccagagaagaagccgttagtcagaccagagaaacccgaagaagttcgtgccaaagtacgcaaaggctcacaaaagaaagttcaaaatccaattcacgctctttctgaattccaaagcccaactgagtctgtgtaaacgtaaacctttatccattaatatattaaccagatgttaactattatttgcctgattattctgtgacattttctatgtacctatagattcgtattaatataaagtctgattagaggcatgttcaagttcatttaacatttgaacagtacatagtaagtccgtagtttcatcaagtgttaaatacagtgtgttctaacgaaaatatgaccccctcccagaaactgagaagccaaggagtttcttcacaatttgaaaatcacgtcaatttgtattggaagagggacgaatgttcatgcaattcatgccctcagatgtaaccccctactgccccccagttttttgaaatagcaagtgtgtcgagttgcacatcatttgaaaggtagtttttttttctctacacgaccctctatttttttaatttgcgaaataactttaaagacagttttggatttaactaatttataatacatttgttaagttcaaaattgtcttcaaacttgttatgtaaattaaaaaaaaaatagtgtcgtgtagagaaaaaaattacctttcaaatgatgtgccactcgatcacacttgctatttaaaaaaaaagtgggggttgatgcggggcagtggagggttacatttgagggcatgaagtttgcatgaaagttcgttcccctcccattataaattgacgtatttttaaaatttttaagaagctcttggtttctgagtttctggggtggtcagattttcgatggaacagactgtatatgcgaaatgcatatggcacaattaaaagtacagctgtttcgctacaatatgcaactaacatcgaaaatatttgcaagtttaaaatacatatacacctatgttttaacatactttagacctagaacttaactaggtgctgcgcagaatgaaatttcccaccgttgggccaagtgttttccatttttttagtaaagcaaaaaatccggacatttctcatatccggacgccaatccggacatgccgttcaaatccggactgtccggatgaaatccggacgtatggtaaccctaagtattcatcaactgattcatgggttttgttcttttagacttgttttttcttcttgtgaagccctttgtagtcccatcaatagtattggactatcgcgtgctattaaatttaggatgtcatatgtgtaatattctcttggtgtagttggaactcttcttagaagtttgcctcaaaaatttgtatttcttgtcagcttcacgattctagaaatggtgagtctgatttaaagatcttgttaagctaccaagattatgaatttgcacgtgatttccacaggacttccacaaagtagccagcaaactatatttctactatatttctggctagtgctttgatttcagccagggtttccccatttctttctcttcgtccagtattgcccttttccaagtttttaagtctgcatactttctgtcagccttcagaattccaatccagcactgttcttacaatgtcatctgttgtgtcaatgttgtgtacggagtgtgtggtccaggcatctcgataattttcttcgccttatttgctttatggcatttttttggttggcttgggtctccacaaattttcatttaaaattcgatgaggccaaaatatcatcatcaatggtgctacagcactatgaaagagcctcgaccttctcaagtctattacgccagtcagtcctatccattgccaactgttgccagtttgctgcgcgtatttttctaccattttggcctacccctatttctacttcccacaggttgtgacataaggattcttctaggagggttgttatgctgtgatcttgctagatgtcctgcccatcttagtcttcctattcttataagagatactacgtctttaccaccaaatttttgttatatctgtggtataccatacctcgtagttgtacctcggaaacaccattttcacagatgccacggaatattcccctcaggatccttcgttcaaatataagcagaaggttttcat

SEQ ID NO: 126 - DNA, 608 bp, Diabrotica virgifera
  SmartBlast Evalue=2E-25; Info=Probable RNA-directed DNA polymerase from transposon X-element n=1 Tax=Drosophila melanogaster RepID=RTXE_DROME
ctttacccaactttgatttattaaaatcatatctaaatcacggagaatttgaaactctatcaaaccataacaaaattcaatcaggagtcccacaaggtagttcactgggtccacttctttatgtactgtacacatccgatttaccaacctctccacaaaccaccgttggaactttcgctgatgacacagcaatatttgcaactgaagaggatccaacattgcagtattaaaacttcaagaacacctagaccaaattggacagtggttaaagaaatggaagataaaagctaatgaaactaagtcaacacatataactgtcacactaagaaaagaccaatgcccaaatattagccttaatcaagtcaacataccccaacagaatatcgtcaaatacctggggcttcatcttgattctaaataaactggaaacaacacattttaaagaagaagaaacaaactgagttgagagtgaaagaaattaattggtttataggtcgaaaatctcgactctcaattgagaacaaactgctcatttataaaacagtcatcaaacctatatggacttacggtatacaactatggagttgtgccagcaaatcaaatacaaa

SEQ ID NO: 127 - DNA, 5338 bp, Diabrotica virgifera
  SmartBlast Evalue=0; Info=Catenin alpha n=3 Tax=Aculeata RepID= E2A263_9HYME
attttatacaaagcacagcgtgaaatctgtgcgcggacaaaaaacttgttatcgccgatttattataatttatatttatgaagtgactgtgtcggtacttaatagctttatgtatattgtgtttgttttcatttaaattttaaatttctataccaaagatatgagccggttgaacatattcagttttttgaaaatgcttcaagcattgtgttgtgtactgggagttacatcagcatcttcagacccagttatagtctccagagaagaatggggggcccgcgctcctaaaaacatagaaaatatggcgaacccagtaccttacgtcgttatccaccacagttatctaccaccagcttgttacaatttaaccgattgtttcaaagccatgcgttggatgcaagaccttcaccaagacaccaacggttgggcggatattggctacaactttggtgttggcggagatggtagagcctacgaaggaaggggatggtccagagttggtgctcatgctccctattacaacagcaaaagtattggaatatgtataattggagattggacagttgaacttccaccagaaaatcagctagcgacagttcatgagctaatacaaaaaggagtgagagaagggtacatccagaaggactacaaattggtaggccataggcaggttagacaaggtaccgaatgtccgggtgacaggctcttcaaagagatacacaagtggcagaatttttgtgaacaaccagacgagatagcagtaaggacaaacaacacttggttccttaaaaaaactgtacatgacaatagtagggataaggaagataaagatgaagacaataatgacaatggtattaataggttagaaaaaagaactgtttagatttaagtaatacattttatttattattaaaaaaacacctatgcagttatgattcatttttgagataaacaatagggtgaatttatttttcttttagtcagatttagtaataaactaagctcgtttagtagtgtatttactaccgatttacgttttattttgtatatagctaagtctcaattaaaaatgatgactgaccgcttcggtttaaaatgggacccgaaaaacttagagataagaaccatgtctgtggaaaagacattggaacccctagtgcttcaagttaccaccctcgtcaataccaaggggcctagcaaaaagaagaaaggaaagtctaaacgtgccaatgctctggttagtactgttgaaaaagccacggaaaacttcatagaaaagggggagcagatagcctatgagaatccagatattactgaggaaatgctggcagctgttgacgaagtcaagaaaacgggacatgctatgagcggagctgcaagagaattttcagaagacccatgttcttctttaaaaagaggaaatatggttagggctgctagaaatcttttatcggctgtaactcgtcttttaattctagcggacatggttgatgtccaccttttgctcaaatccttacatgtagttgaggatgacctcgaaaaactaaaaaatgcttcaagcaatggcgaacttttagacaatattaaagcctttggtcaaaatgccaacgaattaatgaatcaggctgctaaaaggcagcaagaactgaaagatccacaacttcgtgatgatctagcagctgctagagctgtacttaagaaacattccactatgttattaactgcctctaaggtttatgtacgtcatccagagctagcagctgccaaagcaaatagagattatgtcttgaaacaagtttgtgaagctgtgaataccattaatgatgtagctcagggaagaactcctcaacctgcttctggaccatatgatggacctggagagttggctgctgctttggatgattttgatgatcacatggtaatggagcctctagcatacaatgaagttcataccaggccttcattggaagaacgtctagaaagcattataagtggtgcagctcttatggcagattctagttgtactagggatgaaagaagggaaaggatagttgcagagtgtaatgctgtaagacaagctttgcaagacttgttgactgaatatatgacaaatatgggcaataaagataaaagtgagagcctaatacgagcaatcgacaatatgggtagaaagactaaggatttaagaagacaactgagaaaagctgttgtagatcatgtatctgacagtttcttggaaaccaacgtacctcttctcgttttaataaaggcagctcaaaatggcaacgaaaaggaggtagaagaatatgcagttgtatttactgaacattccaataagttagtagaagttgctaaccttgtctgcagcatgtctaataatgaagatggtgtcaaaatggttagatatgctgctgctcagatcgacaatctgtgtcctgaagtaataaatgcagctagaattttagccgctagacctcgcagtaaagttgctcaagaaaatatggacgcattcaagcaatcatgggagaatcaagtgagacttctgactgaagcagtcgatgacattactactatcgacgactttttggctgtttctgaaaaccatattctggaagatgttaataaatgtgtacttgccttgcaagaaggtgattctgacacattggatcgcactgccagtggtataagaggaagatccaatagggtgtgcaatgtagtaacagctgaaatggataattacgaaccttgcatttataccaaacgtgttcttgaagccgtcaaagtattgaatgatcaagtgatgcccaagtttactcaaagagtgcaagttgcagttcaagctttgggaaatagtcctcccaaagaagtggatgaaaacgattttatcgatgcttctagacttgtttacgatggagtgagagaaataagaagagccgttctaatgaatagagccgatgaagatttagatccagaagatgtcgaattggatgaaaactatctaatagaaacaagaagcaaatcgagcgctcacacaggcgaacatggagttgatgagtatccagatattagtggaattacaacggctagggaagctatgggtaaaatgccggaagaagataaacagaagattttgcaacaggttgagttcttcaggagtgaaaaactcaagtttgaccgtgaggtcgctaaatgggacgacactggcaacgatattatcgttcttgctaagcacatgtgtatgattatgatggaaatgacagattttaccaggggtcgtggccctctaaaaaccactatggacgttattaatgcggctaaaaagatttccgaagctggaaccaaattagataaacttactcgccaaatagctgaacagtgcccagagagttccaccaaaaaagatttgttggcttatttgcaacgtattgctctttactgccaccagatgaacattacatcaaaggttaaagccgatgttcaaaacatcagtggagaacttattgtatctgggttggacagtgctacttctttgattcaagctgctaagaacttgatgaatgctgtagttctcacagtaaaagcttcatatgtggcatccaccaaatacccaagacaaggaactattgcatcgccgattgttgtctggaagatgaaagcgccagagaagaagccgttagtcagaccagagaaacccgaagaagttcgtgccaaagtacgcaaaggctcacaaaagaaagttcaaaatccaattcacgctctttctgaattccaaagcccaactgagtctgtgtaaacgtaaacctttatccattaatatattaaccagatgttaactattatttgcctgattattctgtgacattttctatgtacctatagattcgtattaatataaagtctgattagaggcatgttcaagttcatttaacatttgaacagtacatagtaagtccgtagtttcatcaagtgttaaatacagtgtgttctaacgaaaatatgaccccctcccagaaactgagaagccaaggagtttcttcacaatttgaaaatcacgtcaatttgtattggaagagggacgaatgttcatgcaattcatgccctcagatgtaaccccctactgccccccagttttttgaaatagcaagtgtgtcgagttgcacatcatttgaaaggtagtttttttttctctacacgaccctctatttttttaatttgcgaaataactttaaagacagttttggatttaactaatttataatacatttgttaagttcaaaattgtcttcaaacttgttatgtaaattaaaaaaaaaatagtgtcgtgtagagaaaaaaattacctttcaaatgatgtgccactcgatcacacttgctatttaaaaaaaaagtgggggttgatgcggggcagtggagggttacatttgagggcatgaagtttgcatgaaagttcgttcccctcccattataaattgacgtatttttaaaatttttaagaagctcttggtttctgagtttctggggtggtcagattttcgatggaacagactgtatatgcgaaatgcatatggcacaattaaaagtacagctgtttcgctacaatatgcaactaacatcgaaaatatttgcaagtttaaaatacatatacacctatgttttaacatactttagacctagaacttaactaggtgctgcgcagaatgaaatttcccaccgttgggccaagtgttttccatttttttagtaaagcaaaaaatccggacatttctcatatccggacgccaatccggacatgccgttcaaatccggactgtccggatgaaatccggacgtatggtaaccctagttataacgaatataacattaaacaaatcaagagttattgatgaatttaagcaaacaatatttcttttctgattttttttcttagataacttatccggtttttcaccggttattacttaaaaagaaaaaaaccagttaaaaccgggacaaaaaaacaaccgataaaaccggttttaagttaaaaccggcaggtttttcccatccctagcccaagcgtaatgcattaatatacgaaatatgttaggtaaagtccgtgattgataatacacatttataacatttattctaacatgacattttagttaaatctgacagttgtcatattttatttgcaatttggtatttttaaatggtattttctttgatttgtatagtcttataaattgtacagcttatattcgtagatatattatataattcgtaattttttttcgattatagcgccatctatcgacaactagaataaatgttataaatgtctctaatcacagacgtg

SEQ ID NO: 128 - DNA, 4440 bp, Diabrotica virgifera
  SmartBlast Evalue=1E-102; Info=Chloride intracellular channel isoform 1 n=1 Tax=Bombyx mori RepID=Q1HPS8_BOMMO
ccttcatgacgttttcgacacggttccactcctcactttccaactggcatcgctgcaaaacttcgccaactgagtcataagatcagttgaatttgtgcgttgagtgagtttcaacaaagtttttcagtgccttttcccggtagaaattttcaacaatggccgacgaagttgctgaaaatggtcacgcagaaaatggagatgtaccagaaatcgagcttatcattagggcctcgacaatagacggtagacgtaaaggagcctgcctattctgtcaggaatacttcatggagttgtacttattggccgaactgaaaactattagtctgaaggtgacgacagtagacatgcagaaacctcctcctgatttccgtacgaattttgaagcgacgcccccaccgatcctgatagacagagggatggccatcttggaaaacgagaaaatcgaaagacatatcatgaagaacgtgccaggaggtcataatttatttgtacaggacaaagaagtagcaacattgattgaaaatctctacacaaagttcaaaacgtacgttagaaagtttgaatcgactgacaccacagaaaataggcaacctctatattcgcatttggagaggatcaacgacttcatggcaaagagaggcacgagatttttaactggtgacactatgtcctgttttgactgtgaattgatgcctagactgcaacacatccgcataggagccaaagccttccgcaaattcgagatcccctcaacattcaaagctttgtggaactacatggcgaacatgtacgaactcgaagccttcatccagagctgcccggccgatcaagacatcatcagtcatatcaaaaaccaattgggccttaagacaaccgcgcggatagaactggaaacgcctgtatacacgacagccattccggtgctatctgaatcgtaaataataacttaaaataaagaattatagtcggtttcgtgatattttgataatataatatggaacgtattctggaagatgtctctacatgtataggcttgcttaaattggacaaacttgatgtatcaaatataaatcatgtttttaaatgacatatatgtctgatagatagtgccttgtattgcttattcaaacttaatccttttgggtcactaaaggactgattatacacagaaacaaataaattagtacatgtaaactaactacatgacgaaactatttattcataatatttttccgatattctatgtgttgcttgattagagttataatacagtaatcaaatttgatgattttgatgtgccatccatacttagtattactggagttttcattttttgacacatgtcaaacgtcacgactgtcaaacatcaatttttgacgcatgtcaaacgtcacgactgtcaaacatcaatttttgacagccattttcaaagagttttcaaggtcaacttaaaaatgttggaaattactacttttgtacgtgatcactactatttctgctgctattatactatcctgtgcttacatggcttgattctaaatgtaactgaacaatattcgaacaattttatatcttatagctgaattctttcgagccgctgtttcaaatattacaaaaccgacaaaccgtttatttttatatgcattttcgacttcgacctagtcaggggaagtaatcagtaagtttcttccaataagagtcagctaccaccatagcagttttgtcaaattacagaaaaaagtttataagaccgcttttttatcattattaataaatattaacagattatcgcacttactgtagcaagacaacaagtggaaacaacggaagaaagaatatctttggttagaaaggcacttgatgaattctatacgttctacagtaatgaaaaataattatcatggcgcatattattgcaagtgaaaatgttgtttctacgatttccagtattagttttattatcttcagttaagttttaattgtagttcattttttaatagatgaaaaacggttctgtatgaatagggcttttcaacgcttctcatttatttcgggcacttgtcatatgtcgtatattaatattatacacagattatacaacatacgacaagttaagatatctatgtcatacgtttttggtttgtatcattggtatatacgaataacgtatgttccatgggtgttcgggaacgattaacttaaattaaaataagtgtaaaaacaacaacttgtcaataatatatttatttgtgtcggtaaaatagcgtgaatatttctcgaaagagagtttgttattcttttgcgagtatggtggtgtgtccgcgccggatggttgctgtggctatactgaaagaaaccacaaacgctaatatgtttgtgtttctaccatctggccagaaaggtgataaattatttagatctggcgtttaaaagttgaaacatttctgcagttttaagaaacgtcttcgaatgcatttccaaagtgagttattgacataaggtctgataaggtaattaatttatggggaatttagtttgttaaactgaacacaccaaaaacatctggttagggatacatttcgtttcgtaaaacttaacgggcccttcttagcatctggtttgtatattaaatgtgaattttgtatgacccatattatttcgttttgagaaaagaaagttaatatttaaaattagcaattaaaaaaataataataaatgaagcgtgtcgctatacgtatgacgtagatatattaatattagaggactcatgacagaatctgacagaaatgacaatcgatgaaaagcccaattaattgacaaatgatgacagatgacggttatgattgtattgcctttcaggattgccaactgttttcctgttaagtttatgtttatgtggacaatcctttgaactttagacgttccatactgatatggtcaacgtttttacagtttccggtaaaaatatcgcttataacgagaccataaactttttaaatccaaaaatgaaaaaacatcgttgttgtgtatcaaattgtcaaaatacaacgaatgaattgtgttgcacaactgatatatgcatataacaatttaagaaaggactgtgagttgtctacatttggcgccactgagctgaataacctgaaaaatttattttaaatgctcttaaatacaatgtttttgttccgacggtaggttgcggaatcaattaaaaataagtgtaaacaatgaacagtaatatatttatttataatatttttatattataatattttattattataatatttttatattataaacaagcgtgcttcgtttattatctcgtaagggttttgttgttttagcgagggtgtgtctgaaccgcgcgcctgctgtgacgatactgcgagaccaccacactattatatcaccatgcttgcggttttacaatatggctagaaaggcaatagattacgacatctgcgttttaaaagatgagaacctttctgtattttaagaagttgacataaagagcgtggcaatctggcctcgaaatctattagtgtttccttgaaaaaaacattaattttatacaatctgcttagggatacattttgtttcttaaacttaacggtccttgttagcatatggtttgtatattaaatgtgaattttaaatgactaatgttatttcgttttgagaaaagttattgaaaatttagcaaaaatagtaattaaagcgtatcgctatattatatgcatttaacaattcaagaaagaactgtgagttgcctacatttggccccactgaactgaataacctaaaaaatttattttaaaagctcttaaatacaatttttttaattgaatataaatacttaactgacaaattccatataaacagttgctttgtttcaattacaactttctattgcaaagttttcaataatgacttttgaaataatagacataaagcagaagcggtaaaagtgctcacaatacaaggttgattcagaccaacagtcagatcaccgttgagtcaaggggcaacccattcacacactcagtccgggcagatcaccgtcagtctacttcggcatttagatcgatcaagatgcaatattatagtcttgtagagttcttagtattgtgttccgatctgcgaaattgagtaaatggaattaattaaaatataagtgtaaacaatgaacagtaatatttattttatttttggttaaagcgagtgcttattcatctcgtaagagggttgtttattgttttggggcagcgagggtgcgcctgaactgcctccctgccgtgacgatactgccgagaccacaacactattatcatcatcatgcggttttacaatatggctagaaaggaaatagattacgacatctgcgttttaaaagctcagaacctttctgtagttttaagaaacgtctttgaatgcatt

SEQ ID NO: 129 - DNA, 4545 bp, Diabrotica virgifera
  SmartBlast Evalue=0; Info="Lethal (2) 44DEa, isoform D n=7 Tax= melanogaster subgroup RepID=A1Z7H2_DROME"
aattggtcataaaatatccgaagcagcaacagaaaataaaaatcttggagtgcagtatgcgaaagtcaacagtaaagcaaatcaacgagataaatgaacaacagaatagcaataaaagctgcctgatcagccccactagtcttttttgcaatttctaagtaaaaagttagttccgctttcatttttattacctataatatttacatttattgtctataaggataatttcttacaaaaagcagttttttccaataaaaccggcaaaaaatatagtatctaacgtctaactttgtaaaaaaacctattcctggcgtctgcacatttgccgcttgagtaaataactatttttatccttaagtacatgtctttaatgaaatagatgtttagaccgatcattgacaaattgacaattacctacatcggtgcaagaacagtcttttactaaaacttaacactttataacaaaaagaaaaacaacaataacaaatatgcgcaaaaaatctcataatattgctactaaaataccacaaccgtctataagttcattccaaccagcctcacagaagacttacagtggaattcttctctcaaaatacacaaaaacagtatttttcgatatttttgttgttttctgtaatatttgtatctttatttattgcttacgtctcctgtattgcttgttgaaagacgctttgttgtgaaaaagttgtcccttgtgaaacaattcatgttttctgtttattaaatgaccttaacttttacacagacgaatagcaccgttaaaatattattctcgaagtaaaactagttgaaaattgcgaaaaataagagaaacatgaatttattacccctaaaggaaccacagtgatgctaacaataatattttaagagtatttttgccttgaaatattgaagagataacaggatttttaataccacattccgtctgtgacattttaccaaaaaaaaaactgtatagtatcacttttcatgtgcccgcacgattatagtctaactctcctataaaaaagcaactatacaacgattgataagagaatttttcacatctaattcagattaatgatggtatatagtctcaagaagatgaaaaattagcaattgaaagtggcgcagtcaatctacacgatttatcatcaagaaaatcatgtctaaacacaatattgagcaaattaatcacaataaaacttcttccgtacaaaaaattagcaaaattcttcatttcatatccactcactccagaatttgatggaaaaattcgttcagagactcaactttaaaacatgtgttgaaagcctggcctaaaaattaatatcattggcggtaaaagtgtcatttatgcagaatctgtgtaattttcactataagcaccactcccgcaatattttgttgacgttggaggtaaaattgagcgatatctaaagcaataattgtaaaattatttgtgaaaaacttgctttcttagactcaaatggtacaatgcctggcctaaacttgctagagttgcaggaattggaagaataaccgcagtaaggaataaagttggagtgacactgactgcataatgtgtttcaaatgttcttttagggagtccgttgaagaaattggaaaatgcctgaccaaaaattacaattattagttgtagaagtattagttgtgcataatttctttaggtatcactaggaacataattcttgtactatgtggataaagttggagaggaaattcagtcgaaaaaacacattaaagaaaaatatagacaaaaaaaccgtgaattttttcaagtactacctcttaagcatctatctccggcaaaaatacccttaaacctaaaaataaacatttgttcttatatacattatacgcccaagagctaatatataaataaaataatacataaaatcttatttgatagcttcgttaaatatttacagaaaaaattacaaatactttttacaaattgtgctataatacacgcttagaaatcatacccttggaatcaggcgggatttcaacgaaaaaagcgaaatatacgcaaacatatttcttctttcagttaattgtagtaaaattagcaaaataaaaaaaaattgtagtaaaaatgtagtttatgtctttaatatcgttttgttctcaaagtatttccaaagttctacaataaagtcctgcctgattccttgtacacccatactagattaatcataagaaaattaaaggtgttgtaactttcaggaggcgtacattctgttgatttcgtgcttatatctctcttggatgtctttcctctttagtttaaaagctgccgttacgagccccatgtcaggggaccatacctcagtcaccaacttaatagctgctggaatttcaaatttggccagtttacttctttttccatgctctgctaattcttgcacaaccgccttctccacagtatcatccacgcacagctcctcgaacgatttatcgttgactcctttcttggcggcaagatctttgagttgctgttgatttggcacgaccagcgcgacacagaagtccttactcgattctccgtacacgcaaatgttatctactaatggacaagtcttcatctcggcctcgactttaccgagggacacgtattcgcctgcttgcagttttaccaagtctttcttacgatctatgattttgagtacaccatcttcgtgaatttcaccaatatcaccggttctaaaccatctggttccgtcttgctctaagaattcctctttcgacttctctggaagcttgtaatatcctgcactgatgttgtctccacccaaaattatttctccacgaggataaggcttatccgtaatgcgatagttgccttcttcccaacttattaacttaatatcacaaatcgtacagggggcacctactcttccgaacgacatatcaaacagatcttgtacagctgcgcaagaagttgattctgttaaaccatatccttgtattattaccacacacatgcatattcctatttgttcgtgagtctcagctgacaatggagcaccgccagatatcatcagtctcatgtttcctccaacaatttttgtgatcggggaaaatacaattttgtctatcaaaggagttgaatatcctcgccttttccatgctgatttgtactcatatgcaaatttgaatatcacttttttaagattgctgcctttgctgactttttcttggatagtttttgatattctgtctagaatgagtggtacacttgtcaatactgtcggacataatatcgtagcatctcctttggtcccccttttgattttactggacgtatcagtcatagtcaatgcacccgaatatccaataggaactccagcgaacagacaaacgctctccaccaacaactcgaagacgtgagccaacggtaagaaaccgatcattatatcattttcataaattggtgttgaatcacagaatcctttcaaagtagcgattaagttcttttgaagcagtataacacctttgggaacgcctgtagatccgctcgtgtacatgatgatggctatgtcgtctgctttagggggttgagcctctatcttagacgaagctcctttctccaaaacgtcttggaacttcaaaatagaaacaccatccttaaaaccatcggtactttccaagctcttcaattggtcttccatataaatcaagcactgcacacgtggcgtcagctgcaagatctttttaaacttcggtaacagctcgaaactggtgataagagtggtcacttcagtttcgttgatagcgtgagcgatcgcttcgtcacccaaggttgcgtagatggtgaccaaagggatgttttgcttgaagattccatgagcagcgatcatccattcggctctggtttcagcgaagatggcgacatttttgccgggatcgtttcccaattcgcggagtccacggccaaaattggtggctaggatgttgacttcggagaaagtcttccagcggtagtctcccagatcgaacttcttaaaaactcttccgttaggctgaacctcatccatctcggccaatatctgcctggtgcccaaacatcttttgttggcgtattttttgctgcagtattcgaacattttggccatggtgtcgatcttctcgcgaacgagagtgatatggtgctcttttggggctactgtggatcgataagtcaccgatttcgcatcttcttgtatttgtttcgcctttatgcttctggacagttggcgtaaccgccatggcctctggaggattatgtatacggggaacgtgaggacgtcgtacacgaatgctagggccttcagcgcacctatcgctatggtgaacccaacgccatccatatccccaatgttattggcagcttcttaaacagtaaacactccaaaaccgtatcgtatagatatacaaaaactaaaagtaattcacgatcttttaattcaaatagatacaacaaattgtcactgactcaattcgcgttgaggaataaaaataaaattatgccgtccgtatttt

SEQ ID NO: 130 - DNA, 4545 bp, Diabrotica virgifera
  SmartBlast Evalue=0; Info="Lethal (2) 44DEa, isoform D n=7 Tax= melanogaster subgroup RepID=A1Z7H2_DROME"
aattggtcataaaatatccgaagcagcaacagaaaataaaaatcttggagtgcagtatgcgaaagtcaacagtaaagcaaatcaacgagataaatgaacaacagaatagcaataaaagctgcctgatcagccccactagtcttttttgcaatttctaagtaaaaagttagttccgctttcatttttattacctataatatttacatttattgtctataaggataatttcttacaaaaagcagttttttccaataaaaccggcaaaaaatatagtatctaacgtctaactttgtaaaaaaacctattcctggcgtctgcacatttgccgcttgagtaaataactatttttatccttaagtacatgtctttaatgaaatagatgtttagaccgatcattgacaaattgacaattacctacatcggtgcaagaacagtcttttactaaaacttaacactttataacaaaaagaaaaacaacaataacaaatatgcgcaaaaaatctcataatattgctactaaaataccacaaccgtctataagttcattccaaccagcctcacagaagacttacagtggaattcttctctcaaaatacacaaaaacagtatttttcgatatttttgttgttttctgtaatatttgtatctttatttattgcttacgtctcctgtattgcttgttgaaagacgctttgttgtgaaaaagttgtcccttgtgaaacaattcatgttttctgtttattaaatgaccttaacttttacacagacgaatagcaccgttaaaatattattctcgaagtaaaactagttgaaaattgcgaaaaataagagaaacatgaatttattacccctaaaggaaccacagtgatgctaacaataatattttaagagtatttttgccttgaaatattgaagagataacaggatttttaataccacattccgtctgtgacattttaccaaaaaaaaaactgtatagtatcacttttcatgtgcccgcacgattatagtctaactctcctataaaaaagcaactatacaacgattgataagagaatttttcacatctaattcagattaatgatggtatatagtctcaagaagatgaaaaattagcaattgaaagtggcgcagtcaatctacacgatttatcatcaagaaaatcatgtctaaacacaatattgagcaaattaatcacaataaaacttcttccgtacaaaaaattagcaaaattcttcatttcatatccactcactccagaatttgatggaaaaattcgttcagagactcaactttaaaacatgtgttgaaagcctggcctaaaaattaatatcattggcggtaaaagtgtcatttatgcagaatctgtgtaattttcactataagcaccactcccgcaatattttgttgacgttggaggtaaaattgagcgatatctaaagcaataattgtaaaattatttgtgaaaaacttgctttcttagactcaaatggtacaatgcctggcctaaacttgctagagttgcaggaattggaagaataaccgcagtaaggaataaagttggagtgacactgactgcataatgtgtttcaaatgttcttttagggagtccgttgaagaaattggaaaatgcctgaccaaaaattacaattattagttgtagaagtattagttgtgcataatttctttaggtatcactaggaacataattcttgtactatgtggataaagttggagaggaaattcagtcgaaaaaacacattaaagaaaaatatagacaaaaaaaccgtgaattttttcaagtactacctcttaagcatctatctccggcaaaaatacccttaaacctaaaaataaacatttgttcttatatacattatacgcccaagagctaatatataaataaaataatacataaaatcttatttgatagcttcgttaaatatttacagaaaaaattacaaatactttttacaaattgtgctataatacacgcttagaaatcatacccttggaatcaggcgggatttcaacgaaaaaagcgaaatatacgcaaacatatttcttctttcagttaattgtagtaaaattagcaaaataaaaaaaaattgtagtaaaaatgtagtttatgtctttaatatcgttttgttctcaaagtatttccaaagttctacaataaagtcctgcctgattccttgtacacccatactagattaatcataagaaaattaaaggtgttgtaactttcaggaggcgtacattctgttgatttcgtgcttatatctctcttggatgtctttcctctttagtttaaaagctgccgttacgagccccatgtcaggggaccatacctcagtcaccaacttaatagctgctggaatttcaaatttggccagtttacttctttttccatgctctgctaattcttgcacaaccgccttctccacagtatcatccacgcacagctcctcgaacgatttatcgttgactcctttcttggcggcaagatctttgagttgctgttgatttggcacgaccagcgcgacacagaagtccttactcgattctccgtacacgcaaatgttatctactaatggacaagtcttcatctcggcctcgactttaccgagggacacgtattcgcctgcttgcagttttaccaagtctttcttacgatctatgattttgagtacaccatcttcgtgaatttcaccaatatcaccggttctaaaccatctggttccgtcttgctctaagaattcctctttcgacttctctggaagcttgtaatatcctgcactgatgttgtctccacccaaaattatttctccacgaggataaggcttatccgtaatgcgatagttgccttcttcccaacttattaacttaatatcacaaatcgtacagggggcacctactcttccgaacgacatatcaaacagatcttgtacagctgcgcaagaagttgattctgttaaaccatatccttgtattattaccacacacatgcatattcctatttgttcgtgagtctcagctgacaatggagcaccgccagatatcatcagtctcatgtttcctccaacaatttttgtgatcggggaaaatacaattttgtctatcaaaggagttgaatatcctcgccttttccatgctgatttgtactcatatgcaaatttgaatatcacttttttaagattgctgcctttgctgactttttcttggatagtttttgatattctgtctagaatgagtggtacacttgtcaacactgttggacataaaatcgtagcatctcctttggttccccttttgattttactggatgtatcagtcatggtcaatgctcctgaatatccaataggcactccagcaaacagacaaacactttccaccaacaattcaaagacgtgagccaatggtaaaaagccgatcattatatcattttcataaataggtgttgaatcacagaatcctttcaaagtagcgattaagttcttttgaagcagtataacacctttgggaacacctgtagatccgctcgtgtacatgatgatggctatgtcgtctgctttagggggttgggcctctatcttagacgaagctcctttctccaaaacgtcctggaacttcaaaatagaaacaccatccttaaaaccatcggtgctttccaagctcttcaactggtcttccatataaatcaagcactgcacacgtggcgtcagctgcaagatctttttgaacttcggtaacagctcgaaactagtgatgagggtcgtcacttcagtttcgttgatagcgtgagcgatagcttcgtcacccaaagtggcgtagatggtgaccaacgggatgttttgtttgaagattccatgagcagcgatcatccattcagctctggtttctgcgaagatggcgacgtttttgccgggatcgttgccgagttcgcggagtccgcggccaaaattggtggctaggatgttgacttcggagaaggtcttccagcgatagtctcccagatcgaacttcttaaaaactcttccgttaggctgaacctcatccatctcggccaatatctgcctggtgcccaaacatcttttgttggcgtattttttgctgcagtattcgaacattttggccatggtgtcgatcttctcgcgaacgagagtgatatggtgctcttttggggctactgtggatcgataagtcaccgatttcgcatcttcttgtatttgtttcgcctttatgcttctggacagttggcgtaaccgccatggcctctggaggattatgtatacggggaacgtgaggacgtcgtacacgaatgctagggccttcagcgcacctatcgctatggtgaacccaacgccatccatatccccaatgttattggcagcttcttaaacagtaaacactccaaaaccgtatcgtatagatatacaaaaactaaaagtaattcacgatcttttaattcaaatagatacaacaaattgtcactgactcaattcgcgttgaggaataaaaataaaattatgccgtccgtatttt

SEQ ID NO: 131 - DNA, 3701 bp, Diabrotica virgifera
gtgtggtaggagatgtgaggtggacgttgacagttgtttttttttgttttctttaagttgctactttcataaccatttaagataataaagaataataagaaagtccagttgggatctacataataatagttaagtcggttataatagtgagtcgagcattagatttttttagaaatgttccgaaaaatttgtttgaaacacggtttttgttttttatttttttacattttgaggttaaaaaataagactctgcgtaattttagcacgccactccctcctctgacaccaaaaccgtcatttttatttttatttatttttttttcgtgggttgcaatcgatttaaaaatttcaaaaaattaacacgcatagttcagtcttttacaaaatttgtgtattttttatagaaccgtgtctagtgtaaatagtgtaaaaagtgtaaataaactaaaaaatttttttttttttaggaaaaagcgtatattattttgagatggctgcagatctaatttgttttattttgggttttttttcaaatatatattattatgtatcactttatcaatcaaagatagagtaaaaattttaattttttaattataacgcgggcacataaatttgatacaccctgtatattgatttgtaactatttaatagaaggtagcttttacgcagtgggtctatcctaatgagtttttccctgaagacttaaagacatttgtaaacaaagtgaagtgaaaatacaatttatttcggattataatttaaaaagattgtttgttacgggaaaggtaagatccacatgcagctgtttggaattttaagtctgttttgtttaagcaccagaatatttgtataatttccggaaagtgattaggatgagtagaagtattatttgaaagaatgcctgggtttttttgaatgaaaaagaggaatgtggaaagagaaatgtttctgattggcttgacaatttagaaggggaaaaggaagattgaatgttgagacagtttggaaaagaaaaattattgtgtggtcggcatccgagagaagcagtcgaaagttttcgcgtatagttcagaagcaagtactagtggttgtttaatagtggagagtagctgaaaagtggaacgagagacaaatcaaattgagaagaaaaacctctttgattctgtaaagtccaagagagtaagttacaagaactatagttattaaaattatttgtgacaccaagtaaaaaagatacttgggtctcaggagattattattgagagaaagagaggagagagtattggagtttattgaacgagtactggtcaaaagcggcctggcttgtgttttggagaaatagttgctggtatgctgctggattgatgctgagaacggagagggctttgattggtagcctaacataatcaacaaggaagagctgtttgggtcaagaggagacatcgttgtgtgtgaatcaaaaagatcagtcaataacttatgtgatagatgttctttataatcagaagttaaaatatttgcgtaaaatcatatgaattaagattccaacatttcaataatttaataggaagtataagtagttttgcaaatacctaaatttgtttgtttagcttattttataaatggtatcaggaacaaagcgataaatatttgtttaaattagaataattatatggtaaaagtttcatttggacaattatgcccacaggatttaattgatagattttcagagcattgcttttgataataaaggtatttgtatgtgcttatttatgatttttctatttatttccttttcctattttatcccgataaggatcaactagatactgaagccacgagaaaggataagtacaacctaagataattttagttaatttttatgacaaaaaggcaccctgagaatttttattaattgtttatgtatgatttgcgtcaatttaataattaagtaaataaatactcaattaaaataaaagtaatagaaagcagatcataacaatacatacaaaaaccaaattttcgttcaaatttttataaaattcaacttcaattaaatgctgttttcatgtaaaacaaacttttttttttagtttgataatataattgtttttatttaaaaagcaaaattgatattgttttaatagttttttatacgataacggttgaaacaatttttagcaattaagaaaatttataacgttgtttaaatctaaaaatcctattagatgacccacatttagatcctacaaacttttgggtaaataaaaaaataccagttctgtagccgatttaaaaatccccaggcacatctaattacctaattttaatttttcaaaaataatttgaaaacttgtttaagcttctataggtcaaaaacaacgaattaaataacaaaaaatgttccacgagaccaagtcttgaaaagactcgaattttctgttcatagcaagactgcataatcattatgcaaatctatgaaaaaagtattgcattttctttatttaattttatttatttttttggttttagagataacttcttattatctgttattacttttgtggcgacacgctttaattactatttttgctaattttatttttttaataacttttcttaaaacggtcatataaaattcacatttaatatacaaaccagatgctaaaaagttttacgaaacgaaatgtatccctaaccatatgtttttggtgtgttcagtttaacaaactgaattccccataaattaattaccttatcagaccttatgtcaataacgcactttggaaatgcattcgaagacgtttcttaaaactacagaaaggttctgagcttttaaaacgccagatgtagtaatttattgccttttctagccatattgtaaaaccgcaaacatgatgataatagtggtgtggtctctgcagtatcgtcacggcaggcaggcagttcagacgcaccttcgctgccctcaaacaataaacaaccctcttacgagatgaataagcacgccttttaaccaaaaataaaataaatattactgttcgttgtttacacttatttttaatcgattccgttaacccacacatcggaacacagccatctatcaacaattagaaaaacatgttccttataaaagttacttattttttatcaggaatcgaaatatttaataaaaatgggggtttccatgtaagattttaaattagcctctttccgctctagggggtgcggccgggggtcgtatttggtgtcatttgatagatttttgaaaaatattgaacacgtgttcttcagtttttttgatccgatgtttaatatgaattgtattgaattgacaccgtgtataatatgaattaaatcaacaccactaaatgtgtgtgtttcaagtgttactttacccagataaaatatggactagatgtgtttactacaagagcgaatttacgttaggtactaattaacatcataaaatcgtgtgtgcataaccaaagaaaacgttttccttagttttctataaaataatttactaaaaattacatccaaaagttttaggctatccttaacatctgaagaaattacaatgcggtgaaatgtcgtgttatatataagggaatccagtgcaaattttccgaacatacagtttgaatttatctattttatttcagaatatacttacatcaagtaaagatgttgtcagt

SEQ ID NO: 132 - DNA, 3698 bp, Diabrotica virgifera
gtgtggtaggagatgtgaggtggacgttgacagttgtttttttttgttttctttaagttgctactttcataaccatttaagataataaagaataataagaaagtccagttgggatctacataataatagttaagtcggttataatagtgagtcgagcattagatttttttagaaatgttccgaaaaatttgtttgaaacacggtttttgttttttatttttttacattttgaggttaaaaaataagactctgcgtaattttagcacgccactccctcctctgacaccaaaaccgtcatttttatttttatttatttttttttcgtgggttgcaatcgatttaaaaatttcaaaaaattaacacgcatagttcagtcttttacaaaatttgtgtattttttatagaaccgtgtctagtgtaaatagtgtaaaaagtgtaaataaactaaaaaatttttttttttttaggaaaaagcgtatattattttgagatggctgcagatctaatttgttttattttgggttttttttcaaatatatattattatgtatcactttatcaatcaaagatagagtaaaaattttaattttttaattataacgcgggcacataaatttgatacaccctgtatattgatttgtaactatttaatagaaggtagcttttacgcagtgggtctatcctaatgagtttttccctgaagacttaaagacatttgtaaacaaagtgaagtgaaaatacaatttatttcggattataatttaaaaagattgtttgttacgggaaaggtaagatccacatgcagctgtttggaattttaagtctgttttgtttaagcaccagaatatttgtataatttccggaaagtgattaggatgagtagaagtattatttgaaagaatgcctgggtttttttgaatgaaaaagaggaatgtggaaagagaaatgtttctgattggcttgacaatttagaaggggaaaaggaagattgaatgttgagacagtttggaaaagaaaaattattgtgtggtcggcatccgagagaagcagtcgaaagttttcgcgtatagttcagaagcaagtactagtggttgtttaatagtggagagtagctgaaaagtggaacgagagacaaatcaaattgagaagaaaaacctctttgattctgtaaagtccaagagagtaagttacaagaactatagttattaaaattatttgtgacaccaagtaaaaaagatacttgggtctcaggagattattattgagagaaagagaggagagagtattggagtttattgaacgagtactggtcaaaagcggcctggcttgtgttttggagaaatagttgctggtatgctgctggattgatgctgagaacggagagggctttgattggtagcctaacataatcaacaaggaagagctgtttgggtcaagaggagacatcgttgtgtgtgaatcaaaaagatcagtcaataacttatgtgatagatgttctttataatcagaagttaaaatatttgcgtaaaatcatatgaattaagattccaacatttcaataatttaataggaagtataagtagttttgcaaatacctaaatttgtttgtttagcttattttataaatggtatcaggaacaaagcgataaatatttgtttaaattagaataattatatggtaaaagtttcatttggacaattatgcccacaggatttaattgatagattttcagagcattgcttttgataataaaggtatttgtatgtgcttatttatgatttttctatttatttccttttcctattttatcccgataaggatcaactagatactgaagccacgagaaaggataagtacaacctaagataattttagttaatttttatgacaaaaaggcaccctgagaatttttattaattgtttatgtatgatttgcgtcaatttaataattaagtaaataaatactcaattaaaataaaagtaatagaaagcagatcataacaatacatacaaaaaccaaattttcgttcaaatttttataaaattcaacttcaattaaatgctgttttcatgtaaaacaaacttttttttttagtttgataatataattgtttttatttaaaaagcaaaattgatattgttttaatagttttttatacgataacggttgaaacaatttttagcaattaagaaaatttataacgttgtttaaatctaaaaatcctattagatgacccacatttagatcctacaaacttttgggtaaataaaaaaataccagttctgtagccgatttaaaaatccccaggcacatctaattacctaattttaatttttcaaaaataatttgaaaacttgtttaagcttctataggtcaaaaacaacgaattaaataacaaaaaatgttccacgagaccaagtcttgaaaagactcgaattttctgttcatagcaagactgcataatcattatgcaaatctatgaaaaaagtattgcattttctttatttaattttatttatttttttggttttagagataacttcttattatctgttattacttttgtggcgacacgctttaattactatttttgctaattttatttttttaataacttttcttaaaacggtcatataaaattcacatttaatatacaaaccagatgctaaaaagttttacgaaacgaaatgtatccctaaccatatgtttttggtgtgttcagtttaacaaactgaattccccataaattaattaccttatcagaccttatgtcaacgcactttggaaatgcattcgaagacgtttcttaaaactacagaaaggttctgagcttttaaaacgccagatgtagtaatttattgccttttctagccatattgtaaaaccgcaaacatgatgataatagtggtgtggtctctgcagtatcgtcacggcaggcaggcagttcagacgcaccttcgctgccctcaaacaataaacaaccctcttacgagatgaataagcacgccttttaaccaaaaataaaataaatattactgttcgttgtttacacttatttttaatcgattccgttaacccacacatcggaacacagccatctatcaacaattagaaaaacatgttccttataaaagttacttattttttatcaggaatcgaaatatttaataaaaatgggggtttccatgtaagattttaaattagcctctttccgctctagggggtgcggccgggggtcgtatttggtgtcatttgatagatttttgaaaaatattgaacacgtgttcttcagtttttttgatccgatgtttaatatgaattgtattgaattgacaccgtgtataatatgaattaaatcaacaccactaaatgtgtgtgtttcaagtgttactttacccagataaaatatggactagatgtgtttactacaagagcgaatttacgttaggtactaattaacatcataaaatcgtgtgtgcataaccaaagaaaacgttttccttagttttctataaaataatttactaaaaattacatccaaaagttttaggctatccttaacatctgaagaaattacaatgcggtgaaatgtcgtgttatatataagggaatccagtgcaaattttccgaacatacagtttgaatttatctattttatttcagaatatacttacatcaagtaaagatgttgtcagt

SEQ ID NO: 133 - DNA, 3217 bp, Diabrotica virgifera
gtgtggtaggagatgtgaggtggacgttgacagttgtttttttttgttttctttaagttgctactttcataaccatttaagataataaagaataataagaaagtccagttgggatctacataataatagttaagtcggttataatagtgagtcgagcattagatttttttagaaatgttccgaaaaatttgtttgaaacacggtttttgttttttatttttttacattttgaggttaaaaaataagactctgcgtaattttagcacgccactccctcctctgacaccaaaaccgtcatttttatttttatttatttttttttcgtgggttgcaatcgatttaaaaatttcaaaaaattaacacgcatagttcagtcttttacaaaatttgtgtattttttatagaaccgtgtctagtgtaaatagtgtaaaaagtgtaaataaactaaaaaatttttttttttttaggaaaaagcgtatattattttgagatggctgcagatctaatttgttttattttgggttttttttcaaatatatattattatgtatcactttatcaatcaaagatagagtaaaaattttaattttttaattataacgcgggcacataaatttgatacaccctgtatattgatttgtaactatttaatagaaggtagcttttacgcagtgggtctatcctaatgagtttttccctgaagacttaaagacatttgtaaacaaagtgaagtgaaaatacaatttatttcggattataatttaaaaagattgtttgttacgggaaaggtaagatccacatgcagctgtttggaattttaagtctgttttgtttaagcaccagaatatttgtataatttccggaaagtgattaggatgagtagaagtattatttgaaagaatgcctgggtttttttgaatgaaaaagaggaatgtggaaagagaaatgtttctgattggcttgacaatttagaaggggaaaaggaagattgaatgttgagacagtttggaaaagaaaaattattgtgtggtcggcatccgagagaagcagtcgaaagttttcgcgtatagttcagaagcaagtactagtggttgtttaatagtggagagtagctgaaaagtggaacgagagacaaatcaaattgagaagaaaaacctctttgattctgtaaagtccaagagagtaagttacaagaactatagttattaaaattatttgtgacaccaagtaaaaaagatacttgggtctcaggagattattattgagagaaagagaggagagagtattggagtttattgaacgagtactggtcaaaagcggcctggcttgtgttttggagaaatagttgctggtatgctgctggattgatgctgagaacggagagggctttgattggtagcctaacataatcaacaaggaagagctgtttgggtcaagaggagacatcgttgtgtgtgaatcaaaaagatcagtcaataacttatgtgatagatgttctttataatcagaagttaaaatatttgcgtaaaatcatatgaattaagattccaacatttcaataatttaataggaagtataagtagttttgcaaatacctaaatttgtttgtttagcttattttataaatggtatcaggaacaaagcgataaatatttgtttaaattagaataattatatggtaaaagtttcatttggacaattatgcccacaggatttaattgatagattttcagagcattgcttttgataataaaggtatttgtatgtgcttatttatgatttttctatttatttccttttcctattttatcccgataaggatcaactagatactgaagccacgagaaaggataagtacaacctaagataattttagttaatttttatgacaaaaaggcaccctgagaatttttattaattgtttatgtatgatttgcgtcaatttaataattaagtaaataaatactcaattaaaataaaagtaatagaaagcagatcataacaatacatacaaaaaccaaattttcgttcaaatttttataaaattcaacttcaattaaatgctgttttcatgtaaaacaaacttttttttttagtttgataatataattgtttttatttaaaaagcaaaattgatattgttttaatagttttttatacgataacggttgaaacaatttttagcaattaagaaaatttataacgttgtttaaatctaaaaatcctattagatgacccacatttagatcctacaaacttttgggtaaataaaaaaataccagttctgtagccgatttaaaaatccccaggcacatctaattacctaattttaatttttcaaaaataatttgaaaacttgtttaagcttctataggtcaaaaacaacgaattaaataacaaaaaatgttccacgagaccaagtcttgaaaagactcgaattttctgttcatagcaagactgcataatcattatgcaaatctatgaaaaaagtattgcattttctttatttaattttatttatttttttggttttagagataacttcttattatctgttattacttttgtggcgacacgctttaattactatttttgctaattttatttttttaataacttttcttaaaacggtcatataaaattcacatttaatatacaaaccagatgctaaaaagttttacgaaacgaaatgtatccctaaccatatgtttttggtgtgttcagtttaacaaactgaattcccataaattaattacctattcaaaccttatgtcaataactcactttggaaatgcattcgaagacgtttcttaaaactgcagaaatgtttcaacttttaaacgccagatctaaataatttatcgcctttctggccagatggtagaaacacaaacatattagcgtttgtggttttttcagccccggcagtcgatttacaaccgcccgtcgggagtcacaccccagcgggcgtcgggataggtcaacaacacactcttacgagatataagcaaaatacgtctttttaccgattaaaataaatatattattgaaagtttgttgtgtttacatttattttaattttagttaatcgttcccaaaccattcggaacagacgtatcggaggagtttggcagctgccactgtgacaggataattttatgaatttttcctgtgacagtttgactccgatacgtctaaaagtgggaacctatcaaca

SEQ ID NO: 134 - DNA, 3099 bp, Diabrotica virgifera
gtgtggtaggagatgtgaggtggacgttgacagttgtttttttttgttttctttaagttgctactttcataaccatttaagataataaagaataataagaaagtccagttgggatctacataataatagttaagtcggttataatagtgagtcgagcattagatttttttagaaatgttccgaaaaatttgtttgaaacacggtttttgttttttatttttttacattttgaggttaaaaaataagactctgcgtaattttagcacgccactccctcctctgacaccaaaaccgtcatttttatttttatttatttttttttcgtgggttgcaatcgatttaaaaatttcaaaaaattaacacgcatagttcagtcttttacaaaatttgtgtattttttatagaaccgtgtctagtgtaaatagtgtaaaaagtgtaaataaactaaaaaatttttttttttttaggaaaaagcgtatattattttgagatggctgcagatctaatttgttttattttgggttttttttcaaatatatattattatgtatcactttatcaatcaaagatagagtaaaaattttaattttttaattataacgcgggcacataaatttgatacaccctgtatattgatttgtaactatttaatagaaggtagcttttacgcagtgggtctatcctaatgagtttttccctgaagacttaaagacatttgtaaacaaagtgaagtgaaaatacaatttatttcggattataatttaaaaagattgtttgttacgggaaaggtaagatccacatgcagctgtttggaattttaagtctgttttgtttaagcaccagaatatttgtataatttccggaaagtgattaggatgagtagaagtattatttgaaagaatgcctgggtttttttgaatgaaaaagaggaatgtggaaagagaaatgtttctgattggcttgacaatttagaaggggaaaaggaagattgaatgttgagacagtttggaaaagaaaaattattgtgtggtcggcatccgagagaagcagtcgaaagttttcgcgtatagttcagaagcaagtactagtggttgtttaatagtggagagtagctgaaaagtggaacgagagacaaatcaaattgagaagaaaaacctctttgattctgtaaagtccaagagagtaagttacaagaactatagttattaaaattatttgtgacaccaagtaaaaaagatacttgggtctcaggagattattattgagagaaagagaggagagagtattggagtttattgaacgagtactggtcaaaagcggcctggcttgtgttttggagaaatagttgctggtatgctgctggattgatgctgagaacggagagggctttgattggtagcctaacataatcaacaaggaagagctgtttgggtcaagaggagacatcgttgtgtgtgaatcaaaaagatcagtcaataacttatgtgatagatgttctttataatcagaagttaaaatatttgcgtaaaatcatatgaattaagattccaacatttcaataatttaataggaagtataagtagttttgcaaatacctaaatttgtttgtttagcttattttataaatggtatcaggaacaaagcgataaatatttgtttaaattagaataattatatggtaaaagtttcatttggacaattatgcccacaggatttaattgatagattttcagagcattgcttttgataataaaggtatttgtatgtgcttatttatgatttttctatttatttccttttcctattttatcccgataaggatcaactagatactgaagccacgagaaaggataagtacaacctaagataattttagttaatttttatgacaaaaaggcaccctgagaatttttattaattgtttatgtatgatttgcgtcaatttaataattaagtaaataaatactcaattaaaataaaagtaatagaaagcagatcataacaatacatacaaaaaccaaattttcgttcaaatttttataaaattcaacttcaattaaatgctgttttcatgtaaaacaaacttttttttttagtttgataatataattgtttttatttaaaaagcaaaattgatattgttttaatagttttttatacgataacggttgaaacaatttttagcaattaagaaaatttataacgttgtttaaatctaaaaatcctattagatgacccacatttagatcctacaaacttttgggtaaataaaaaaataccagttctgtagccgatttaaaaatccccaggcacatctaattacctaattttaatttttcaaaaataatttgaaaacttgtttaagcttctataggtcaaaaacaacgaattaaataacaaaaaatgttccacgagaccaagtcttgaaaagactcgaattttctgttcatagcaagactgcataatcattatgcaaatctatgaaaaaagtattgcattttctttatttaattttatttatttttttggttttagagataacttcttattatctgttattacttttgtggcgacacgctttaattactatttttgctaattttatttttttaataacttttcttaaaacggtcatataaaattcacatttaatatacaaaccagatgctaaaaagttttacgaaacgaaatgtatccctaaccatatgtttttggtgtgttcagtttaacaaactgaattccccataaattaattaccttatcagaccttatgtcaataacgcactttggaaatgcattcgaagacgtttcttaaaactacagaaaggttctgagcttttaaaacgccagatgtagtaatttatcaccttttctagccatattgtaaaaccgcaaacatgatgatcgtgttgtggtctctgcagtatcgtcacggcaggcaggcagctcagacgccccttcgctgccctcaaacaataaacaaccctcttacgagatgaataagcacgccttttaaccaaaaataaaataaatattactgtttattgtttacacttttttttaatgattccgttaacccacacccacaccatcggaaca

SEQ ID NO: 135 - DNA, 3096 bp, Diabrotica virgifera
gtgtggtaggagatgtgaggtggacgttgacagttgtttttttttgttttctttaagttgctactttcataaccatttaagataataaagaataataagaaagtccagttgggatctacataataatagttaagtcggttataatagtgagtcgagcattagatttttttagaaatgttccgaaaaatttgtttgaaacacggtttttgttttttatttttttacattttgaggttaaaaaataagactctgcgtaattttagcacgccactccctcctctgacaccaaaaccgtcatttttatttttatttatttttttttcgtgggttgcaatcgatttaaaaatttcaaaaaattaacacgcatagttcagtcttttacaaaatttgtgtattttttatagaaccgtgtctagtgtaaatagtgtaaaaagtgtaaataaactaaaaaatttttttttttttaggaaaaagcgtatattattttgagatggctgcagatctaatttgttttattttgggttttttttcaaatatatattattatgtatcactttatcaatcaaagatagagtaaaaattttaattttttaattataacgcgggcacataaatttgatacaccctgtatattgatttgtaactatttaatagaaggtagcttttacgcagtgggtctatcctaatgagtttttccctgaagacttaaagacatttgtaaacaaagtgaagtgaaaatacaatttatttcggattataatttaaaaagattgtttgttacgggaaaggtaagatccacatgcagctgtttggaattttaagtctgttttgtttaagcaccagaatatttgtataatttccggaaagtgattaggatgagtagaagtattatttgaaagaatgcctgggtttttttgaatgaaaaagaggaatgtggaaagagaaatgtttctgattggcttgacaatttagaaggggaaaaggaagattgaatgttgagacagtttggaaaagaaaaattattgtgtggtcggcatccgagagaagcagtcgaaagttttcgcgtatagttcagaagcaagtactagtggttgtttaatagtggagagtagctgaaaagtggaacgagagacaaatcaaattgagaagaaaaacctctttgattctgtaaagtccaagagagtaagttacaagaactatagttattaaaattatttgtgacaccaagtaaaaaagatacttgggtctcaggagattattattgagagaaagagaggagagagtattggagtttattgaacgagtactggtcaaaagcggcctggcttgtgttttggagaaatagttgctggtatgctgctggattgatgctgagaacggagagggctttgattggtagcctaacataatcaacaaggaagagctgtttgggtcaagaggagacatcgttgtgtgtgaatcaaaaagatcagtcaataacttatgtgatagatgttctttataatcagaagttaaaatatttgcgtaaaatcatatgaattaagattccaacatttcaataatttaataggaagtataagtagttttgcaaatacctaaatttgtttgtttagcttattttataaatggtatcaggaacaaagcgataaatatttgtttaaattagaataattatatggtaaaagtttcatttggacaattatgcccacaggatttaattgatagattttcagagcattgcttttgataataaaggtatttgtatgtgcttatttatgatttttctatttatttccttttcctattttatcccgataaggatcaactagatactgaagccacgagaaaggataagtacaacctaagataattttagttaatttttatgacaaaaaggcaccctgagaatttttattaattgtttatgtatgatttgcgtcaatttaataattaagtaaataaatactcaattaaaataaaagtaatagaaagcagatcataacaatacatacaaaaaccaaattttcgttcaaatttttataaaattcaacttcaattaaatgctgttttcatgtaaaacaaacttttttttttagtttgataatataattgtttttatttaaaaagcaaaattgatattgttttaatagttttttatacgataacggttgaaacaatttttagcaattaagaaaatttataacgttgtttaaatctaaaaatcctattagatgacccacatttagatcctacaaacttttgggtaaataaaaaaataccagttctgtagccgatttaaaaatccccaggcacatctaattacctaattttaatttttcaaaaataatttgaaaacttgtttaagcttctataggtcaaaaacaacgaattaaataacaaaaaatgttccacgagaccaagtcttgaaaagactcgaattttctgttcatagcaagactgcataatcattatgcaaatctatgaaaaaagtattgcattttctttatttaattttatttatttttttggttttagagataacttcttattatctgttattacttttgtggcgacacgctttaattactatttttgctaattttatttttttaataacttttcttaaaacggtcatataaaattcacatttaatatacaaaccagatgctaaaaagttttacgaaacgaaatgtatccctaaccatatgtttttggtgtgttcagtttaacaaactgaattccccataaattaattaccttatcagaccttatgtcaacgcactttggaaatgcattcgaagacgtttcttaaaactacagaaaggttctgagcttttaaaacgccagatgtagtaatttatcaccttttctagccatattgtaaaaccgcaaacatgatgatcgtgttgtggtctctgcagtatcgtcacggcaggcaggcagctcagacgccccttcgctgccctcaaacaataaacaaccctcttacgagatgaataagcacgccttttaaccaaaaataaaataaatattactgtttattgtttacacttttttttaatgattccgttaacccacacccacaccatcggaaca

SEQ ID NO: 136 - DNA, 3015 bp, Diabrotica virgifera
gtgtggtaggagatgtgaggtggacgttgacagttgtttttttttgttttctttaagttgctactttcataaccatttaagataataaagaataataagaaagtccagttgggatctacataataatagttaagtcggttataatagtgagtcgagcattagatttttttagaaatgttccgaaaaatttgtttgaaacacggtttttgttttttatttttttacattttgaggttaaaaaataagactctgcgtaattttagcacgccactccctcctctgacaccaaaaccgtcatttttatttttatttatttttttttcgtgggttgcaatcgatttaaaaatttcaaaaaattaacacgcatagttcagtcttttacaaaatttgtgtattttttatagaaccgtgtctagtgtaaatagtgtaaaaagtgtaaataaactaaaaaatttttttttttttaggaaaaagcgtatattattttgagatggctgcagatctaatttgttttattttgggttttttttcaaatatatattattatgtatcactttatcaatcaaagatagagtaaaaattttaattttttaattataacgcgggcacataaatttgatacaccctgtatattgatttgtaactatttaatagaaggtagcttttacgcagtgggtctatcctaatgagtttttccctgaagacttaaagacatttgtaaacaaagtgaagtgaaaatacaatttatttcggattataatttaaaaagattgtttgttacgggaaaggtaagatccacatgcagctgtttggaattttaagtctgttttgtttaagcaccagaatatttgtataatttccggaaagtgattaggatgagtagaagtattatttgaaagaatgcctgggtttttttgaatgaaaaagaggaatgtggaaagagaaatgtttctgattggcttgacaatttagaaggggaaaaggaagattgaatgttgagacagtttggaaaagaaaaattattgtgtggtcggcatccgagagaagcagtcgaaagttttcgcgtatagttcagaagcaagtactagtggttgtttaatagtggagagtagctgaaaagtggaacgagagacaaatcaaattgagaagaaaaacctctttgattctgtaaagtccaagagagtaagttacaagaactatagttattaaaattatttgtgacaccaagtaaaaaagatacttgggtctcaggagattattattgagagaaagagaggagagagtattggagtttattgaacgagtactggtcaaaagcggcctggcttgtgttttggagaaatagttgctggtatgctgctggattgatgctgagaacggagagggctttgattggtagcctaacataatcaacaaggaagagctgtttgggtcaagaggagacatcgttgtgtgtgaatcaaaaagatcagtcaataacttatgtgatagatgttctttataatcagaagttaaaatatttgcgtaaaatcatatgaattaagattccaacatttcaataatttaataggaagtataagtagttttgcaaatacctaaatttgtttgtttagcttattttataaatggtatcaggaacaaagcgataaatatttgtttaaattagaataattatatggtaaaagtttcatttggacaattatgcccacaggatttaattgatagattttcagagcattgcttttgataataaaggtatttgtatgtgcttatttatgatttttctatttatttccttttcctattttatcccgataaggatcaactagatactgaagccacgagaaaggataagtacaacctaagataattttagttaatttttatgacaaaaaggcaccctgagaatttttattaattgtttatgtatgatttgcgtcaatttaataattaagtaaataaatactcaattaaaataaaagtaatagaaagcagatcataacaatacatacaaaaaccaaattttcgttcaaatttttataaaattcaacttcaattaaatgctgttttcatgtaaaacaaacttttttttttagtttgataatataattgtttttatttaaaaagcaaaattgatattgttttaatagttttttatacgataacggttgaaacaatttttagcaattaagaaaatttataacgttgtttaaatctaaaaatcctattagatgacccacatttagatcctacaaacttttgggtaaataaaaaaataccagttctgtagccgatttaaaaatccccaggcacatctaattacctaattttaatttttcaaaaataatttgaaaacttgtttaagcttctataggtcaaaaacaacgaattaaataacaaaaaatgttccacgagaccaagtcttgaaaagactcgaattttctgttcatagcaagactgcataatcattatgcaaatctatgaaaaaagtattgcattttctttatttaattttatttatttttttggttttagagataacttcttattatctgttattacttttgtggcgacacgctttaattactatttttgctaattttatttttttaataacttttcttaaaacggtcatataaaattcacatttaatatacaaaccagatgctaaaaagttttacgaaacgaaatgtatccctaaccatatgtttttggtgtgttcagtttaacaaactgaattccccataaattaattaccttatcagaccttatgtcaataacgcactttggaaatgcattcgaagacgtttcttaaaactacagaaaggttctgagcttttaaaacgccagatgtagtaatttattgccttttctagccatattgtaaaaccgcaaacatgatgaccgtgttgtggtctctgcagtatcgtcacaggcaggcaggcagttcagacgcaccctcgctgccccaaataataaacaaccctctttacgatatgaataagcacgcatttt

SEQ ID NO: 137 - DNA, 3012 bp, Diabrotica virgifera
gtgtggtaggagatgtgaggtggacgttgacagttgtttttttttgttttctttaagttgctactttcataaccatttaagataataaagaataataagaaagtccagttgggatctacataataatagttaagtcggttataatagtgagtcgagcattagatttttttagaaatgttccgaaaaatttgtttgaaacacggtttttgttttttatttttttacattttgaggttaaaaaataagactctgcgtaattttagcacgccactccctcctctgacaccaaaaccgtcatttttatttttatttatttttttttcgtgggttgcaatcgatttaaaaatttcaaaaaattaacacgcatagttcagtcttttacaaaatttgtgtattttttatagaaccgtgtctagtgtaaatagtgtaaaaagtgtaaataaactaaaaaatttttttttttttaggaaaaagcgtatattattttgagatggctgcagatctaatttgttttattttgggttttttttcaaatatatattattatgtatcactttatcaatcaaagatagagtaaaaattttaattttttaattataacgcgggcacataaatttgatacaccctgtatattgatttgtaactatttaatagaaggtagcttttacgcagtgggtctatcctaatgagtttttccctgaagacttaaagacatttgtaaacaaagtgaagtgaaaatacaatttatttcggattataatttaaaaagattgtttgttacgggaaaggtaagatccacatgcagctgtttggaattttaagtctgttttgtttaagcaccagaatatttgtataatttccggaaagtgattaggatgagtagaagtattatttgaaagaatgcctgggtttttttgaatgaaaaagaggaatgtggaaagagaaatgtttctgattggcttgacaatttagaaggggaaaaggaagattgaatgttgagacagtttggaaaagaaaaattattgtgtggtcggcatccgagagaagcagtcgaaagttttcgcgtatagttcagaagcaagtactagtggttgtttaatagtggagagtagctgaaaagtggaacgagagacaaatcaaattgagaagaaaaacctctttgattctgtaaagtccaagagagtaagttacaagaactatagttattaaaattatttgtgacaccaagtaaaaaagatacttgggtctcaggagattattattgagagaaagagaggagagagtattggagtttattgaacgagtactggtcaaaagcggcctggcttgtgttttggagaaatagttgctggtatgctgctggattgatgctgagaacggagagggctttgattggtagcctaacataatcaacaaggaagagctgtttgggtcaagaggagacatcgttgtgtgtgaatcaaaaagatcagtcaataacttatgtgatagatgttctttataatcagaagttaaaatatttgcgtaaaatcatatgaattaagattccaacatttcaataatttaataggaagtataagtagttttgcaaatacctaaatttgtttgtttagcttattttataaatggtatcaggaacaaagcgataaatatttgtttaaattagaataattatatggtaaaagtttcatttggacaattatgcccacaggatttaattgatagattttcagagcattgcttttgataataaaggtatttgtatgtgcttatttatgatttttctatttatttccttttcctattttatcccgataaggatcaactagatactgaagccacgagaaaggataagtacaacctaagataattttagttaatttttatgacaaaaaggcaccctgagaatttttattaattgtttatgtatgatttgcgtcaatttaataattaagtaaataaatactcaattaaaataaaagtaatagaaagcagatcataacaatacatacaaaaaccaaattttcgttcaaatttttataaaattcaacttcaattaaatgctgttttcatgtaaaacaaacttttttttttagtttgataatataattgtttttatttaaaaagcaaaattgatattgttttaatagttttttatacgataacggttgaaacaatttttagcaattaagaaaatttataacgttgtttaaatctaaaaatcctattagatgacccacatttagatcctacaaacttttgggtaaataaaaaaataccagttctgtagccgatttaaaaatccccaggcacatctaattacctaattttaatttttcaaaaataatttgaaaacttgtttaagcttctataggtcaaaaacaacgaattaaataacaaaaaatgttccacgagaccaagtcttgaaaagactcgaattttctgttcatagcaagactgcataatcattatgcaaatctatgaaaaaagtattgcattttctttatttaattttatttatttttttggttttagagataacttcttattatctgttattacttttgtggcgacacgctttaattactatttttgctaattttatttttttaataacttttcttaaaacggtcatataaaattcacatttaatatacaaaccagatgctaaaaagttttacgaaacgaaatgtatccctaaccatatgtttttggtgtgttcagtttaacaaactgaattccccataaattaattaccttatcagaccttatgtcaacgcactttggaaatgcattcgaagacgtttcttaaaactacagaaaggttctgagcttttaaaacgccagatgtagtaatttattgccttttctagccatattgtaaaaccgcaaacatgatgaccgtgttgtggtctctgcagtatcgtcacaggcaggcaggcagttcagacgcaccctcgctgccccaaataataaacaaccctctttacgatatgaataagcacgcatttt

SEQ ID NO: 138 - DNA, 6366 bp, Diabrotica virgifera
  SmartBlast Evalue=0; Info=Long-chain-fatty-acid--CoA ligase 3 n= 1 Tax=Camponotus floridanus RepID=E2AYR1_9HYME
agttttattaatccacgtgttcaaaaatattttcaggatattttaatatatagatccattctgctgatatattgtaatgcagctttgccatttatataactattttccaacaactattataatatcctatctatatgtacatgcatacttaataccttagtaaaggtatttaaaacatagagaagcgatgacaaatgtacagaaaccaagccatcattaaatatagttattatttgtaaaacattttgtcttgtacgtttaagaagtatttcaaaggagctgaccaccagaacaaatattattagtggatatatctcaattactagcgacatcaatatcgatttttgctcgaaatcgaaaagttgaatcacaaccaccctaaaaaggaaaggaaaacatctaaatacctaaattttacttttactaataaaaccaagaattacgcttaaaagaatctgcgaaaattggttgaaaaatgaatttaaataaaacaaaaatgatgacaaatcaaaatatcacaatcgacctcgatgaaattaagtgacgaagagtataatatattcctagctgacacaaccaaattatcagaatcaaacgttagagacaactagaagaatccgaatcgcttgatcagcaataggaagactctgtactgtgttgtaagacgaaaagatatcaataaacctaaagaaaggggcgttcaagagctgagttctaccagttatgaactacagaatggagaccgtgacacttacagagttatcagttaacagattaagaacaacacagagggccatcgaacgagctatgttagaagtatctctgagaaaacatatacgaaataagggcgtgcgaagctggaagatgtaatttaagtgtggcgacatgctttaattactatttttgctaattttaatttttcataacttttctcaaaacaaaataatatggatcatataaaactcacatttaatatacaaaccagatgtttttggtgtgttcagtttgacaaactgaattccccataaatttattaccttatcagaccttatgtgaataactcactttggaaatgcattcgaagacgtttcttaaaactgcagaaatgtttcaacttttaaacgcaagatctaaataatttatcgcctttctggccagatggtagaaacacaaacatattagcgtttgtggtttttttcagccacagcagagtcgatctgcaacctcccgtcggtagtcacactccagcgggcgttgggataggtcaacaacacaccctttcgagatataagcaaaacacgtctttttaccgattaaaataaatatattattgttcgttgtttacacttattttaatcaattccatttactcaattccgcaccacggaacagaagaattgcgcaaataaaatgcaactggataggacatgtggcacgacaaaacaatggaaggtgaacaagaaacattttacatcggagaccacgcgagcacagtcgcggaggccacaaaaataatggttagacgacttcaaagcaaaagttaagaagaactgagaagaaaacggagaagaatggataactcatggggaggcctttgttcaggagtaaatgcaaacaatctgaagaagaagaaatgaaaaaacatgcttaaaaacggaaaattatggaatattataaaataagacacaaaaaagcgtccaattaaaaatcctctagctctaaaggaccatatttagtcatcaaatctcctaagcagcaacagaatataaaaatcttggagtaaagtataaaaaagtctaaatcaaagcaaagaaatgagataaatgattaacagaaaatcaataaaagctgcaatcagttccacctgtcttttttgcaatttctaagtaaaagttagttccgcttttatctttattaactataatatatacatttattgtctataagtataatttcttacaaaaagcagtttttccaataaaaccagcaaaaatatcgtattaaacgtctaactttgtaaaaaaaaacctattcctggtgcctgcacatttgccgcttgagtaaataactatttttatccttaagtacatgtctttaatgaaatagatgtttagaccgatcattgacaaattgacaattacctacatcggtgcaagaacagtcttttactaaaacttaacactttataacaaaaagaaaaacaacaataacaaatatgcgcaaaaaatctcataatattgctactaaaataccacaaccgtctataagttcattccaaccagcctcacagaagacttacagtggaattcttctctcaaaatacacaaaaacagtatttttcgatatttttgttgttttctgtaatatttgtatctttatttattgcttacgtctcctgtattgcttgttgaaagacgctttgttgtgaaaaagttgtcccttgtgaaacaattcatgttttctgtttattaaatgaccttaacttttacacagacgaatagcaccgttaaaatattattctcgaagtaaaactagttgaaaattgcgaaaaataagagaaacatgaatttattacccctaaaggaaccacagtgatgctaacaataatattttaagagtatttttgccttgaaatattgaagagataacaggatttttaataccacattccgtctgtgacattttaccaaaaaaaaaactgtatagtatcacttttcatgtgcccgcacgattatagtctaactctcctataaaaaagcaactatacaacgattgataagagaatttttcacatctaattcagattaatgatggtatatagtctcaagaagatgaaaaattagcaattgaaagtggcgcagtcaatctacacgatttatcatcaagaaaatcatgtctaaacacaatattgagcaaattaatcacaataaaacttcttccgtacaaaaaattagcaaaattcttcatttcatatccactcactccagaatttgatggaaaaattcgttcagagactcaactttaaaacatgtgttgaaagcctggcctaaaaattaatatcattggcggtaaaagtgtcatttatgcagaatctgtgtaattttcactataagcaccactcccgcaatattttgttgacgttggaggtaaaattgagcgatatctaaagcaataattgtaaaattatttgtgaaaaacttgctttcttagactcaaatggtacaatgcctggcctaaacttgctagagttgcaggaattggaagaataaccgcagtaaggaataaagttggagtgacactgactgcataatgtgtttcaaatgttcttttagggagtccgttgaagaaattggaaaatgcctgaccaaaaattacaattattagttgtagaagtattagttgtgcataatttctttaggtatcactaggaacataattcttgtactatgtggataaagttggagaggaaattcagtcgaaaaaacacattaaagaaaaatatagacaaaaaaaccgtgaattttttcaagtactacctcttaagcatctatctccggcaaaaatacccttaaacctaaaaataaacatttgttcttatatacattatacgcccaagagctaatatataaataaaataatacataaaatcttatttgatagcttcgttaaatatttacagaaaaaattacaaatactttttacaaattgtgctataatacacgcttagaaatcatacccttggaatcaggcgggatttcaacgaaaaaagcgaaatatacgcaaacatatttcttctttcagttaattgtagtaaaattagcaaaataaaaaaaaattgtagtaaaaatgtagtttatgtctttaatatcgttttgttctcaaagtatttccaaagttctacaataaagtcctgcctgattccttgtacacccatactagattaatcataagaaaattaaaggtgttgtaactttcaggaggcgtacattctgttgatttcgtgcttatatctctcttggatgtctttcctctttagtttaaaagctgccgttacgagccccatgtcaggggaccatacctcagtcaccaacttaatagctgctggaatttcaaatttggccagtttacttctttttccatgctctgctaattcttgcacaaccgccttctccacagtatcatccacgcacagctcctcgaacgatttatcgttgactcctttcttggcggcaagatctttgagttgctgttgatttggcacgaccagcgcgacacagaagtccttactcgattctccgtacacgcaaatgttatctactaatggacaagtcttcatctcggcctcgactttaccgagggacacgtattcgcctgcttgcagttttaccaagtctttcttacgatctatgattttgagtacaccatcttcgtgaatttcaccaatatcaccggttctaaaccatctggttccgtcttgctctaagaattcctctttcgacttctctggaagcttgtaatatcctgcactgatgttgtctccacccaaaattatttctccacgaggataaggcttatccgtaatgcgatagttgccttcttcccaacttattaacttaatatcacaaatcgtacagggggcacctactcttccgaacgacatatcaaacagatcttgtacagctgcgcaagaagttgattctgttaaaccatatccttgtattattaccacacacatgcatattcctatttgttcgtgagtctcagctgacaatggagcaccgccagatatcatcagtctcatgtttcctccaacaatttttgtgatcggggaaaatacaattttgtctatcaaaggagttgaatatcctcgccttttccatgctgatttgtactcatatgcaaatttgaatatcacttttttaagattgctgcctttgctgactttttcttggatagtttttgatattctgtctagaatgagtggtacacttgtcaatactgtcggacataatatcgtagcatctcctttggtcccccttttgattttactggacgtatcagtcatagtcaatgcacccgaatatccaataggaactccagcgaacagacaaacgctctccaccaacaactcgaagacgtgagccaacggtaagaaaccgatcattatatcattttcataaattggtgttgaatcacagaatcctttcaaagtagcgattaagttcttttgaagcagtataacacctttgggaacgcctgtagatccgctcgtgtacatgatgatggctatgtcgtctgctttagggggttgagcctctatcttagacgaagctcctttctccaaaacgtcttggaacttcaaaatagaaacaccatccttaaaaccatcggtactttccaagctcttcaattggtcttccatataaatcaagcactgcacacgtggcgtcagctgcaagatctttttaaacttcggtaacagctcgaaactggtgataagagtggtcacttcagtttcgttgatagcgtgagcgatcgcttcgtcacccaaggttgcgtagatggtgaccaaagggatgttttgcttgaagattccatgagcagcgatcatccattcggctctggtttcagcgaagatggcgacatttttgccgggatcgtttcccaattcgcggagtccacggccaaaattggtggctaggatgttgacttcggagaaagtcttccagcggtagtctcccagatcgaacttcttaaaaactcttccgttaggctgaacctcatccatctcggccaatatctgcctggtgcccaaacatcttttgttggcgtattttttgctgcagtattcgaacattttggccatggtgtcgatcttctcgcgaacgagagtgatatggtgctcttttggggctactgtggatcgataagtcaccgatttcgcatcttcttgtatttgtttcgcctttatcttttttagtcggcgtaacccttacgctgttagcgttattgttttccttcatgtcaaggacaaaatctttagaggggtccttttcgacgtcgatgataacggcctttatgcttctggacagttggcgtaaccgccatggcctctggaggattatgtatacggggaacgtgaggacgtcgtacacgaatgctagggccttcagcgcgcctatcgctatggtgaacccaacgccatccatatccccgaaatacacagtcatgatgctatcctcctggccaaaaaataaaatacaaaaacaagaaacctaaaaaataaatcgaacacaaaaacacaaattatcacaatcaacacgcactaatcagttgagtatcacaaggaagtgtgttcactttgac

SEQ ID NO: 139 - DNA, 3048 bp, Diabrotica virgifera
gtgtggtaggagatgtgaggtggacgttgacagttgtttttttttgttttctttaagttgctactttcataaccatttaagataataaagaataataagaaagtccagttgggatctacataataatagttaagtcggttataatagtgagtcgagcattagatttttttagaaatgttccgaaaaatttgtttgaaacacggtttttgttttttatttttttacattttgaggttaaaaaataagactctgcgtaattttagcacgccactccctcctctgacaccaaaaccgtcatttttatttttatttatttttttttcgtgggttgcaatcgatttaaaaatttcaaaaaattaacacgcatagttcagtcttttacaaaatttgtgtattttttatagaaccgtgtctagtgtaaatagtgtaaaaagtgtaaataaactaaaaaatttttttttttttaggaaaaagcgtatattattttgagatggctgcagatctaatttgttttattttgggttttttttcaaatatatattattatgtatcactttatcaatcaaagatagagtaaaaattttaattttttaattataacgcgggcacataaatttgatacaccctgtatattgatttgtaactatttaatagaaggtagcttttacgcagtgggtctatcctaatgagtttttccctgaagacttaaagacatttgtaaacaaagtgaagtgaaaatacaatttatttcggattataatttaaaaagattgtttgttacgggaaaggtaagatccacatgcagctgtttggaattttaagtctgttttgtttaagcaccagaatatttgtataatttccggaaagtgattaggatgagtagaagtattatttgaaagaatgcctgggtttttttgaatgaaaaagaggaatgtggaaagagaaatgtttctgattggcttgacaatttagaaggggaaaaggaagattgaatgttgagacagtttggaaaagaaaaattattgtgtggtcggcatccgagagaagcagtcgaaagttttcgcgtatagttcagaagcaagtactagtggttgtttaatagtggagagtagctgaaaagtggaacgagagacaaatcaaattgagaagaaaaacctctttgattctgtaaagtccaagagagtaagttacaagaactatagttattaaaattatttgtgacaccaagtaaaaaagatacttgggtctcaggagattattattgagagaaagagaggagagagtattggagtttattgaacgagtactggtcaaaagcggcctggcttgtgttttggagaaatagttgctggtatgctgctggattgatgctgagaacggagagggctttgattggtagcctaacataatcaacaaggaagagctgtttgggtcaagaggagacatcgttgtgtgtgaatcaaaaagatcagtcaataacttatgtgatagatgttctttataatcagaagttaaaatatttgcgtaaaatcatatgaattaagattccaacatttcaataatttaataggaagtataagtagttttgcaaatacctaaatttgtttgtttagcttattttataaatggtatcaggaacaaagcgataaatatttgtttaaattagaataattatatggtaaaagtttcatttggacaattatgcccacaggatttaattgatagattttcagagcattgcttttgataataaaggtatttgtatgtgcttatttatgatttttctatttatttccttttcctattttatcccgataaggatcaactagatactgaagccacgagaaaggataagtacaacctaagataattttagttaatttttatgacaaaaaggcaccctgagaatttttattaattgtttatgtatgatttgcgtcaatttaataattaagtaaataaatactcaattaaaataaaagtaatagaaagcagatcataacaatacatacaaaaaccaaattttcgttcaaatttttataaaattcaacttcaattaaatgctgttttcatgtaaaacaaacttttttttttagtttgataatataattgtttttatttaaaaagcaaaattgatattgttttaatagttttttatacgataacggttgaaacaatttttagcaattaagaaaatttataacgttgtttaaatctaaaaatcctattagatgacccacatttagatcctacaaacttttgggtaaataaaaaaataccagttctgtagccgatttaaaaatccccaggcacatctaattacctaattttaatttttcaaaaataatttgaaaacttgtttaagcttctataggtcaaaaacaacgaattaaataacaaaaaatgttccacgagaccaagtcttgaaaagactcgaattttctgttcatagcaagactgcataatcattatgcaaatctatgaaaaaagtattgcattttctttatttaattttatttatttttttggttttagagataacttcttattatctgttattacttttgtggcgacacgctttaattactatttttgctaattttatttttttaataacttttcttaaaacggtcatataaaattcacatttaatatacaaaccagatgctaaaaagttttacgaaacgaaatgtatccctaaccatatgtttttggtgtgttcagtttaacaaactgaattccccataaattaattaccttatcagaccttatgtcaataacgcactttggaaatgcattcgaagacgtttccttaaaactacagaaaggttctgagcttttaaaacgccagatgcagtaatttattgccttttctagcaatattgtaaaaccgcaaacatgatgataataaacttactaaggaagtaaaacttcacttgtaggtagatggtatataaatttattaaaatttttataaaaagatcccaattggattaaagtgggttcatcactagtacaaaaacacaaacgttttcggaccaatcagtc

SEQ ID NO: 140 - DNA, 3045 bp, Diabrotica virgifera
gtgtggtaggagatgtgaggtggacgttgacagttgtttttttttgttttctttaagttgctactttcataaccatttaagataataaagaataataagaaagtccagttgggatctacataataatagttaagtcggttataatagtgagtcgagcattagatttttttagaaatgttccgaaaaatttgtttgaaacacggtttttgttttttatttttttacattttgaggttaaaaaataagactctgcgtaattttagcacgccactccctcctctgacaccaaaaccgtcatttttatttttatttatttttttttcgtgggttgcaatcgatttaaaaatttcaaaaaattaacacgcatagttcagtcttttacaaaatttgtgtattttttatagaaccgtgtctagtgtaaatagtgtaaaaagtgtaaataaactaaaaaatttttttttttttaggaaaaagcgtatattattttgagatggctgcagatctaatttgttttattttgggttttttttcaaatatatattattatgtatcactttatcaatcaaagatagagtaaaaattttaattttttaattataacgcgggcacataaatttgatacaccctgtatattgatttgtaactatttaatagaaggtagcttttacgcagtgggtctatcctaatgagtttttccctgaagacttaaagacatttgtaaacaaagtgaagtgaaaatacaatttatttcggattataatttaaaaagattgtttgttacgggaaaggtaagatccacatgcagctgtttggaattttaagtctgttttgtttaagcaccagaatatttgtataatttccggaaagtgattaggatgagtagaagtattatttgaaagaatgcctgggtttttttgaatgaaaaagaggaatgtggaaagagaaatgtttctgattggcttgacaatttagaaggggaaaaggaagattgaatgttgagacagtttggaaaagaaaaattattgtgtggtcggcatccgagagaagcagtcgaaagttttcgcgtatagttcagaagcaagtactagtggttgtttaatagtggagagtagctgaaaagtggaacgagagacaaatcaaattgagaagaaaaacctctttgattctgtaaagtccaagagagtaagttacaagaactatagttattaaaattatttgtgacaccaagtaaaaaagatacttgggtctcaggagattattattgagagaaagagaggagagagtattggagtttattgaacgagtactggtcaaaagcggcctggcttgtgttttggagaaatagttgctggtatgctgctggattgatgctgagaacggagagggctttgattggtagcctaacataatcaacaaggaagagctgtttgggtcaagaggagacatcgttgtgtgtgaatcaaaaagatcagtcaataacttatgtgatagatgttctttataatcagaagttaaaatatttgcgtaaaatcatatgaattaagattccaacatttcaataatttaataggaagtataagtagttttgcaaatacctaaatttgtttgtttagcttattttataaatggtatcaggaacaaagcgataaatatttgtttaaattagaataattatatggtaaaagtttcatttggacaattatgcccacaggatttaattgatagattttcagagcattgcttttgataataaaggtatttgtatgtgcttatttatgatttttctatttatttccttttcctattttatcccgataaggatcaactagatactgaagccacgagaaaggataagtacaacctaagataattttagttaatttttatgacaaaaaggcaccctgagaatttttattaattgtttatgtatgatttgcgtcaatttaataattaagtaaataaatactcaattaaaataaaagtaatagaaagcagatcataacaatacatacaaaaaccaaattttcgttcaaatttttataaaattcaacttcaattaaatgctgttttcatgtaaaacaaacttttttttttagtttgataatataattgtttttatttaaaaagcaaaattgatattgttttaatagttttttatacgataacggttgaaacaatttttagcaattaagaaaatttataacgttgtttaaatctaaaaatcctattagatgacccacatttagatcctacaaacttttgggtaaataaaaaaataccagttctgtagccgatttaaaaatccccaggcacatctaattacctaattttaatttttcaaaaataatttgaaaacttgtttaagcttctataggtcaaaaacaacgaattaaataacaaaaaatgttccacgagaccaagtcttgaaaagactcgaattttctgttcatagcaagactgcataatcattatgcaaatctatgaaaaaagtattgcattttctttatttaattttatttatttttttggttttagagataacttcttattatctgttattacttttgtggcgacacgctttaattactatttttgctaattttatttttttaataacttttcttaaaacggtcatataaaattcacatttaatatacaaaccagatgctaaaaagttttacgaaacgaaatgtatccctaaccatatgtttttggtgtgttcagtttaacaaactgaattccccataaattaattaccttatcagaccttatgtcaacgcactttggaaatgcattcgaagacgtttccttaaaactacagaaaggttctgagcttttaaaacgccagatgcagtaatttattgccttttctagcaatattgtaaaaccgcaaacatgatgataataaacttactaaggaagtaaaacttcacttgtaggtagatggtatataaatttattaaaatttttataaaaagatcccaattggattaaagtgggttcatcactagtacaaaaacacaaacgttttcggaccaatcagtc

SEQ ID NO: 141 - DNA, 3005 bp, Diabrotica virgifera
gtgtggtaggagatgtgaggtggacgttgacagttgtttttttttgttttctttaagttgctactttcataaccatttaagataataaagaataataagaaagtccagttgggatctacataataatagttaagtcggttataatagtgagtcgagcattagatttttttagaaatgttccgaaaaatttgtttgaaacacggtttttgttttttatttttttacattttgaggttaaaaaataagactctgcgtaattttagcacgccactccctcctctgacaccaaaaccgtcatttttatttttatttatttttttttcgtgggttgcaatcgatttaaaaatttcaaaaaattaacacgcatagttcagtcttttacaaaatttgtgtattttttatagaaccgtgtctagtgtaaatagtgtaaaaagtgtaaataaactaaaaaatttttttttttttaggaaaaagcgtatattattttgagatggctgcagatctaatttgttttattttgggttttttttcaaatatatattattatgtatcactttatcaatcaaagatagagtaaaaattttaattttttaattataacgcgggcacataaatttgatacaccctgtatattgatttgtaactatttaatagaaggtagcttttacgcagtgggtctatcctaatgagtttttccctgaagacttaaagacatttgtaaacaaagtgaagtgaaaatacaatttatttcggattataatttaaaaagattgtttgttacgggaaaggtaagatccacatgcagctgtttggaattttaagtctgttttgtttaagcaccagaatatttgtataatttccggaaagtgattaggatgagtagaagtattatttgaaagaatgcctgggtttttttgaatgaaaaagaggaatgtggaaagagaaatgtttctgattggcttgacaatttagaaggggaaaaggaagattgaatgttgagacagtttggaaaagaaaaattattgtgtggtcggcatccgagagaagcagtcgaaagttttcgcgtatagttcagaagcaagtactagtggttgtttaatagtggagagtagctgaaaagtggaacgagagacaaatcaaattgagaagaaaaacctctttgattctgtaaagtccaagagagtaagttacaagaactatagttattaaaattatttgtgacaccaagtaaaaaagatacttgggtctcaggagattattattgagagaaagagaggagagagtattggagtttattgaacgagtactggtcaaaagcggcctggcttgtgttttggagaaatagttgctggtatgctgctggattgatgctgagaacggagagggctttgattggtagcctaacataatcaacaaggaagagctgtttgggtcaagaggagacatcgttgtgtgtgaatcaaaaagatcagtcaataacttatgtgatagatgttctttataatcagaagttaaaatatttgcgtaaaatcatatgaattaagattccaacatttcaataatttaataggaagtataagtagttttgcaaatacctaaatttgtttgtttagcttattttataaatggtatcaggaacaaagcgataaatatttgtttaaattagaataattatatggtaaaagtttcatttggacaattatgcccacaggatttaattgatagattttcagagcattgcttttgataataaaggtatttgtatgtgcttatttatgatttttctatttatttccttttcctattttatcccgataaggatcaactagatactgaagccacgagaaaggataagtacaacctaagataattttagttaatttttatgacaaaaaggcaccctgagaatttttattaattgtttatgtatgatttgcgtcaatttaataattaagtaaataaatactcaattaaaataaaagtaatagaaagcagatcataacaatacatacaaaaaccaaattttcgttcaaatttttataaaattcaacttcaattaaatgctgttttcatgtaaaacaaacttttttttttagtttgataatataattgtttttatttaaaaagcaaaattgatattgttttaatagttttttatacgataacggttgaaacaatttttagcaattaagaaaatttataacgttgtttaaatctaaaaatcctattagatgacccacatttagatcctacaaacttttgggtaaataaaaaaataccagttctgtagccgatttaaaaatccccaggcacatctaattacctaattttaatttttcaaaaataatttgaaaacttgtttaagcttctataggtcaaaaacaacgaattaaataacaaaaaatgttccacgagaccaagtcttgaaaagactcgaattttctgttcatagcaagactgcataatcattatgcaaatctatgaaaaaagtattgcattttctttatttaattttatttatttttttggttttagagataacttcttattatctgttattacttttgtggcgacacgctttaattactatttttgctaattttatttttttaataacttttcttaaaacggtcatataaaattcacatttaatatacaaaccagatgctaaaaagttttacgaaacgaaatgtatccctaaccatatgtttttggtgtgttcagtttaacaaactgaattccccataaattaattaccttatcagaccttatgtcaataacgcactttggaaatgcattcgaagacgtttcttaaaactacagaaaggttctgagcttttaaaacgccagatgtagtaatttatcaccttttctagccatattgtaaaaccacaaaatgatgaccgtgttgtggtctctgcattatcgtcacagcaggcaggcagttcagacgcaccctcgctgctccaaaacaataaacaaccctcttacgagatgcataagca

SEQ ID NO: 142 - DNA, 3002 bp, Diabrotica virgifera
gtgtggtaggagatgtgaggtggacgttgacagttgtttttttttgttttctttaagttgctactttcataaccatttaagataataaagaataataagaaagtccagttgggatctacataataatagttaagtcggttataatagtgagtcgagcattagatttttttagaaatgttccgaaaaatttgtttgaaacacggtttttgttttttatttttttacattttgaggttaaaaaataagactctgcgtaattttagcacgccactccctcctctgacaccaaaaccgtcatttttatttttatttatttttttttcgtgggttgcaatcgatttaaaaatttcaaaaaattaacacgcatagttcagtcttttacaaaatttgtgtattttttatagaaccgtgtctagtgtaaatagtgtaaaaagtgtaaataaactaaaaaatttttttttttttaggaaaaagcgtatattattttgagatggctgcagatctaatttgttttattttgggttttttttcaaatatatattattatgtatcactttatcaatcaaagatagagtaaaaattttaattttttaattataacgcgggcacataaatttgatacaccctgtatattgatttgtaactatttaatagaaggtagcttttacgcagtgggtctatcctaatgagtttttccctgaagacttaaagacatttgtaaacaaagtgaagtgaaaatacaatttatttcggattataatttaaaaagattgtttgttacgggaaaggtaagatccacatgcagctgtttggaattttaagtctgttttgtttaagcaccagaatatttgtataatttccggaaagtgattaggatgagtagaagtattatttgaaagaatgcctgggtttttttgaatgaaaaagaggaatgtggaaagagaaatgtttctgattggcttgacaatttagaaggggaaaaggaagattgaatgttgagacagtttggaaaagaaaaattattgtgtggtcggcatccgagagaagcagtcgaaagttttcgcgtatagttcagaagcaagtactagtggttgtttaatagtggagagtagctgaaaagtggaacgagagacaaatcaaattgagaagaaaaacctctttgattctgtaaagtccaagagagtaagttacaagaactatagttattaaaattatttgtgacaccaagtaaaaaagatacttgggtctcaggagattattattgagagaaagagaggagagagtattggagtttattgaacgagtactggtcaaaagcggcctggcttgtgttttggagaaatagttgctggtatgctgctggattgatgctgagaacggagagggctttgattggtagcctaacataatcaacaaggaagagctgtttgggtcaagaggagacatcgttgtgtgtgaatcaaaaagatcagtcaataacttatgtgatagatgttctttataatcagaagttaaaatatttgcgtaaaatcatatgaattaagattccaacatttcaataatttaataggaagtataagtagttttgcaaatacctaaatttgtttgtttagcttattttataaatggtatcaggaacaaagcgataaatatttgtttaaattagaataattatatggtaaaagtttcatttggacaattatgcccacaggatttaattgatagattttcagagcattgcttttgataataaaggtatttgtatgtgcttatttatgatttttctatttatttccttttcctattttatcccgataaggatcaactagatactgaagccacgagaaaggataagtacaacctaagataattttagttaatttttatgacaaaaaggcaccctgagaatttttattaattgtttatgtatgatttgcgtcaatttaataattaagtaaataaatactcaattaaaataaaagtaatagaaagcagatcataacaatacatacaaaaaccaaattttcgttcaaatttttataaaattcaacttcaattaaatgctgttttcatgtaaaacaaacttttttttttagtttgataatataattgtttttatttaaaaagcaaaattgatattgttttaatagttttttatacgataacggttgaaacaatttttagcaattaagaaaatttataacgttgtttaaatctaaaaatcctattagatgacccacatttagatcctacaaacttttgggtaaataaaaaaataccagttctgtagccgatttaaaaatccccaggcacatctaattacctaattttaatttttcaaaaataatttgaaaacttgtttaagcttctataggtcaaaaacaacgaattaaataacaaaaaatgttccacgagaccaagtcttgaaaagactcgaattttctgttcatagcaagactgcataatcattatgcaaatctatgaaaaaagtattgcattttctttatttaattttatttatttttttggttttagagataacttcttattatctgttattacttttgtggcgacacgctttaattactatttttgctaattttatttttttaataacttttcttaaaacggtcatataaaattcacatttaatatacaaaccagatgctaaaaagttttacgaaacgaaatgtatccctaaccatatgtttttggtgtgttcagtttaacaaactgaattccccataaattaattaccttatcagaccttatgtcaacgcactttggaaatgcattcgaagacgtttcttaaaactacagaaaggttctgagcttttaaaacgccagatgtagtaatttatcaccttttctagccatattgtaaaaccacaaaatgatgaccgtgttgtggtctctgcattatcgtcacagcaggcaggcagttcagacgcaccctcgctgctccaaaacaataaacaaccctcttacgagatgcataagca

SEQ ID NO: 143 - DNA, 2987 bp, Diabrotica virgifera
gtgtggtaggagatgtgaggtggacgttgacagttgtttttttttgttttctttaagttgctactttcataaccatttaagataataaagaataataagaaagtccagttgggatctacataataatagttaagtcggttataatagtgagtcgagcattagatttttttagaaatgttccgaaaaatttgtttgaaacacggtttttgttttttatttttttacattttgaggttaaaaaataagactctgcgtaattttagcacgccactccctcctctgacaccaaaaccgtcatttttatttttatttatttttttttcgtgggttgcaatcgatttaaaaatttcaaaaaattaacacgcatagttcagtcttttacaaaatttgtgtattttttatagaaccgtgtctagtgtaaatagtgtaaaaagtgtaaataaactaaaaaatttttttttttttaggaaaaagcgtatattattttgagatggctgcagatctaatttgttttattttgggttttttttcaaatatatattattatgtatcactttatcaatcaaagatagagtaaaaattttaattttttaattataacgcgggcacataaatttgatacaccctgtatattgatttgtaactatttaatagaaggtagcttttacgcagtgggtctatcctaatgagtttttccctgaagacttaaagacatttgtaaacaaagtgaagtgaaaatacaatttatttcggattataatttaaaaagattgtttgttacgggaaaggtaagatccacatgcagctgtttggaattttaagtctgttttgtttaagcaccagaatatttgtataatttccggaaagtgattaggatgagtagaagtattatttgaaagaatgcctgggtttttttgaatgaaaaagaggaatgtggaaagagaaatgtttctgattggcttgacaatttagaaggggaaaaggaagattgaatgttgagacagtttggaaaagaaaaattattgtgtggtcggcatccgagagaagcagtcgaaagttttcgcgtatagttcagaagcaagtactagtggttgtttaatagtggagagtagctgaaaagtggaacgagagacaaatcaaattgagaagaaaaacctctttgattctgtaaagtccaagagagtaagttacaagaactatagttattaaaattatttgtgacaccaagtaaaaaagatacttgggtctcaggagattattattgagagaaagagaggagagagtattggagtttattgaacgagtactggtcaaaagcggcctggcttgtgttttggagaaatagttgctggtatgctgctggattgatgctgagaacggagagggctttgattggtagcctaacataatcaacaaggaagagctgtttgggtcaagaggagacatcgttgtgtgtgaatcaaaaagatcagtcaataacttatgtgatagatgttctttataatcagaagttaaaatatttgcgtaaaatcatatgaattaagattccaacatttcaataatttaataggaagtataagtagttttgcaaatacctaaatttgtttgtttagcttattttataaatggtatcaggaacaaagcgataaatatttgtttaaattagaataattatatggtaaaagtttcatttggacaattatgcccacaggatttaattgatagattttcagagcattgcttttgataataaaggtatttgtatgtgcttatttatgatttttctatttatttccttttcctattttatcccgataaggatcaactagatactgaagccacgagaaaggataagtacaacctaagataattttagttaatttttatgacaaaaaggcaccctgagaatttttattaattgtttatgtatgatttgcgtcaatttaataattaagtaaataaatactcaattaaaataaaagtaatagaaagcagatcataacaatacatacaaaaaccaaattttcgttcaaatttttataaaattcaacttcaattaaatgctgttttcatgtaaaacaaacttttttttttagtttgataatataattgtttttatttaaaaagcaaaattgatattgttttaatagttttttatacgataacggttgaaacaatttttagcaattaagaaaatttataacgttgtttaaatctaaaaatcctattagatgacccacatttagatcctacaaacttttgggtaaataaaaaaataccagttctgtagccgatttaaaaatccccaggcacatctaattacctaattttaatttttcaaaaataatttgaaaacttgtttaagcttctataggtcaaaaacaacgaattaaataacaaaaaatgttccacgagaccaagtcttgaaaagactcgaattttctgttcatagcaagactgcataatcattatgcaaatctatgaaaaaagtattgcattttctttatttaattttatttatttttttggttttagagataacttcttattatctgttattacttttgtggcgacacgctttaattactatttttgctaattttatttttttaataacttttcttaaaacggtcatataaaattcacatttaatatacaaaccagatgctaaaaagttttacgaaacgaaatgtatccctaaccatatgtttttggtgtgttcagtttaacaaactgaattccccataaattaattaccttatcagaccttatgtcaataattcaacttttaaacgccaaatctaaataatttatcgcctttctggccagatggtagaaacacaaacatattagcgtttgtggtttttttcagtatagtcacagcgggcacccgatgcagtcacaccagcacactcgcaaagaataacaaaccctctttcgagaaatattcacgctattttaccgacacaaataaatatattattgac

SEQ ID NO: 144 - DNA, 2742 bp, Diabrotica virgifera
tagcaagacaaatggaaacaacggaagaaagaatatctttggttagaaatacacttgatgaattctacacgttctacagtaatggtaataataattatcatcgcgcatattattgcatgtgaaactgtcgtttctacgacttctagtattagttttattatctacacttaagttttaattgtagttcattttttaatagatgaaaaacggttctgtatgaatagggcttttcaacgcttctcatttatttcgggcacttgtcatatgtcgtatattaatattatacacagattatacaacatacgacaagttaagatatctatgtcatacgtttttggtttgtatcattggtatatacgaataacgtatgttccatgggtgttcgggaacgattaacttaaattaaaataagtgtaaaaacaacaacttgtcaataatatatttatttgtgtcggtaaaatagcgtgaatatttctcgaaagagagtttgttattcttttgcgagtatggtggtgtgtccgcgccggatggttgctgtggctatactgaaagaaaccacaaacgctaatatgtttgtgtttctaccatctggccagaaaggtgataaattatttagatctggcgtttaaaagttgaaacatttctgcagttttaagaaacgtcttcgaatgcatttccaaagtgagttattgacataaggtctgataaggtaattaatttatggggaatttagtttgttaaactgaacacaccaaaaacatctggttagggatacatttcgtttcgtaaaacttaacgggcccttcttagcatctggtttgtatattaaatgtgaattttgtatgacccatattatttcgttttgagaaaagaaagttaatatttaaaattagcaattaaaaaaataataataaatgaagcgtgtcgctatacgtatgacgtagatatattaatattagaggactcatgacagaatctgacagaaatgacaatcgatgaaaagcccaattaattgacaaatgatgacagatgacggttatgattgtattgcctttcaggattgccaactgttttcctgttaagtttatgtttatgtggacaatcctttgaactttagacgttccatactgatatggtcaacgtttttacagtttccggtaaaaatatcgcttataacgagaccataaactttttaaatccaaaaatgaaaaaacatcgttgttgtgtatcaaattgtcaaaatacaacgaatgaattgtgttgcacaactgatatatgcatataacaattcaagaaagcactgagttgcctacatttggcgctactgagctgaataacctgaaaaattgattttaaaaggccttaaatacaatgtttttaaaaatgtataaacattttcaatttctttgaaacacgaaaatgcagcagctgcataatgctctggttaaatcggagagtgcaggaagagtctataccggtttcggaggtttttccccctcatcagtagtcccatattctattctctccgaattctccacgtatcatactttgggccgttccgaattgcaaagaaagatgtcacggatgaactagagccatctaccgaaaaacaaagtaagttatcaatcgaagtagcacagaaaacgacaataaatgtcgttcccataccaccagattgacaacaggtggatactttctttggttacatctcctgagatttttaaaatttataaatcaaacagtatgccgacagattctctcatcttaatttcctcggcatcctgtttgatttggcagtctgaactgcctgcctgtcgtgacgatactgccgagaccacaacactattatcatcattatgtttgcggttttacaatatggctagaaaaggcaataaattactacatgtggcgtttttaaatttaagaacctttctgtagttttaagaaacgtcttcgaatgcatttccaaagtgcgttattgacataaggtctgataaggtaattaatttatggggaattcagtttgttaaactgaacacaccaaaaacatattatggttagggacacatttcgttttgtaaaacttcttagcatctggtttgtatattaaatgtgaattttaaatgaccgttttaagaaaagttattaaaaaataaaattagctaaaagagtaattaaagcgtgtctccacaattgcaacgaatgaactccattcttgcattttttgagaaaagtagagcgaaccatataacgaccatatgcgcatggcaatatgtcttttataggaataaaatcgacaattttcatattgtctaattgaaatcagttattgatcttgttgctagtgagacaattgttaaggtggttgctgactcttgctgattattataaagcatttttgacaacttacataaaaatatgtaaaaagcatttttacaatgtgatgagaaaatatttatataccaattgtttctttgtaaataaaagttcttaatttttgaatttaattgagtttttaaatgttaggtttgaggaaattgatataaaaaatttctaatacccgctttcttacaatttacaaatgtgaaatattttgtttaatacgttctttttttctatatagttacaatgatgtactggagttattattttttagatatttaggcgaactttgtatttttactaggtcccgttggaagctggatgctttcgactggattcattaataataaaggtgtaaaa

SEQ ID NO: 145 - DNA, 2639 bp, Diabrotica virgifera
tagcaagacaaatggaaacaacggaagaaagaatatctttggttagaaatacacttgatgaattctacacgttctacagtaatggtaataataattatcatcgcgcatattattgcatgtgaaactgtcgtttctacgacttctagtattagttttattatctacacttaagttttaattgtagttcattttttaatagatgaaaaacggttctgtatgaatagggcttttcaacgcttctcatttatttcgggcacttgtcatatgtcgtatattaatattatacacagattatacaacatacgacaagttaagatatctatgtcatacgtttttggtttgtatcattggtatatacgaataacgtatgttccatgggtgttcgggaacgattaacttaaattaaaataagtgtaaaaacaacaacttgtcaataatatatttatttgtgtcggtaaaatagcgtgaatatttctcgaaagagagtttgttattcttttgcgagtatggtggtgtgtccgcgccggatggttgctgtggctatactgaaagaaaccacaaacgctaatatgtttgtgtttctaccatctggccagaaaggtgataaattatttagatctggcgtttaaaagttgaaacatttctgcagttttaagaaacgtcttcgaatgcatttccaaagtgagttattgacataaggtctgataaggtaattaatttatggggaatttagtttgttaaactgaacacaccaaaaacatctggttagggatacatttcgtttcgtaaaacttaacgggcccttcttagcatctggtttgtatattaaatgtgaattttgtatgacccatattatttcgttttgagaaaagaaagttaatatttaaaattagcaattaaaaaaataataataaatgaagcgtgtcgctatacgtatgacgtagatatattaatattagaggactcatgacagaatctgacagaaatgacaatcgatgaaaagcccaattaattgacaaatgatgacagatgacggttatgattgtattgcctttcaggattgccaactgttttcctgttaagtttatgtttatgtggacaatcctttgaactttagacgttccatactgatatggtcaacgtttttacagtttccggtaaaaatatcgcttataacgagaccataaactttttaaatccaaaaatgaaaaaacatcgttgttgtgtatcaaattgtcaaaatacaacgaatgaattgtgttgcacaactgatatatgcatataacaatttaagaaaggactgtgagttgtctacatttggcgccactgagctgaataacctgaaaaatttattttaaatgctcttaaatacaatgtttttgttccgacggtaggttgcggaatcaattaaaaataagtgtaaacaatgaacagtaatatatttatttataatatttttatattataatattttattattataatatttttatattataaacaagcgtgcttcgtttattatctcgtaagggttttgttgttttagcgagggtgtgtctgaaccgcgcgcctgctgtgacgatactgcgagaccaccacactattatatcaccatgcttgcggttttacaatatggctagaaaggcaatagattacgacatctgcgttttaaaagatgagaacctttctgtattttaagaagttgacataaagagcgtggcaatctggcctcgaaatctattagtgtttccttgaaaaaaacattaattttatacaatctgcttagggatacattttgtttcttaaacttaacggtccttgttagcatatggtttgtatattaaatgtgaattttaaatgactaatgttatttcgttttgagaaaagttattgaaaatttagcaaaaatagtaattaaagcgtatcgctatattatatgcatttaacaattcaagaaagaactgtgagttgcctacatttggccccactgaactgaataacctaaaaaatttattttaaaagctcttaaatacaatttttttaattgaatataaatacttaactgacaaattccatataaacagttgctttgtttcaattacaactttctattgcaaagttttcaataatgacttttgaaataatagacataaagcagaagcggtaaaagtgctcacaatacaaggttgattcagaccaacagtcagatcaccgttgagtcaaggggcaacccattcacacactcagtccgggcagatcaccgtcagtctacttcggcatttagatcgatcaagatgcaatattatagtcttgtagagttcttagtattgtgttccgatctgcgaaattgagtaaatggaattaattaaaatataagtgtaaacaatgaacagtaatatttattttatttttggttaaagcgagtgcttattcatctcgtaagagggttgtttattgttttggggcagcgagggtgcgcctgaactgcctccctgccgtgacgatactgccgagaccacaacactattatcatcatcatgcggttttacaatatggctagaaaggaaatagattacgacatctgcgttttaaaagctcagaacctttctgtagttttaagaaacgtctttgaatgcatt

SEQ ID NO: 146 - DNA, 2817 bp, Diabrotica virgifera
  SmartBlast Evalue=1E-117; Info="Calumenin, putative n=1 Tax= Pediculus humanus corporis RepID=E0VBH5_PEDHC"
agagggtacataataaggagttaagtgataaagaacacttggaaaatgggcaccacaatcctgaatatgaccacgaagctttcttgggagcagaagaagcaaaaactttcgatcaactgccccctgaagaaagcaaaaggagactgggaataatagcagacaaaattgatgtcaacaatgatggatttatcaacagagaagaactcaaggattggatcagatttactcagaaacgatacattactgaggatgttgacagacagtggaaacaacaaaaccctgatgataagccaaccctaccatgggagaggtaccaaacattggtttatggttttctagaaaatatggatccagcagaaatagaaaatgatagcacaggtttctcctacaaaaagatgatggccagagatcagaggcgttggaagactgcagacagagatcaagatggtgaattaagcaaagaagaattcgctgctttcttacatcctgaagaaaacgactatatgcgtgatctggttgtacaagaaactatggaagatattgacaaagacaaagatggcaaaatttcagtggaagaatatattggagacatgtacagaagtgacgagaacgaagaagaacctgactgggtaaagagcgaacgtgaacagttcaacacctaccgcgacaaagacggagacggatacatggacgaggaagagatcaaaaactggatattaccccaagatttcgaccacgccgaagccgaagcgagacatttgatctacgaggcagactccgacgctgacgaacaactaaccaaagacgaagtgttgaccaaatatgaccttttcgttggatctcaggctttagatttcggcgaggctctcaccagacacgacgagttttaaacgaaacttcttacggagtttctgaggtgaaattgatttatttttagctaaatatgtgaaaatgtggtggaatgttgatctagaagcgaaattttatatctagtatataaaagaaaacttcatatacaaattcggaaaaagtttatggttagtgttacaaaattagcgacatatctaactaatatgctaatattacgttttcatttaatagacaaagatcacaatcatatttcattgagatatgaaccctttcaacatgaacccaaaggcaagcactttgtcctggtgtcttagaccagtacaattgtagttgattgagttcccaggtccggagttcctctctgatgtggctttttgatagtccacaaaagggttctggactttggaatggggtataagccccatcttttgcgaggctgtctgcttccttatttcctgcaattcctttgtgacctggcacccacattaaagttactttgttgctctccgatagcttcttgaggggttttttacagtctcaaaccaactttgattcacaagtaattgactttggaacctttaaaacggcttggctgtctgataaaataaagagttttgccatatgagtgtctaggtggagacattcttggatactaatgtctttagcatttatttctgccagaaagatagttaggggcgttcccaagagatttggatagcctgaaattgggcccagcagctcccattcctgtccttccagtagcctaaaagtgggcccagtaacttccacttctgccctttcatctatctgtggcgacacgctttaattactatttttgctaattttattttttaataacttttctcaaaacggtcatataaagttcacatttaatatacaaactagttgctaagaagttttacaaaacgaaatgtatccctaaccacatttatgcttttggtgtgttcagtttaacaaactgaattccccataaattaattaccttatcagaccttatgtcaataacgcactttggaaatgcattcgaagacgtttcttaaaactacagaaaggttctgagcttttaaaacgccagatgtagtaatttattgccttttctagccatattgtaaaaccgcaaacatgatgataatagtggtgtggtctctgcagtatcgtcacggcaggcaggcagttcagacgcaccttcgctgccctcaaacaataaacaaccctcttacgagatgaataagcacgccttttaaccaaaaataaaataaatattactgttcgttgtttacacttatttttaatcgattccgttaacccacacatcggaacacagccatctatcaacaattagaaaaacatgttccttataaaagttacttattttttatcaggaatcgaaatatttaataaaaatgggggtttccatgtaagattttaaattagcctctttccgctctagggggtgcggccgggggtcgtatttggtgtcatttgatagatttttgaaaaatattgaacacgtgttcttcagtttttttgatccgatgtttaatatgaattgtattgaattgacaccgtgtataatatgaattaaatcaacaccactaaatgtgtgtgtttcaagtgttactttacccagataaaatatggactagatgtgtttactacaagagcgaatttacgttaggtactaattaacatcataaaatcgtgtgtgcataaccaaagaaaacgttttccttagttttctataaaataatttactaaaaattacatccaaaagttttaggctatccttaacatctgaagaaattacaatgcggtgaaatgtcgtgttatatataagggaatccagtgcaaattttccgaacatacagtttgaatttatctattttatttcagaatatacttacatcaagtaaagatgttgtcagt

SEQ ID NO: 147 - DNA, 2814 bp, Diabrotica virgifera
  SmartBlast Evalue=1E-117; Info="Calumenin, putative n=1 Tax= Pediculus humanus corporis RepID=E0VBH5_PEDHC"
agagggtacataataaggagttaagtgataaagaacacttggaaaatgggcaccacaatcctgaatatgaccacgaagctttcttgggagcagaagaagcaaaaactttcgatcaactgccccctgaagaaagcaaaaggagactgggaataatagcagacaaaattgatgtcaacaatgatggatttatcaacagagaagaactcaaggattggatcagatttactcagaaacgatacattactgaggatgttgacagacagtggaaacaacaaaaccctgatgataagccaaccctaccatgggagaggtaccaaacattggtttatggttttctagaaaatatggatccagcagaaatagaaaatgatagcacaggtttctcctacaaaaagatgatggccagagatcagaggcgttggaagactgcagacagagatcaagatggtgaattaagcaaagaagaattcgctgctttcttacatcctgaagaaaacgactatatgcgtgatctggttgtacaagaaactatggaagatattgacaaagacaaagatggcaaaatttcagtggaagaatatattggagacatgtacagaagtgacgagaacgaagaagaacctgactgggtaaagagcgaacgtgaacagttcaacacctaccgcgacaaagacggagacggatacatggacgaggaagagatcaaaaactggatattaccccaagatttcgaccacgccgaagccgaagcgagacatttgatctacgaggcagactccgacgctgacgaacaactaaccaaagacgaagtgttgaccaaatatgaccttttcgttggatctcaggctttagatttcggcgaggctctcaccagacacgacgagttttaaacgaaacttcttacggagtttctgaggtgaaattgatttatttttagctaaatatgtgaaaatgtggtggaatgttgatctagaagcgaaattttatatctagtatataaaagaaaacttcatatacaaattcggaaaaagtttatggttagtgttacaaaattagcgacatatctaactaatatgctaatattacgttttcatttaatagacaaagatcacaatcatatttcattgagatatgaaccctttcaacatgaacccaaaggcaagcactttgtcctggtgtcttagaccagtacaattgtagttgattgagttcccaggtccggagttcctctctgatgtggctttttgatagtccacaaaagggttctggactttggaatggggtataagccccatcttttgcgaggctgtctgcttccttatttcctgcaattcctttgtgacctggcacccacattaaagttactttgttgctctccgatagcttcttgaggggttttttacagtctcaaaccaactttgattcacaagtaattgactttggaacctttaaaacggcttggctgtctgataaaataaagagttttgccatatgagtgtctaggtggagacattcttggatactaatgtctttagcatttatttctgccagaaagatagttaggggcgttcccaagagatttggatagcctgaaattgggcccagcagctcccattcctgtccttccagtagcctaaaagtgggcccagtaacttccacttctgccctttcatctatctgtggcgacacgctttaattactatttttgctaattttattttttaataacttttctcaaaacggtcatataaagttcacatttaatatacaaactagttgctaagaagttttacaaaacgaaatgtatccctaaccacatttatgcttttggtgtgttcagtttaacaaactgaattccccataaattaattaccttatcagaccttatgtcaacgcactttggaaatgcattcgaagacgtttcttaaaactacagaaaggttctgagcttttaaaacgccagatgtagtaatttattgccttttctagccatattgtaaaaccgcaaacatgatgataatagtggtgtggtctctgcagtatcgtcacggcaggcaggcagttcagacgcaccttcgctgccctcaaacaataaacaaccctcttacgagatgaataagcacgccttttaaccaaaaataaaataaatattactgttcgttgtttacacttatttttaatcgattccgttaacccacacatcggaacacagccatctatcaacaattagaaaaacatgttccttataaaagttacttattttttatcaggaatcgaaatatttaataaaaatgggggtttccatgtaagattttaaattagcctctttccgctctagggggtgcggccgggggtcgtatttggtgtcatttgatagatttttgaaaaatattgaacacgtgttcttcagtttttttgatccgatgtttaatatgaattgtattgaattgacaccgtgtataatatgaattaaatcaacaccactaaatgtgtgtgtttcaagtgttactttacccagataaaatatggactagatgtgtttactacaagagcgaatttacgttaggtactaattaacatcataaaatcgtgtgtgcataaccaaagaaaacgttttccttagttttctataaaataatttactaaaaattacatccaaaagttttaggctatccttaacatctgaagaaattacaatgcggtgaaatgtcgtgttatatataagggaatccagtgcaaattttccgaacatacagtttgaatttatctattttatttcagaatatacttacatcaagtaaagatgttgtcagt

SEQ ID NO: 148 - DNA, 2494 bp, Diabrotica virgifera
ttttacacctttattattaatgaatccagtcgaaagcatccagcttccaacgggacctagtaaaaatacaaagttcgcctaaatatctaaaaaataataactccagtacatcattgtaactatatagaaaaaaagaacgtattaaacaaaatatttcacatttgtaaattgtaagaaagcgggtattagaaattttttatatcaatttcctcaaacctaacatttaaaaactcaattaaattcaaaaattaagaacttttatttacaaagaaacaattggtatataaatattttctcatcacattgtaaaaatgctttttacatatttttatgtaagttgtcaaaaatgctttataataatcagcaagagtcagcaaccaccttaacaattgtctcactagcaacaagatcaataactgatttcaattagacaatatgaaaattgtcgattttattcctataaaagacatattgccatgcgcatatggtcgttatatggttcgctctacttttctcaaaaaatgcaagaatggagttcattcgttgcaattgtggagacacgctttaattactcttttagctaattttattttttaataacttttcttaaaacggtcatttaaaattcacatttaatatacaaaccagatgctaagaagttttacaaaacgaaatgtgtccctaaccataatatgtttttggtgtgttcagtttaacaaactgaattccccataaattaattaccttatcagaccttatgtcaataacgcactttggaaatgcattcgaagacgtttcttaaaactacagaaaggttcttaaatttaaaaacgccacatgtagtaatttattgccttttctagccatattgtaaaaccgcaaacataatgatgataatagtgttgtggtctcggcagtatcgtcacgacaggcaggcagttcagactgccaaatcaaacaggatgccgaggaaattaagatgagagaatctgtcggcatactgtttgatttataaattttaaaaatctcaggagatgtaaccaaagaaagtatccacctgttgtcaatctggtggtatgggaacgacatttattgtcgttttctgtgctacttcgattgataacttactttgtttttcggtagatggctctagttcatccgtgacatctttctttgcaattcggaacggcccaaagtatgatacgtggagaattcggagagaatagaatatgggactactgatgagggggaaaaacctccgaaaccggtatagactcttcctgcactctccgatttaaccagagcattatgcagctgctgcattttcgtgtttcaaagaaattgaaaatgtttatacatttttaaaaacattgtatttaaggccttttaaaatcaatttttcaggttattcagctcagtagcgccaaatgtaggcaactcagtgctttcttgaattgttatatgcatatatcagttgtgcaacacaattcattcgttgtattttgacaatttgatacacaacaacgatgttttttcatttttggatttaaaaagtttatggtctcgttataagcgatatttttaccggaaactgtaaaaacgttgaccatatcagtatggaacgtctaaagttcaaaggattgtccacataaacataaacttaacaggaaaacagttggcaatcctgaaaggcaatacaatcataaccgtcatctgtcatcatttgtcaattaattgggcttttcatcgattgtcatttctgtcagattctgtcatgagtcctctaatattaatatatctacgtcatacgtatagcgacacgcttcatttattattatttttttaattgctaattttaaatattaactttcttttctcaaaacgaaataatatgggtcatacaaaattcacatttaatatacaaaccagatgctaagaagggcccgttaagttttacgaaacgaaatgtatccctaaccagatgtttttggtgtgttcagtttaacaaactgaattccccataaattaattaccttatcagaccttatgtcaataactcactttggaaatgcattcgaagacgtttcttaaaactgcagaaatgtttcaacttttaaacgccagatctaaataatttatcgcctttctggccagatggtagaaacacaaacatattagcgtttgtggttttttcagccccggcagtcgatttacaaccgcccgtcgggagtcacaccccagcgggcgtcgggataggtcaacaacacactcttacgagatataagcaaaatacgtctttttaccgattaaaataaatatattattgaaagtttgttgtgtttacatttattttaattttagttaatcgttcccaaaccattcggaacagacgtatcggaggagtttggcagctgccactgtgacaggataattttatgaatttttcctgtgacagtttgactccgatacgtctaaaagtgggaacctatcaaca

SEQ ID NO: 149 - DNA, 6366 bp, Diabrotica virgifera
  SmartBlast Evalue=0; Info=Long-chain-fatty-acid--CoA ligase 3 n= 1 Tax=Camponotus floridanus RepID=E2AYR1_9HYME
agttttattaatccacgtgttcaaaaatattttcaggatattttaatatatagatccattctgctgatatattgtaatgcagctttgccatttatataactattttccaacaactattataatatcctatctatatgtacatgcatacttaataccttagtaaaggtatttaaaacatagagaagcgatgacaaatgtacagaaaccaagccatcattaaatatagttattatttgtaaaacattttgtcttgtacgtttaagaagtatttcaaaggagctgaccaccagaacaaatattattagtggatatatctcaattactagcgacatcaatatcgatttttgctcgaaatcgaaaagttgaatcacaaccaccctaaaaaggaaaggaaaacatctaaatacctaaattttacttttactaataaaaccaagaattacgcttaaaagaatctgcgaaaattggttgaaaaatgaatttaaataaaacaaaaatgatgacaaatcaaaatatcacaatcgacctcgatgaaattaagtgacgaagagtataatatattcctagctgacacaaccaaattatcagaatcaaacgttagagacaactagaagaatccgaatcgcttgatcagcaataggaagactctgtactgtgttgtaagacgaaaagatatcaataaacctaaagaaaggggcgttcaagagctgagttctaccagttatgaactacagaatggagaccgtgacacttacagagttatcagttaacagattaagaacaacacagagggccatcgaacgagctatgttagaagtatctctgagaaaacatatacgaaataagggcgtgcgaagctggaagatgtaatttaagtgtggcgacatgctttaattactatttttgctaattttaatttttcataacttttctcaaaacaaaataatatggatcatataaaactcacatttaatatacaaaccagatgtttttggtgtgttcagtttgacaaactgaattccccataaatttattaccttatcagaccttatgtgaataactcactttggaaatgcattcgaagacgtttcttaaaactgcagaaatgtttcaacttttaaacgcaagatctaaataatttatcgcctttctggccagatggtagaaacacaaacatattagcgtttgtggtttttttcagccacagcagagtcgatctgcaacctcccgtcggtagtcacactccagcgggcgttgggataggtcaacaacacaccctttcgagatataagcaaaacacgtctttttaccgattaaaataaatatattattgttcgttgtttacacttattttaatcaattccatttactcaattccgcaccacggaacagaagaattgcgcaaataaaatgcaactggataggacatgtggcacgacaaaacaatggaaggtgaacaagaaacattttacatcggagaccacgcgagcacagtcgcggaggccacaaaaataatggttagacgacttcaaagcaaaagttaagaagaactgagaagaaaacggagaagaatggataactcatggggaggcctttgttcaggagtaaatgcaaacaatctgaagaagaagaaatgaaaaaacatgcttaaaaacggaaaattatggaatattataaaataagacacaaaaaagcgtccaattaaaaatcctctagctctaaaggaccatatttagtcatcaaatctcctaagcagcaacagaatataaaaatcttggagtaaagtataaaaaagtctaaatcaaagcaaagaaatgagataaatgattaacagaaaatcaataaaagctgcaatcagttccacctgtcttttttgcaatttctaagtaaaagttagttccgcttttatctttattaactataatatatacatttattgtctataagtataatttcttacaaaaagcagtttttccaataaaaccagcaaaaatatcgtattaaacgtctaactttgtaaaaaaaaacctattcctggtgcctgcacatttgccgcttgagtaaataactatttttatccttaagtacatgtctttaatgaaatagatgtttagaccgatcattgacaaattgacaattacctacatcggtgcaagaacagtcttttactaaaacttaacactttataacaaaaagaaaaacaacaataacaaatatgcgcaaaaaatctcataatattgctactaaaataccacaaccgtctataagttcattccaaccagcctcacagaagacttacagtggaattcttctctcaaaatacacaaaaacagtatttttcgatatttttgttgttttctgtaatatttgtatctttatttattgcttacgtctcctgtattgcttgttgaaagacgctttgttgtgaaaaagttgtcccttgtgaaacaattcatgttttctgtttattaaatgaccttaacttttacacagacgaatagcaccgttaaaatattattctcgaagtaaaactagttgaaaattgcgaaaaataagagaaacatgaatttattacccctaaaggaaccacagtgatgctaacaataatattttaagagtatttttgccttgaaatattgaagagataacaggatttttaataccacattccgtctgtgacattttaccaaaaaaaaaactgtatagtatcacttttcatgtgcccgcacgattatagtctaactctcctataaaaaagcaactatacaacgattgataagagaatttttcacatctaattcagattaatgatggtatatagtctcaagaagatgaaaaattagcaattgaaagtggcgcagtcaatctacacgatttatcatcaagaaaatcatgtctaaacacaatattgagcaaattaatcacaataaaacttcttccgtacaaaaaattagcaaaattcttcatttcatatccactcactccagaatttgatggaaaaattcgttcagagactcaactttaaaacatgtgttgaaagcctggcctaaaaattaatatcattggcggtaaaagtgtcatttatgcagaatctgtgtaattttcactataagcaccactcccgcaatattttgttgacgttggaggtaaaattgagcgatatctaaagcaataattgtaaaattatttgtgaaaaacttgctttcttagactcaaatggtacaatgcctggcctaaacttgctagagttgcaggaattggaagaataaccgcagtaaggaataaagttggagtgacactgactgcataatgtgtttcaaatgttcttttagggagtccgttgaagaaattggaaaatgcctgaccaaaaattacaattattagttgtagaagtattagttgtgcataatttctttaggtatcactaggaacataattcttgtactatgtggataaagttggagaggaaattcagtcgaaaaaacacattaaagaaaaatatagacaaaaaaaccgtgaattttttcaagtactacctcttaagcatctatctccggcaaaaatacccttaaacctaaaaataaacatttgttcttatatacattatacgcccaagagctaatatataaataaaataatacataaaatcttatttgatagcttcgttaaatatttacagaaaaaattacaaatactttttacaaattgtgctataatacacgcttagaaatcatacccttggaatcaggcgggatttcaacgaaaaaagcgaaatatacgcaaacatatttcttctttcagttaattgtagtaaaattagcaaaataaaaaaaaattgtagtaaaaatgtagtttatgtctttaatatcgttttgttctcaaagtatttccaaagttctacaataaagtcctgcctgattccttgtacacccatactagattaatcataagaaaattaaaggtgttgtaactttcaggaggcgtacattctgttgatttcgtgcttatatctctcttggatgtctttcctctttagtttaaaagctgccgttacgagccccatgtcaggggaccatacctcagtcaccaacttaatagctgctggaatttcaaatttggccagtttacttctttttccatgctctgctaattcttgcacaaccgccttctccacagtatcatccacgcacagctcctcgaacgatttatcgttgactcctttcttggcggcaagatctttgagttgctgttgatttggcacgaccagcgcgacacagaagtccttactcgattctccgtacacgcaaatgttatctactaatggacaagtcttcatctcggcctcgactttaccgagggacacgtattcgcctgcttgcagttttaccaagtctttcttacgatctatgattttgagtacaccatcttcgtgaatttcaccaatatcaccggttctaaaccatctggttccgtcttgctctaagaattcctctttcgacttctctggaagcttgtaatatcctgcactgatgttgtctccacccaaaattatttctccacgaggataaggcttatccgtaatgcgatagttgccttcttcccaacttattaacttaatatcacaaatcgtacagggggcacctactcttccgaacgacatatcaaacagatcttgtacagctgcgcaagaagttgattctgttaaaccatatccttgtattattaccacacacatgcatattcctatttgttcgtgagtctcagctgacaatggagcaccgccagatatcatcagtctcatgtttcctccaacaatttttgtgatcggggaaaatacaattttgtctatcaaaggagttgaatatcctcgccttttccatgctgatttgtactcatatgcaaatttgaatatcacttttttaagattgctgcctttgctgactttttcttggatagtttttgatattctgtctagaatgagtggtacacttgtcaacactgttggacataaaatcgtagcatctcctttggttccccttttgattttactggatgtatcagtcatggtcaatgctcctgaatatccaataggcactccagcaaacagacaaacactttccaccaacaattcaaagacgtgagccaatggtaaaaagccgatcattatatcattttcataaataggtgttgaatcacagaatcctttcaaagtagcgattaagttcttttgaagcagtataacacctttgggaacacctgtagatccgctcgtgtacatgatgatggctatgtcgtctgctttagggggttgggcctctatcttagacgaagctcctttctccaaaacgtcctggaacttcaaaatagaaacaccatccttaaaaccatcggtgctttccaagctcttcaactggtcttccatataaatcaagcactgcacacgtggcgtcagctgcaagatctttttgaacttcggtaacagctcgaaactagtgatgagggtcgtcacttcagtttcgttgatagcgtgagcgatagcttcgtcacccaaagtggcgtagatggtgaccaacgggatgttttgtttgaagattccatgagcagcgatcatccattcagctctggtttctgcgaagatggcgacgtttttgccgggatcgttgccgagttcgcggagtccgcggccaaaattggtggctaggatgttgacttcggagaaggtcttccagcgatagtctcccagatcgaacttcttaaaaactcttccgttaggctgaacctcatccatctcggccaatatctgcctggtgcccaaacatcttttgttggcgtattttttgctgcagtattcgaacattttggccatggtgtcgatcttctcgcgaacgagagtgatatggtgctcttttggggctactgtggatcgataagtcaccgatttcgcatcttcttgtatttgtttcgcctttatcttttttagtcggcgtaacccttacgctgttagcgttattgttttccttcatgtcaaggacaaaatctttagaggggtccttttcgacgtcgatgataacggcctttatgcttctggacagttggcgtaaccgccatggcctctggaggattatgtatacggggaacgtgaggacgtcgtacacgaatgctagggccttcagcgcgcctatcgctatggtgaacccaacgccatccatatccccgaaatacacagtcatgatgctatcctcctggccaaaaaataaaatacaaaaacaagaaacctaaaaaataaatcgaacacaaaaacacaaattatcacaatcaacacgcactaatcagttgagtatcacaaggaagtgtgttcactttgac

SEQ ID NO: 150 - DNA, 2391 bp, Diabrotica virgifera
tgttgataggttcccacttttagacgtatcggagtcaaactgtcacaggaaaaattcataaaattatcctgtcacagtggcagctgccaaactcctccgatacgtctgttccgaatggtttgggaacgattaactaaaattaaaataaatgtaaacacaacaaactttcaataatatatttattttaatcggtaaaaagacgtattttgcttatatctcgtaagagtgtgttgttgacctatcccgacgcccgctggggtgtgactcccgacgggcggttgtaaatcgactgccggggctgaaaaaaccacaaacgctaatatgtttgtgtttctaccatctggccagaaaggcgataaattatttagatctggcgtttaaaagttgaaacatttctgcagttttaagaaacgtcttcgaatgcatttccaaagtgagttattgacataaggtctgataaggtaattaatttatggggaattcagtttgttaaactgaacacaccaaaaacatctggttagggatacatttcgtttcgtaaaacttaacgggcccttcttagcatctggtttgtatattaaatgtgaattttgtatgacccatattatttcgttttgagaaaagaaagttaatatttaaaattagcaattaaaaaaataataataaatgaagcgtgtcgctatacgtatgacgtagatatattaatattagaggactcatgacagaatctgacagaaatgacaatcgatgaaaagcccaattaattgacaaatgatgacagatgacggttatgattgtattgcctttcaggattgccaactgttttcctgttaagtttatgtttatgtggacaatcctttgaactttagacgttccatactgatatggtcaacgtttttacagtttccggtaaaaatatcgcttataacgagaccataaactttttaaatccaaaaatgaaaaaacatcgttgttgtgtatcaaattgtcaaaatacaacgaatgaattgtgttgcacaactgatatatgcatataacaatttaagaaaggactgtgagttgtctacatttggcgccactgagctgaataacctgaaaaatttattttaaatgctcttaaatacaatgtttttgttccgacggtaggttgcggaatcaattaaaaataagtgtaaacaatgaacagtaatatatttatttataatatttttatattataatattttattattataatatttttatattataaacaagcgtgcttcgtttattatctcgtaagggttttgttgttttagcgagggtgtgtctgaaccgcgcgcctgctgtgacgatactgcgagaccaccacactattatatcaccatgcttgcggttttacaatatggctagaaaggcaatagattacgacatctgcgttttaaaagatgagaacctttctgtattttaagaagttgacataaagagcgtggcaatctggcctcgaaatctattagtgtttccttgaaaaaaacattaattttatacaatctgcttagggatacattttgtttcttaaacttaacggtccttgttagcatatggtttgtatattaaatgtgaattttaaatgactaatgttatttcgttttgagaaaagttattgaaaatttagcaaaaatagtaattaaagcgtatcgctatattatatgcatttaacaattcaagaaagaactgtgagttgcctacatttggccccactgaactgaataacctaaaaaatttattttaaaagctcttaaatacaatttttttaattgaatataaatacttaactgacaaattccatataaacagttgctttgtttcaattacaactttctattgcaaagttttcaataatgacttttgaaataatagacataaagcagaagcggtaaaagtgctcacaatacaaggttgattcagaccaacagtcagatcaccgttgagtcaaggggcaacccattcacacactcagtccgggcagatcaccgtcagtctacttcggcatttagatcgatcaagatgcaatattatagtcttgtagagttcttagtattgtgttccgatctgcgaaattgagtaaatggaattaattaaaatataagtgtaaacaatgaacagtaatatttattttatttttggttaaagcgagtgcttattcatctcgtaagagggttgtttattgttttggggcagcgagggtgcgcctgaactgcctccctgccgtgacgatactgccgagaccacaacactattatcatcatcatgcggttttacaatatggctagaaaggaaatagattacgacatctgcgttttaaaagctcagaacctttctgtagttttaagaaacgtctttgaatgcatt

SEQ ID NO: 151 - DNA, 2333 bp, Diabrotica virgifera
  SmartBlast Evalue=1E-117; Info="Calumenin, putative n=1 Tax= Pediculus humanus corporis RepID=E0VBH5_PEDHC"
agagggtacataataaggagttaagtgataaagaacacttggaaaatgggcaccacaatcctgaatatgaccacgaagctttcttgggagcagaagaagcaaaaactttcgatcaactgccccctgaagaaagcaaaaggagactgggaataatagcagacaaaattgatgtcaacaatgatggatttatcaacagagaagaactcaaggattggatcagatttactcagaaacgatacattactgaggatgttgacagacagtggaaacaacaaaaccctgatgataagccaaccctaccatgggagaggtaccaaacattggtttatggttttctagaaaatatggatccagcagaaatagaaaatgatagcacaggtttctcctacaaaaagatgatggccagagatcagaggcgttggaagactgcagacagagatcaagatggtgaattaagcaaagaagaattcgctgctttcttacatcctgaagaaaacgactatatgcgtgatctggttgtacaagaaactatggaagatattgacaaagacaaagatggcaaaatttcagtggaagaatatattggagacatgtacagaagtgacgagaacgaagaagaacctgactgggtaaagagcgaacgtgaacagttcaacacctaccgcgacaaagacggagacggatacatggacgaggaagagatcaaaaactggatattaccccaagatttcgaccacgccgaagccgaagcgagacatttgatctacgaggcagactccgacgctgacgaacaactaaccaaagacgaagtgttgaccaaatatgaccttttcgttggatctcaggctttagatttcggcgaggctctcaccagacacgacgagttttaaacgaaacttcttacggagtttctgaggtgaaattgatttatttttagctaaatatgtgaaaatgtggtggaatgttgatctagaagcgaaattttatatctagtatataaaagaaaacttcatatacaaattcggaaaaagtttatggttagtgttacaaaattagcgacatatctaactaatatgctaatattacgttttcatttaatagacaaagatcacaatcatatttcattgagatatgaaccctttcaacatgaacccaaaggcaagcactttgtcctggtgtcttagaccagtacaattgtagttgattgagttcccaggtccggagttcctctctgatgtggctttttgatagtccacaaaagggttctggactttggaatggggtataagccccatcttttgcgaggctgtctgcttccttatttcctgcaattcctttgtgacctggcacccacattaaagttactttgttgctctccgatagcttcttgaggggttttttacagtctcaaaccaactttgattcacaagtaattgactttggaacctttaaaacggcttggctgtctgataaaataaagagttttgccatatgagtgtctaggtggagacattcttggatactaatgtctttagcatttatttctgccagaaagatagttaggggcgttcccaagagatttggatagcctgaaattgggcccagcagctcccattcctgtccttccagtagcctaaaagtgggcccagtaacttccacttctgccctttcatctatctgtggcgacacgctttaattactatttttgctaattttattttttaataacttttctcaaaacggtcatataaagttcacatttaatatacaaactagttgctaagaagttttacaaaacgaaatgtatccctaaccacatttatgcttttggtgtgttcagtttaacaaactgaattcccataaattaattacctattcaaaccttatgtcaataactcactttggaaatgcattcgaagacgtttcttaaaactgcagaaatgtttcaacttttaaacgccagatctaaataatttatcgcctttctggccagatggtagaaacacaaacatattagcgtttgtggttttttcagccccggcagtcgatttacaaccgcccgtcgggagtcacaccccagcgggcgtcgggataggtcaacaacacactcttacgagatataagcaaaatacgtctttttaccgattaaaataaatatattattgaaagtttgttgtgtttacatttattttaattttagttaatcgttcccaaaccattcggaacagacgtatcggaggagtttggcagctgccactgtgacaggataattttatgaatttttcctgtgacagtttgactccgatacgtctaaaagtgggaacctatcaaca

SEQ ID NO: 152 - DNA, 2215 bp, Diabrotica virgifera
  SmartBlast Evalue=1E-117; Info="Calumenin, putative n=1 Tax= Pediculus humanus corporis RepID=E0VBH5_PEDHC"
agagggtacataataaggagttaagtgataaagaacacttggaaaatgggcaccacaatcctgaatatgaccacgaagctttcttgggagcagaagaagcaaaaactttcgatcaactgccccctgaagaaagcaaaaggagactgggaataatagcagacaaaattgatgtcaacaatgatggatttatcaacagagaagaactcaaggattggatcagatttactcagaaacgatacattactgaggatgttgacagacagtggaaacaacaaaaccctgatgataagccaaccctaccatgggagaggtaccaaacattggtttatggttttctagaaaatatggatccagcagaaatagaaaatgatagcacaggtttctcctacaaaaagatgatggccagagatcagaggcgttggaagactgcagacagagatcaagatggtgaattaagcaaagaagaattcgctgctttcttacatcctgaagaaaacgactatatgcgtgatctggttgtacaagaaactatggaagatattgacaaagacaaagatggcaaaatttcagtggaagaatatattggagacatgtacagaagtgacgagaacgaagaagaacctgactgggtaaagagcgaacgtgaacagttcaacacctaccgcgacaaagacggagacggatacatggacgaggaagagatcaaaaactggatattaccccaagatttcgaccacgccgaagccgaagcgagacatttgatctacgaggcagactccgacgctgacgaacaactaaccaaagacgaagtgttgaccaaatatgaccttttcgttggatctcaggctttagatttcggcgaggctctcaccagacacgacgagttttaaacgaaacttcttacggagtttctgaggtgaaattgatttatttttagctaaatatgtgaaaatgtggtggaatgttgatctagaagcgaaattttatatctagtatataaaagaaaacttcatatacaaattcggaaaaagtttatggttagtgttacaaaattagcgacatatctaactaatatgctaatattacgttttcatttaatagacaaagatcacaatcatatttcattgagatatgaaccctttcaacatgaacccaaaggcaagcactttgtcctggtgtcttagaccagtacaattgtagttgattgagttcccaggtccggagttcctctctgatgtggctttttgatagtccacaaaagggttctggactttggaatggggtataagccccatcttttgcgaggctgtctgcttccttatttcctgcaattcctttgtgacctggcacccacattaaagttactttgttgctctccgatagcttcttgaggggttttttacagtctcaaaccaactttgattcacaagtaattgactttggaacctttaaaacggcttggctgtctgataaaataaagagttttgccatatgagtgtctaggtggagacattcttggatactaatgtctttagcatttatttctgccagaaagatagttaggggcgttcccaagagatttggatagcctgaaattgggcccagcagctcccattcctgtccttccagtagcctaaaagtgggcccagtaacttccacttctgccctttcatctatctgtggcgacacgctttaattactatttttgctaattttattttttaataacttttctcaaaacggtcatataaagttcacatttaatatacaaactagttgctaagaagttttacaaaacgaaatgtatccctaaccacatttatgcttttggtgtgttcagtttaacaaactgaattccccataaattaattaccttatcagaccttatgtcaataacgcactttggaaatgcattcgaagacgtttcttaaaactacagaaaggttctgagcttttaaaacgccagatgtagtaatttatcaccttttctagccatattgtaaaaccgcaaacatgatgatcgtgttgtggtctctgcagtatcgtcacggcaggcaggcagctcagacgccccttcgctgccctcaaacaataaacaaccctcttacgagatgaataagcacgccttttaaccaaaaataaaataaatattactgtttattgtttacacttttttttaatgattccgttaacccacacccacaccatcggaaca

SEQ ID NO: 153 - DNA, 2212 bp, Diabrotica virgifera
  SmartBlast Evalue=1E-117; Info="Calumenin, putative n=1 Tax= Pediculus humanus corporis RepID=E0VBH5_PEDHC"
agagggtacataataaggagttaagtgataaagaacacttggaaaatgggcaccacaatcctgaatatgaccacgaagctttcttgggagcagaagaagcaaaaactttcgatcaactgccccctgaagaaagcaaaaggagactgggaataatagcagacaaaattgatgtcaacaatgatggatttatcaacagagaagaactcaaggattggatcagatttactcagaaacgatacattactgaggatgttgacagacagtggaaacaacaaaaccctgatgataagccaaccctaccatgggagaggtaccaaacattggtttatggttttctagaaaatatggatccagcagaaatagaaaatgatagcacaggtttctcctacaaaaagatgatggccagagatcagaggcgttggaagactgcagacagagatcaagatggtgaattaagcaaagaagaattcgctgctttcttacatcctgaagaaaacgactatatgcgtgatctggttgtacaagaaactatggaagatattgacaaagacaaagatggcaaaatttcagtggaagaatatattggagacatgtacagaagtgacgagaacgaagaagaacctgactgggtaaagagcgaacgtgaacagttcaacacctaccgcgacaaagacggagacggatacatggacgaggaagagatcaaaaactggatattaccccaagatttcgaccacgccgaagccgaagcgagacatttgatctacgaggcagactccgacgctgacgaacaactaaccaaagacgaagtgttgaccaaatatgaccttttcgttggatctcaggctttagatttcggcgaggctctcaccagacacgacgagttttaaacgaaacttcttacggagtttctgaggtgaaattgatttatttttagctaaatatgtgaaaatgtggtggaatgttgatctagaagcgaaattttatatctagtatataaaagaaaacttcatatacaaattcggaaaaagtttatggttagtgttacaaaattagcgacatatctaactaatatgctaatattacgttttcatttaatagacaaagatcacaatcatatttcattgagatatgaaccctttcaacatgaacccaaaggcaagcactttgtcctggtgtcttagaccagtacaattgtagttgattgagttcccaggtccggagttcctctctgatgtggctttttgatagtccacaaaagggttctggactttggaatggggtataagccccatcttttgcgaggctgtctgcttccttatttcctgcaattcctttgtgacctggcacccacattaaagttactttgttgctctccgatagcttcttgaggggttttttacagtctcaaaccaactttgattcacaagtaattgactttggaacctttaaaacggcttggctgtctgataaaataaagagttttgccatatgagtgtctaggtggagacattcttggatactaatgtctttagcatttatttctgccagaaagatagttaggggcgttcccaagagatttggatagcctgaaattgggcccagcagctcccattcctgtccttccagtagcctaaaagtgggcccagtaacttccacttctgccctttcatctatctgtggcgacacgctttaattactatttttgctaattttattttttaataacttttctcaaaacggtcatataaagttcacatttaatatacaaactagttgctaagaagttttacaaaacgaaatgtatccctaaccacatttatgcttttggtgtgttcagtttaacaaactgaattccccataaattaattaccttatcagaccttatgtcaacgcactttggaaatgcattcgaagacgtttcttaaaactacagaaaggttctgagcttttaaaacgccagatgtagtaatttatcaccttttctagccatattgtaaaaccgcaaacatgatgatcgtgttgtggtctctgcagtatcgtcacggcaggcaggcagctcagacgccccttcgctgccctcaaacaataaacaaccctcttacgagatgaataagcacgccttttaaccaaaaataaaataaatattactgtttattgtttacacttttttttaatgattccgttaacccacacccacaccatcggaaca

SEQ ID NO: 154 - DNA, 2131 bp, Diabrotica virgifera
  SmartBlast Evalue=1E-117; Info="Calumenin, putative n=1 Tax= Pediculus humanus corporis RepID=E0VBH5_PEDHC"
agagggtacataataaggagttaagtgataaagaacacttggaaaatgggcaccacaatcctgaatatgaccacgaagctttcttgggagcagaagaagcaaaaactttcgatcaactgccccctgaagaaagcaaaaggagactgggaataatagcagacaaaattgatgtcaacaatgatggatttatcaacagagaagaactcaaggattggatcagatttactcagaaacgatacattactgaggatgttgacagacagtggaaacaacaaaaccctgatgataagccaaccctaccatgggagaggtaccaaacattggtttatggttttctagaaaatatggatccagcagaaatagaaaatgatagcacaggtttctcctacaaaaagatgatggccagagatcagaggcgttggaagactgcagacagagatcaagatggtgaattaagcaaagaagaattcgctgctttcttacatcctgaagaaaacgactatatgcgtgatctggttgtacaagaaactatggaagatattgacaaagacaaagatggcaaaatttcagtggaagaatatattggagacatgtacagaagtgacgagaacgaagaagaacctgactgggtaaagagcgaacgtgaacagttcaacacctaccgcgacaaagacggagacggatacatggacgaggaagagatcaaaaactggatattaccccaagatttcgaccacgccgaagccgaagcgagacatttgatctacgaggcagactccgacgctgacgaacaactaaccaaagacgaagtgttgaccaaatatgaccttttcgttggatctcaggctttagatttcggcgaggctctcaccagacacgacgagttttaaacgaaacttcttacggagtttctgaggtgaaattgatttatttttagctaaatatgtgaaaatgtggtggaatgttgatctagaagcgaaattttatatctagtatataaaagaaaacttcatatacaaattcggaaaaagtttatggttagtgttacaaaattagcgacatatctaactaatatgctaatattacgttttcatttaatagacaaagatcacaatcatatttcattgagatatgaaccctttcaacatgaacccaaaggcaagcactttgtcctggtgtcttagaccagtacaattgtagttgattgagttcccaggtccggagttcctctctgatgtggctttttgatagtccacaaaagggttctggactttggaatggggtataagccccatcttttgcgaggctgtctgcttccttatttcctgcaattcctttgtgacctggcacccacattaaagttactttgttgctctccgatagcttcttgaggggttttttacagtctcaaaccaactttgattcacaagtaattgactttggaacctttaaaacggcttggctgtctgataaaataaagagttttgccatatgagtgtctaggtggagacattcttggatactaatgtctttagcatttatttctgccagaaagatagttaggggcgttcccaagagatttggatagcctgaaattgggcccagcagctcccattcctgtccttccagtagcctaaaagtgggcccagtaacttccacttctgccctttcatctatctgtggcgacacgctttaattactatttttgctaattttattttttaataacttttctcaaaacggtcatataaagttcacatttaatatacaaactagttgctaagaagttttacaaaacgaaatgtatccctaaccacatttatgcttttggtgtgttcagtttaacaaactgaattccccataaattaattaccttatcagaccttatgtcaataacgcactttggaaatgcattcgaagacgtttcttaaaactacagaaaggttctgagcttttaaaacgccagatgtagtaatttattgccttttctagccatattgtaaaaccgcaaacatgatgaccgtgttgtggtctctgcagtatcgtcacaggcaggcaggcagttcagacgcaccctcgctgccccaaataataaacaaccctctttacgatatgaataagcacgcatttt

SEQ ID NO: 155 - DNA, 2128 bp, Diabrotica virgifera
  SmartBlast Evalue=1E-117; Info="Calumenin, putative n=1 Tax= Pediculus humanus corporis RepID=E0VBH5_PEDHC"
agagggtacataataaggagttaagtgataaagaacacttggaaaatgggcaccacaatcctgaatatgaccacgaagctttcttgggagcagaagaagcaaaaactttcgatcaactgccccctgaagaaagcaaaaggagactgggaataatagcagacaaaattgatgtcaacaatgatggatttatcaacagagaagaactcaaggattggatcagatttactcagaaacgatacattactgaggatgttgacagacagtggaaacaacaaaaccctgatgataagccaaccctaccatgggagaggtaccaaacattggtttatggttttctagaaaatatggatccagcagaaatagaaaatgatagcacaggtttctcctacaaaaagatgatggccagagatcagaggcgttggaagactgcagacagagatcaagatggtgaattaagcaaagaagaattcgctgctttcttacatcctgaagaaaacgactatatgcgtgatctggttgtacaagaaactatggaagatattgacaaagacaaagatggcaaaatttcagtggaagaatatattggagacatgtacagaagtgacgagaacgaagaagaacctgactgggtaaagagcgaacgtgaacagttcaacacctaccgcgacaaagacggagacggatacatggacgaggaagagatcaaaaactggatattaccccaagatttcgaccacgccgaagccgaagcgagacatttgatctacgaggcagactccgacgctgacgaacaactaaccaaagacgaagtgttgaccaaatatgaccttttcgttggatctcaggctttagatttcggcgaggctctcaccagacacgacgagttttaaacgaaacttcttacggagtttctgaggtgaaattgatttatttttagctaaatatgtgaaaatgtggtggaatgttgatctagaagcgaaattttatatctagtatataaaagaaaacttcatatacaaattcggaaaaagtttatggttagtgttacaaaattagcgacatatctaactaatatgctaatattacgttttcatttaatagacaaagatcacaatcatatttcattgagatatgaaccctttcaacatgaacccaaaggcaagcactttgtcctggtgtcttagaccagtacaattgtagttgattgagttcccaggtccggagttcctctctgatgtggctttttgatagtccacaaaagggttctggactttggaatggggtataagccccatcttttgcgaggctgtctgcttccttatttcctgcaattcctttgtgacctggcacccacattaaagttactttgttgctctccgatagcttcttgaggggttttttacagtctcaaaccaactttgattcacaagtaattgactttggaacctttaaaacggcttggctgtctgataaaataaagagttttgccatatgagtgtctaggtggagacattcttggatactaatgtctttagcatttatttctgccagaaagatagttaggggcgttcccaagagatttggatagcctgaaattgggcccagcagctcccattcctgtccttccagtagcctaaaagtgggcccagtaacttccacttctgccctttcatctatctgtggcgacacgctttaattactatttttgctaattttattttttaataacttttctcaaaacggtcatataaagttcacatttaatatacaaactagttgctaagaagttttacaaaacgaaatgtatccctaaccacatttatgcttttggtgtgttcagtttaacaaactgaattccccataaattaattaccttatcagaccttatgtcaacgcactttggaaatgcattcgaagacgtttcttaaaactacagaaaggttctgagcttttaaaacgccagatgtagtaatttattgccttttctagccatattgtaaaaccgcaaacatgatgaccgtgttgtggtctctgcagtatcgtcacaggcaggcaggcagttcagacgcaccctcgctgccccaaataataaacaaccctctttacgatatgaataagcacgcatttt

SEQ ID NO: 156 - DNA, 2164 bp, Diabrotica virgifera
  SmartBlast Evalue=1E-117; Info="Calumenin, putative n=1 Tax= Pediculus humanus corporis RepID=E0VBH5_PEDHC"
agagggtacataataaggagttaagtgataaagaacacttggaaaatgggcaccacaatcctgaatatgaccacgaagctttcttgggagcagaagaagcaaaaactttcgatcaactgccccctgaagaaagcaaaaggagactgggaataatagcagacaaaattgatgtcaacaatgatggatttatcaacagagaagaactcaaggattggatcagatttactcagaaacgatacattactgaggatgttgacagacagtggaaacaacaaaaccctgatgataagccaaccctaccatgggagaggtaccaaacattggtttatggttttctagaaaatatggatccagcagaaatagaaaatgatagcacaggtttctcctacaaaaagatgatggccagagatcagaggcgttggaagactgcagacagagatcaagatggtgaattaagcaaagaagaattcgctgctttcttacatcctgaagaaaacgactatatgcgtgatctggttgtacaagaaactatggaagatattgacaaagacaaagatggcaaaatttcagtggaagaatatattggagacatgtacagaagtgacgagaacgaagaagaacctgactgggtaaagagcgaacgtgaacagttcaacacctaccgcgacaaagacggagacggatacatggacgaggaagagatcaaaaactggatattaccccaagatttcgaccacgccgaagccgaagcgagacatttgatctacgaggcagactccgacgctgacgaacaactaaccaaagacgaagtgttgaccaaatatgaccttttcgttggatctcaggctttagatttcggcgaggctctcaccagacacgacgagttttaaacgaaacttcttacggagtttctgaggtgaaattgatttatttttagctaaatatgtgaaaatgtggtggaatgttgatctagaagcgaaattttatatctagtatataaaagaaaacttcatatacaaattcggaaaaagtttatggttagtgttacaaaattagcgacatatctaactaatatgctaatattacgttttcatttaatagacaaagatcacaatcatatttcattgagatatgaaccctttcaacatgaacccaaaggcaagcactttgtcctggtgtcttagaccagtacaattgtagttgattgagttcccaggtccggagttcctctctgatgtggctttttgatagtccacaaaagggttctggactttggaatggggtataagccccatcttttgcgaggctgtctgcttccttatttcctgcaattcctttgtgacctggcacccacattaaagttactttgttgctctccgatagcttcttgaggggttttttacagtctcaaaccaactttgattcacaagtaattgactttggaacctttaaaacggcttggctgtctgataaaataaagagttttgccatatgagtgtctaggtggagacattcttggatactaatgtctttagcatttatttctgccagaaagatagttaggggcgttcccaagagatttggatagcctgaaattgggcccagcagctcccattcctgtccttccagtagcctaaaagtgggcccagtaacttccacttctgccctttcatctatctgtggcgacacgctttaattactatttttgctaattttattttttaataacttttctcaaaacggtcatataaagttcacatttaatatacaaactagttgctaagaagttttacaaaacgaaatgtatccctaaccacatttatgcttttggtgtgttcagtttaacaaactgaattccccataaattaattaccttatcagaccttatgtcaataacgcactttggaaatgcattcgaagacgtttccttaaaactacagaaaggttctgagcttttaaaacgccagatgcagtaatttattgccttttctagcaatattgtaaaaccgcaaacatgatgataataaacttactaaggaagtaaaacttcacttgtaggtagatggtatataaatttattaaaatttttataaaaagatcccaattggattaaagtgggttcatcactagtacaaaaacacaaacgttttcggaccaatcagtc

SEQ ID NO: 157 - DNA, 2161 bp, Diabrotica virgifera
  SmartBlast Evalue=1E-117; Info="Calumenin, putative n=1 Tax= Pediculus humanus corporis RepID=E0VBH5_PEDHC"
agagggtacataataaggagttaagtgataaagaacacttggaaaatgggcaccacaatcctgaatatgaccacgaagctttcttgggagcagaagaagcaaaaactttcgatcaactgccccctgaagaaagcaaaaggagactgggaataatagcagacaaaattgatgtcaacaatgatggatttatcaacagagaagaactcaaggattggatcagatttactcagaaacgatacattactgaggatgttgacagacagtggaaacaacaaaaccctgatgataagccaaccctaccatgggagaggtaccaaacattggtttatggttttctagaaaatatggatccagcagaaatagaaaatgatagcacaggtttctcctacaaaaagatgatggccagagatcagaggcgttggaagactgcagacagagatcaagatggtgaattaagcaaagaagaattcgctgctttcttacatcctgaagaaaacgactatatgcgtgatctggttgtacaagaaactatggaagatattgacaaagacaaagatggcaaaatttcagtggaagaatatattggagacatgtacagaagtgacgagaacgaagaagaacctgactgggtaaagagcgaacgtgaacagttcaacacctaccgcgacaaagacggagacggatacatggacgaggaagagatcaaaaactggatattaccccaagatttcgaccacgccgaagccgaagcgagacatttgatctacgaggcagactccgacgctgacgaacaactaaccaaagacgaagtgttgaccaaatatgaccttttcgttggatctcaggctttagatttcggcgaggctctcaccagacacgacgagttttaaacgaaacttcttacggagtttctgaggtgaaattgatttatttttagctaaatatgtgaaaatgtggtggaatgttgatctagaagcgaaattttatatctagtatataaaagaaaacttcatatacaaattcggaaaaagtttatggttagtgttacaaaattagcgacatatctaactaatatgctaatattacgttttcatttaatagacaaagatcacaatcatatttcattgagatatgaaccctttcaacatgaacccaaaggcaagcactttgtcctggtgtcttagaccagtacaattgtagttgattgagttcccaggtccggagttcctctctgatgtggctttttgatagtccacaaaagggttctggactttggaatggggtataagccccatcttttgcgaggctgtctgcttccttatttcctgcaattcctttgtgacctggcacccacattaaagttactttgttgctctccgatagcttcttgaggggttttttacagtctcaaaccaactttgattcacaagtaattgactttggaacctttaaaacggcttggctgtctgataaaataaagagttttgccatatgagtgtctaggtggagacattcttggatactaatgtctttagcatttatttctgccagaaagatagttaggggcgttcccaagagatttggatagcctgaaattgggcccagcagctcccattcctgtccttccagtagcctaaaagtgggcccagtaacttccacttctgccctttcatctatctgtggcgacacgctttaattactatttttgctaattttattttttaataacttttctcaaaacggtcatataaagttcacatttaatatacaaactagttgctaagaagttttacaaaacgaaatgtatccctaaccacatttatgcttttggtgtgttcagtttaacaaactgaattccccataaattaattaccttatcagaccttatgtcaacgcactttggaaatgcattcgaagacgtttccttaaaactacagaaaggttctgagcttttaaaacgccagatgcagtaatttattgccttttctagcaatattgtaaaaccgcaaacatgatgataataaacttactaaggaagtaaaacttcacttgtaggtagatggtatataaatttattaaaatttttataaaaagatcccaattggattaaagtgggttcatcactagtacaaaaacacaaacgttttcggaccaatcagtc

SEQ ID NO: 158 - DNA, 2121 bp, Diabrotica virgifera
  SmartBlast Evalue=1E-117; Info="Calumenin, putative n=1 Tax= Pediculus humanus corporis RepID=E0VBH5_PEDHC"
agagggtacataataaggagttaagtgataaagaacacttggaaaatgggcaccacaatcctgaatatgaccacgaagctttcttgggagcagaagaagcaaaaactttcgatcaactgccccctgaagaaagcaaaaggagactgggaataatagcagacaaaattgatgtcaacaatgatggatttatcaacagagaagaactcaaggattggatcagatttactcagaaacgatacattactgaggatgttgacagacagtggaaacaacaaaaccctgatgataagccaaccctaccatgggagaggtaccaaacattggtttatggttttctagaaaatatggatccagcagaaatagaaaatgatagcacaggtttctcctacaaaaagatgatggccagagatcagaggcgttggaagactgcagacagagatcaagatggtgaattaagcaaagaagaattcgctgctttcttacatcctgaagaaaacgactatatgcgtgatctggttgtacaagaaactatggaagatattgacaaagacaaagatggcaaaatttcagtggaagaatatattggagacatgtacagaagtgacgagaacgaagaagaacctgactgggtaaagagcgaacgtgaacagttcaacacctaccgcgacaaagacggagacggatacatggacgaggaagagatcaaaaactggatattaccccaagatttcgaccacgccgaagccgaagcgagacatttgatctacgaggcagactccgacgctgacgaacaactaaccaaagacgaagtgttgaccaaatatgaccttttcgttggatctcaggctttagatttcggcgaggctctcaccagacacgacgagttttaaacgaaacttcttacggagtttctgaggtgaaattgatttatttttagctaaatatgtgaaaatgtggtggaatgttgatctagaagcgaaattttatatctagtatataaaagaaaacttcatatacaaattcggaaaaagtttatggttagtgttacaaaattagcgacatatctaactaatatgctaatattacgttttcatttaatagacaaagatcacaatcatatttcattgagatatgaaccctttcaacatgaacccaaaggcaagcactttgtcctggtgtcttagaccagtacaattgtagttgattgagttcccaggtccggagttcctctctgatgtggctttttgatagtccacaaaagggttctggactttggaatggggtataagccccatcttttgcgaggctgtctgcttccttatttcctgcaattcctttgtgacctggcacccacattaaagttactttgttgctctccgatagcttcttgaggggttttttacagtctcaaaccaactttgattcacaagtaattgactttggaacctttaaaacggcttggctgtctgataaaataaagagttttgccatatgagtgtctaggtggagacattcttggatactaatgtctttagcatttatttctgccagaaagatagttaggggcgttcccaagagatttggatagcctgaaattgggcccagcagctcccattcctgtccttccagtagcctaaaagtgggcccagtaacttccacttctgccctttcatctatctgtggcgacacgctttaattactatttttgctaattttattttttaataacttttctcaaaacggtcatataaagttcacatttaatatacaaactagttgctaagaagttttacaaaacgaaatgtatccctaaccacatttatgcttttggtgtgttcagtttaacaaactgaattccccataaattaattaccttatcagaccttatgtcaataacgcactttggaaatgcattcgaagacgtttcttaaaactacagaaaggttctgagcttttaaaacgccagatgtagtaatttatcaccttttctagccatattgtaaaaccacaaaatgatgaccgtgttgtggtctctgcattatcgtcacagcaggcaggcagttcagacgcaccctcgctgctccaaaacaataaacaaccctcttacgagatgcataagca

SEQ ID NO: 159 - DNA, 2118 bp, Diabrotica virgifera
  SmartBlast Evalue=1E-117; Info="Calumenin, putative n=1 Tax= Pediculus humanus corporis RepID=E0VBH5_PEDHC"
agagggtacataataaggagttaagtgataaagaacacttggaaaatgggcaccacaatcctgaatatgaccacgaagctttcttgggagcagaagaagcaaaaactttcgatcaactgccccctgaagaaagcaaaaggagactgggaataatagcagacaaaattgatgtcaacaatgatggatttatcaacagagaagaactcaaggattggatcagatttactcagaaacgatacattactgaggatgttgacagacagtggaaacaacaaaaccctgatgataagccaaccctaccatgggagaggtaccaaacattggtttatggttttctagaaaatatggatccagcagaaatagaaaatgatagcacaggtttctcctacaaaaagatgatggccagagatcagaggcgttggaagactgcagacagagatcaagatggtgaattaagcaaagaagaattcgctgctttcttacatcctgaagaaaacgactatatgcgtgatctggttgtacaagaaactatggaagatattgacaaagacaaagatggcaaaatttcagtggaagaatatattggagacatgtacagaagtgacgagaacgaagaagaacctgactgggtaaagagcgaacgtgaacagttcaacacctaccgcgacaaagacggagacggatacatggacgaggaagagatcaaaaactggatattaccccaagatttcgaccacgccgaagccgaagcgagacatttgatctacgaggcagactccgacgctgacgaacaactaaccaaagacgaagtgttgaccaaatatgaccttttcgttggatctcaggctttagatttcggcgaggctctcaccagacacgacgagttttaaacgaaacttcttacggagtttctgaggtgaaattgatttatttttagctaaatatgtgaaaatgtggtggaatgttgatctagaagcgaaattttatatctagtatataaaagaaaacttcatatacaaattcggaaaaagtttatggttagtgttacaaaattagcgacatatctaactaatatgctaatattacgttttcatttaatagacaaagatcacaatcatatttcattgagatatgaaccctttcaacatgaacccaaaggcaagcactttgtcctggtgtcttagaccagtacaattgtagttgattgagttcccaggtccggagttcctctctgatgtggctttttgatagtccacaaaagggttctggactttggaatggggtataagccccatcttttgcgaggctgtctgcttccttatttcctgcaattcctttgtgacctggcacccacattaaagttactttgttgctctccgatagcttcttgaggggttttttacagtctcaaaccaactttgattcacaagtaattgactttggaacctttaaaacggcttggctgtctgataaaataaagagttttgccatatgagtgtctaggtggagacattcttggatactaatgtctttagcatttatttctgccagaaagatagttaggggcgttcccaagagatttggatagcctgaaattgggcccagcagctcccattcctgtccttccagtagcctaaaagtgggcccagtaacttccacttctgccctttcatctatctgtggcgacacgctttaattactatttttgctaattttattttttaataacttttctcaaaacggtcatataaagttcacatttaatatacaaactagttgctaagaagttttacaaaacgaaatgtatccctaaccacatttatgcttttggtgtgttcagtttaacaaactgaattccccataaattaattaccttatcagaccttatgtcaacgcactttggaaatgcattcgaagacgtttcttaaaactacagaaaggttctgagcttttaaaacgccagatgtagtaatttatcaccttttctagccatattgtaaaaccacaaaatgatgaccgtgttgtggtctctgcattatcgtcacagcaggcaggcagttcagacgcaccctcgctgctccaaaacaataaacaaccctcttacgagatgcataagca

SEQ ID NO: 160 - DNA, 6272 bp, Diabrotica virgifera
  SmartBlast Evalue=0; Info="Lethal (2) 44DEa, isoform D n=7 Tax= melanogaster subgroup RepID=A1Z7H2_DROME"
agttttattaatccacgtgttcaaaaatattttcaggatattttaatatatagatccattctgctgatatattgtaatgcagctttgccatttatataactattttccaacaactattataatatcctatctatatgtacatgcatacttaataccttagtaaaggtatttaaaacatagagaagcgatgacaaatgtacagaaaccaagccatcattaaatatagttattatttgtaaaacattttgtcttgtacgtttaagaagtatttcaaaggagctgaccaccagaacaaatattattagtggatatatctcaattactagcgacatcaatatcgatttttgctcgaaatcgaaaagttgaatcacaaccaccctaaaaaggaaaggaaaacatctaaatacctaaattttacttttactaataaaaccaagaattacgcttaaaagaatctgcgaaaattggttgaaaaatgaatttaaataaaacaaaaatgatgacaaatcaaaatatcacaatcgacctcgatgaaattaagtgacgaagagtataatatattcctagctgacacaaccaaattatcagaatcaaacgttagagacaactagaagaatccgaatcgcttgatcagcaataggaagactctgtactgtgttgtaagacgaaaagatatcaataaacctaaagaaaggggcgttcaagagctgagttctaccagttatgaactacagaatggagaccgtgacacttacagagttatcagttaacagattaagaacaacacagagggccatcgaacgagctatgttagaagtatctctgagaaaacatatacgaaataagggcgtgcgaagctggaagatgtaatttaagtgtggcgacatgctttaattactatttttgctaattttaatttttcataacttttctcaaaacaaaataatatggatcatataaaactcacatttaatatacaaaccagatgtttttggtgtgttcagtttgacaaactgaattccccataaatttattaccttatcagaccttatgtgaataactcactttggaaatgcattcgaagacgtttcttaaaactgcagaaatgtttcaacttttaaacgcaagatctaaataatttatcgcctttctggccagatggtagaaacacaaacatattagcgtttgtggtttttttcagccacagcagagtcgatctgcaacctcccgtcggtagtcacactccagcgggcgttgggataggtcaacaacacaccctttcgagatataagcaaaacacgtctttttaccgattaaaataaatatattattgttcgttgtttacacttattttaatcaattccatttactcaattccgcaccacggaacagaagaattgcgcaaataaaatgcaactggataggacatgtggcacgacaaaacaatggaaggtgaacaagaaacattttacatcggagaccacgcgagcacagtcgcggaggccacaaaaataatggttagacgacttcaaagcaaaagttaagaagaactgagaagaaaacggagaagaatggataactcatggggaggcctttgttcaggagtaaatgcaaacaatctgaagaagaagaaatgaaaaaacatgcttaaaaacggaaaattatggaatattataaaataagacacaaaaaagcgtccaattaaaaatcctctagctctaaaggaccatatttagtcatcaaatctcctaagcagcaacagaatataaaaatcttggagtaaagtataaaaaagtctaaatcaaagcaaagaaatgagataaatgattaacagaaaatcaataaaagctgcaatcagttccacctgtcttttttgcaatttctaagtaaaagttagttccgcttttatctttattaactataatatatacatttattgtctataagtataatttcttacaaaaagcagtttttccaataaaaccagcaaaaatatcgtattaaacgtctaactttgtaaaaaaaaacctattcctggtgcctgcacatttgccgcttgagtaaataactatttttatccttaagtacatgtctttaatgaaatagatgtttagaccgatcattgacaaattgacaattacctacatcggtgcaagaacagtcttttactaaaacttaacactttataacaaaaagaaaaacaacaataacaaatatgcgcaaaaaatctcataatattgctactaaaataccacaaccgtctataagttcattccaaccagcctcacagaagacttacagtggaattcttctctcaaaatacacaaaaacagtatttttcgatatttttgttgttttctgtaatatttgtatctttatttattgcttacgtctcctgtattgcttgttgaaagacgctttgttgtgaaaaagttgtcccttgtgaaacaattcatgttttctgtttattaaatgaccttaacttttacacagacgaatagcaccgttaaaatattattctcgaagtaaaactagttgaaaattgcgaaaaataagagaaacatgaatttattacccctaaaggaaccacagtgatgctaacaataatattttaagagtatttttgccttgaaatattgaagagataacaggatttttaataccacattccgtctgtgacattttaccaaaaaaaaaactgtatagtatcacttttcatgtgcccgcacgattatagtctaactctcctataaaaaagcaactatacaacgattgataagagaatttttcacatctaattcagattaatgatggtatatagtctcaagaagatgaaaaattagcaattgaaagtggcgcagtcaatctacacgatttatcatcaagaaaatcatgtctaaacacaatattgagcaaattaatcacaataaaacttcttccgtacaaaaaattagcaaaattcttcatttcatatccactcactccagaatttgatggaaaaattcgttcagagactcaactttaaaacatgtgttgaaagcctggcctaaaaattaatatcattggcggtaaaagtgtcatttatgcagaatctgtgtaattttcactataagcaccactcccgcaatattttgttgacgttggaggtaaaattgagcgatatctaaagcaataattgtaaaattatttgtgaaaaacttgctttcttagactcaaatggtacaatgcctggcctaaacttgctagagttgcaggaattggaagaataaccgcagtaaggaataaagttggagtgacactgactgcataatgtgtttcaaatgttcttttagggagtccgttgaagaaattggaaaatgcctgaccaaaaattacaattattagttgtagaagtattagttgtgcataatttctttaggtatcactaggaacataattcttgtactatgtggataaagttggagaggaaattcagtcgaaaaaacacattaaagaaaaatatagacaaaaaaaccgtgaattttttcaagtactacctcttaagcatctatctccggcaaaaatacccttaaacctaaaaataaacatttgttcttatatacattatacgcccaagagctaatatataaataaaataatacataaaatcttatttgatagcttcgttaaatatttacagaaaaaattacaaatactttttacaaattgtgctataatacacgcttagaaatcatacccttggaatcaggcgggatttcaacgaaaaaagcgaaatatacgcaaacatatttcttctttcagttaattgtagtaaaattagcaaaataaaaaaaaattgtagtaaaaatgtagtttatgtctttaatatcgttttgttctcaaagtatttccaaagttctacaataaagtcctgcctgattccttgtacacccatactagattaatcataagaaaattaaaggtgttgtaactttcaggaggcgtacattctgttgatttcgtgcttatatctctcttggatgtctttcctctttagtttaaaagctgccgttacgagccccatgtcaggggaccatacctcagtcaccaacttaatagctgctggaatttcaaatttggccagtttacttctttttccatgctctgctaattcttgcacaaccgccttctccacagtatcatccacgcacagctcctcgaacgatttatcgttgactcctttcttggcggcaagatctttgagttgctgttgatttggcacgaccagcgcgacacagaagtccttactcgattctccgtacacgcaaatgttatctactaatggacaagtcttcatctcggcctcgactttaccgagggacacgtattcgcctgcttgcagttttaccaagtctttcttacgatctatgattttgagtacaccatcttcgtgaatttcaccaatatcaccggttctaaaccatctggttccgtcttgctctaagaattcctctttcgacttctctggaagcttgtaatatcctgcactgatgttgtctccacccaaaattatttctccacgaggataaggcttatccgtaatgcgatagttgccttcttcccaacttattaacttaatatcacaaatcgtacagggggcacctactcttccgaacgacatatcaaacagatcttgtacagctgcgcaagaagttgattctgttaaaccatatccttgtattattaccacacacatgcatattcctatttgttcgtgagtctcagctgacaatggagcaccgccagatatcatcagtctcatgtttcctccaacaatttttgtgatcggggaaaatacaattttgtctatcaaaggagttgaatatcctcgccttttccatgctgatttgtactcatatgcaaatttgaatatcacttttttaagattgctgcctttgctgactttttcttggatagtttttgatattctgtctagaatgagtggtacacttgtcaatactgtcggacataatatcgtagcatctcctttggtcccccttttgattttactggacgtatcagtcatagtcaatgcacccgaatatccaataggaactccagcgaacagacaaacgctctccaccaacaactcgaagacgtgagccaacggtaagaaaccgatcattatatcattttcataaattggtgttgaatcacagaatcctttcaaagtagcgattaagttcttttgaagcagtataacacctttgggaacgcctgtagatccgctcgtgtacatgatgatggctatgtcgtctgctttagggggttgagcctctatcttagacgaagctcctttctccaaaacgtcttggaacttcaaaatagaaacaccatccttaaaaccatcggtactttccaagctcttcaattggtcttccatataaatcaagcactgcacacgtggcgtcagctgcaagatctttttaaacttcggtaacagctcgaaactggtgataagagtggtcacttcagtttcgttgatagcgtgagcgatcgcttcgtcacccaaggttgcgtagatggtgaccaaagggatgttttgcttgaagattccatgagcagcgatcatccattcggctctggtttcagcgaagatggcgacatttttgccgggatcgtttcccaattcgcggagtccacggccaaaattggtggctaggatgttgacttcggagaaagtcttccagcggtagtctcccagatcgaacttcttaaaaactcttccgttaggctgaacctcatccatctcggccaatatctgcctggtgcccaaacatcttttgttggcgtattttttgctgcagtattcgaacattttggccatggtgtcgatcttctcgcgaacgagagtgatatggtgctcttttggggctactgtggatcgataagtcaccgatttcgcatcttcttgtatttgtttcgcctttatgcttctggacagttggcgtaaccgccatggcctctggaggattatgtatacggggaacgtgaggacgtcgtacacgaatgctagggccttcagcgcacctatcgctatggtgaacccaacgccatccatatccccaatgttattggcagcttcttaaacagtaaacactccaaaaccgtatcgtatagatatacaaaaactaaaagtaattcacgatcttttaattcaaatagatacaacaaattgtcactgactcaattcgcgttgaggaataaaaataaaattatgccgtccgtatttt

SEQ ID NO: 161 - DNA, 2103 bp, Diabrotica virgifera
  SmartBlast Evalue=1E-117; Info="Calumenin, putative n=1 Tax= Pediculus humanus corporis RepID=E0VBH5_PEDHC"
agagggtacataataaggagttaagtgataaagaacacttggaaaatgggcaccacaatcctgaatatgaccacgaagctttcttgggagcagaagaagcaaaaactttcgatcaactgccccctgaagaaagcaaaaggagactgggaataatagcagacaaaattgatgtcaacaatgatggatttatcaacagagaagaactcaaggattggatcagatttactcagaaacgatacattactgaggatgttgacagacagtggaaacaacaaaaccctgatgataagccaaccctaccatgggagaggtaccaaacattggtttatggttttctagaaaatatggatccagcagaaatagaaaatgatagcacaggtttctcctacaaaaagatgatggccagagatcagaggcgttggaagactgcagacagagatcaagatggtgaattaagcaaagaagaattcgctgctttcttacatcctgaagaaaacgactatatgcgtgatctggttgtacaagaaactatggaagatattgacaaagacaaagatggcaaaatttcagtggaagaatatattggagacatgtacagaagtgacgagaacgaagaagaacctgactgggtaaagagcgaacgtgaacagttcaacacctaccgcgacaaagacggagacggatacatggacgaggaagagatcaaaaactggatattaccccaagatttcgaccacgccgaagccgaagcgagacatttgatctacgaggcagactccgacgctgacgaacaactaaccaaagacgaagtgttgaccaaatatgaccttttcgttggatctcaggctttagatttcggcgaggctctcaccagacacgacgagttttaaacgaaacttcttacggagtttctgaggtgaaattgatttatttttagctaaatatgtgaaaatgtggtggaatgttgatctagaagcgaaattttatatctagtatataaaagaaaacttcatatacaaattcggaaaaagtttatggttagtgttacaaaattagcgacatatctaactaatatgctaatattacgttttcatttaatagacaaagatcacaatcatatttcattgagatatgaaccctttcaacatgaacccaaaggcaagcactttgtcctggtgtcttagaccagtacaattgtagttgattgagttcccaggtccggagttcctctctgatgtggctttttgatagtccacaaaagggttctggactttggaatggggtataagccccatcttttgcgaggctgtctgcttccttatttcctgcaattcctttgtgacctggcacccacattaaagttactttgttgctctccgatagcttcttgaggggttttttacagtctcaaaccaactttgattcacaagtaattgactttggaacctttaaaacggcttggctgtctgataaaataaagagttttgccatatgagtgtctaggtggagacattcttggatactaatgtctttagcatttatttctgccagaaagatagttaggggcgttcccaagagatttggatagcctgaaattgggcccagcagctcccattcctgtccttccagtagcctaaaagtgggcccagtaacttccacttctgccctttcatctatctgtggcgacacgctttaattactatttttgctaattttattttttaataacttttctcaaaacggtcatataaagttcacatttaatatacaaactagttgctaagaagttttacaaaacgaaatgtatccctaaccacatttatgcttttggtgtgttcagtttaacaaactgaattccccataaattaattaccttatcagaccttatgtcaataattcaacttttaaacgccaaatctaaataatttatcgcctttctggccagatggtagaaacacaaacatattagcgtttgtggtttttttcagtatagtcacagcgggcacccgatgcagtcacaccagcacactcgcaaagaataacaaaccctctttcgagaaatattcacgctattttaccgacacaaataaatatattattgac

SEQ ID NO: 162 - DNA, 1880 bp, Diabrotica virgifera
  misc_feature (21)..(21): n is a, c, g, or t
tatccctagacttctccggtntgtgtattagtatactaccattcggcagctcttgtggtacaaacgacaccatctttttactttttgttgccagcaatccgttggaaaagtcgaaatgaaaaaatagataaacgcaagcttattttattttagaatctattgtacataaaatctataaagatataaatttgtaaaaaacaccaattttatttttatataaattatatttttctagatgttaggctattgctatcgtaaaattataaaaaaagactttatttatatactgtagaatgcatcacttgaattttataaaaataatacgatgttttatgtcaaactcggctcgagatacatctagatctagaatatttcaactagcaatccagatatatggggactaaatgtaagaaaattttggagcatttttaaacgagttattcgtattttttaatgtactgaataataatttcaactttgctacaaaagatttgttctagatacataaatgtcagtattttccacattccagttttgtaaatgtcttttgacgagataaagcacaatgaactacagttttttaaggttctttgagtttattccatgctccatcccttcaggatatttcttattccgtcgttttttgtctttcggttgtatcttttctttcttattatatttttcatttttccaacattgacaaaaagttattggttctttgtagttgtggcgacacgctttaattactatttttgctaatttattttttaataacttttctcaaaacgaaataatatgggtcatataaaattcacatttaatatacaaaccagatgttaagaagggccgttaagttttacgaaacgaaatgtatccctaaccatatgtttttggtgtgttcagtttaacaaactgaattccccataaattaattaccttatcagaccttatgtcaataacgcactttggaaatgcattcgaagacgtttcttaaaactacagaaaggttctgagcttttaaaacgccagatgtagtaatttattgccttttctagccatattgtaaaaccgcaaacatgatgataatagtggtgtggtctctgcagtatcgtcacggcaggcaggcagttcagacgcaccttcgctgccctcaaacaataaacaaccctcttacgagatgaataagcacgccttttaaccaaaaataaaataaatattactgttcgttgtttacacttatttttaatcgattccgttaacccacacatcggaacacagccatctatcaacaattagaaaaacatgttccttataaaagttacttattttttatcaggaatcgaaatatttaataaaaatgggggtttccatgtaagattttaaattagcctctttccgctctagggggtgcggccgggggtcgtatttggtgtcatttgatagatttttgaaaaatattgaacacgtgttcttcagtttttttgatccgatgtttaatatgaattgtattgaattgacaccgtgtataatatgaattaaatcaacaccactaaatgtgtgtgtttcaagtgttactttacccagataaaatatggactagatgtgtttactacaagagcgaatttacgttaggtactaattaacatcataaaatcgtgtgtgcataaccaaagaaaacgttttccttagttttctataaaataatttactaaaaattacatccaaaagttttaggctatccttaacatctgaagaaattacaatgcggtgaaatgtcgtgttatatataagggaatccagtgcaaattttccgaacatacagtttgaatttatctattttatttcagaatatacttacatcaagtaaagatgttgtcagt

SEQ ID NO: 163 - DNA, 1877 bp, Diabrotica virgifera
  misc_feature (21)..(21): n is a, c, g, or t
tatccctagacttctccggtntgtgtattagtatactaccattcggcagctcttgtggtacaaacgacaccatctttttactttttgttgccagcaatccgttggaaaagtcgaaatgaaaaaatagataaacgcaagcttattttattttagaatctattgtacataaaatctataaagatataaatttgtaaaaaacaccaattttatttttatataaattatatttttctagatgttaggctattgctatcgtaaaattataaaaaaagactttatttatatactgtagaatgcatcacttgaattttataaaaataatacgatgttttatgtcaaactcggctcgagatacatctagatctagaatatttcaactagcaatccagatatatggggactaaatgtaagaaaattttggagcatttttaaacgagttattcgtattttttaatgtactgaataataatttcaactttgctacaaaagatttgttctagatacataaatgtcagtattttccacattccagttttgtaaatgtcttttgacgagataaagcacaatgaactacagttttttaaggttctttgagtttattccatgctccatcccttcaggatatttcttattccgtcgttttttgtctttcggttgtatcttttctttcttattatatttttcatttttccaacattgacaaaaagttattggttctttgtagttgtggcgacacgctttaattactatttttgctaatttattttttaataacttttctcaaaacgaaataatatgggtcatataaaattcacatttaatatacaaaccagatgttaagaagggccgttaagttttacgaaacgaaatgtatccctaaccatatgtttttggtgtgttcagtttaacaaactgaattccccataaattaattaccttatcagaccttatgtcaacgcactttggaaatgcattcgaagacgtttcttaaaactacagaaaggttctgagcttttaaaacgccagatgtagtaatttattgccttttctagccatattgtaaaaccgcaaacatgatgataatagtggtgtggtctctgcagtatcgtcacggcaggcaggcagttcagacgcaccttcgctgccctcaaacaataaacaaccctcttacgagatgaataagcacgccttttaaccaaaaataaaataaatattactgttcgttgtttacacttatttttaatcgattccgttaacccacacatcggaacacagccatctatcaacaattagaaaaacatgttccttataaaagttacttattttttatcaggaatcgaaatatttaataaaaatgggggtttccatgtaagattttaaattagcctctttccgctctagggggtgcggccgggggtcgtatttggtgtcatttgatagatttttgaaaaatattgaacacgtgttcttcagtttttttgatccgatgtttaatatgaattgtattgaattgacaccgtgtataatatgaattaaatcaacaccactaaatgtgtgtgtttcaagtgttactttacccagataaaatatggactagatgtgtttactacaagagcgaatttacgttaggtactaattaacatcataaaatcgtgtgtgcataaccaaagaaaacgttttccttagttttctataaaataatttactaaaaattacatccaaaagttttaggctatccttaacatctgaagaaattacaatgcggtgaaatgtcgtgttatatataagggaatccagtgcaaattttccgaacatacagtttgaatttatctattttatttcagaatatacttacatcaagtaaagatgttgtcagt

SEQ ID NO: 164 - DNA, 1811 bp, Diabrotica virgifera
tgactaccgatgaaaagcccctatacaaccggtactagaaattcacaaatgaaaaggaaaaaaacgtaccagatttcgtttttctaaatagtttttttttgaaaacttttcaaattcaaaaaacgaaaaatttttaaatcgatttttctagaaaacggtgtatcctaccgacttaaagcaagaggacctcttagtattataatacctcacaatttaataatccagtgtcaaaaatgataataagttaaagacaaaaagttatgtgataaaataaccgttgccctatggaggcgtatcagggttcgttttctaaaaagtttttttttaaacttttttggaacctggattatccgtctctcctttaaccgtcagggtccgtacatacgttttattgactacataagcaaagttgtgatgaggatgcaaacggctatcgattgctgacacacattaaaatcgttgaaatggcaacagtggcggacgaagcagattcagaaactgatacaagcttggaatttgacggtggccatgtcgatgatgctattgcaattgacaatgatttaaagaagctagatttgagtaaagaagcacatgcaacaattcatcgagtaatattctcaacaagaagaagccaatcaggtaggtggcatgatcatgtggcgacacgctttaattactatttttgctaattttattttttaataacttttctcaaaacgtaataatatgggtcatataaaattcacatttaatatacaaaccagatgctaagaagggccgttaatttttacgaaacgaaatgtatccctaaccgtatgtttttggtgtgttcagtttaacaaactgaattccccataaattaattaccttatcagaccttatgtcaataacgcactttggaaatgcattcgaagacgtttcttaaaactacagaaaggttctgagcttttaaaacgccagatgtagtaatttattgccttttctagccatattgtaaaaccgcaaacatgatgataatagtggtgtggtctctgcagtatcgtcacggcaggcaggcagttcagacgcaccttcgctgccctcaaacaataaacaaccctcttacgagatgaataagcacgccttttaaccaaaaataaaataaatattactgttcgttgtttacacttatttttaatcgattccgttaacccacacatcggaacacagccatctatcaacaattagaaaaacatgttccttataaaagttacttattttttatcaggaatcgaaatatttaataaaaatgggggtttccatgtaagattttaaattagcctctttccgctctagggggtgcggccgggggtcgtatttggtgtcatttgatagatttttgaaaaatattgaacacgtgttcttcagtttttttgatccgatgtttaatatgaattgtattgaattgacaccgtgtataatatgaattaaatcaacaccactaaatgtgtgtgtttcaagtgttactttacccagataaaatatggactagatgtgtttactacaagagcgaatttacgttaggtactaattaacatcataaaatcgtgtgtgcataaccaaagaaaacgttttccttagttttctataaaataatttactaaaaattacatccaaaagttttaggctatccttaacatctgaagaaattacaatgcggtgaaatgtcgtgttatatataagggaatccagtgcaaattttccgaacatacagtttgaatttatctattttatttcagaatatacttacatcaagtaaagatgttgtcagt

SEQ ID NO: 165 - DNA, 1808 bp, Diabrotica virgifera
tgactaccgatgaaaagcccctatacaaccggtactagaaattcacaaatgaaaaggaaaaaaacgtaccagatttcgtttttctaaatagtttttttttgaaaacttttcaaattcaaaaaacgaaaaatttttaaatcgatttttctagaaaacggtgtatcctaccgacttaaagcaagaggacctcttagtattataatacctcacaatttaataatccagtgtcaaaaatgataataagttaaagacaaaaagttatgtgataaaataaccgttgccctatggaggcgtatcagggttcgttttctaaaaagtttttttttaaacttttttggaacctggattatccgtctctcctttaaccgtcagggtccgtacatacgttttattgactacataagcaaagttgtgatgaggatgcaaacggctatcgattgctgacacacattaaaatcgttgaaatggcaacagtggcggacgaagcagattcagaaactgatacaagcttggaatttgacggtggccatgtcgatgatgctattgcaattgacaatgatttaaagaagctagatttgagtaaagaagcacatgcaacaattcatcgagtaatattctcaacaagaagaagccaatcaggtaggtggcatgatcatgtggcgacacgctttaattactatttttgctaattttattttttaataacttttctcaaaacgtaataatatgggtcatataaaattcacatttaatatacaaaccagatgctaagaagggccgttaatttttacgaaacgaaatgtatccctaaccgtatgtttttggtgtgttcagtttaacaaactgaattccccataaattaattaccttatcagaccttatgtcaacgcactttggaaatgcattcgaagacgtttcttaaaactacagaaaggttctgagcttttaaaacgccagatgtagtaatttattgccttttctagccatattgtaaaaccgcaaacatgatgataatagtggtgtggtctctgcagtatcgtcacggcaggcaggcagttcagacgcaccttcgctgccctcaaacaataaacaaccctcttacgagatgaataagcacgccttttaaccaaaaataaaataaatattactgttcgttgtttacacttatttttaatcgattccgttaacccacacatcggaacacagccatctatcaacaattagaaaaacatgttccttataaaagttacttattttttatcaggaatcgaaatatttaataaaaatgggggtttccatgtaagattttaaattagcctctttccgctctagggggtgcggccgggggtcgtatttggtgtcatttgatagatttttgaaaaatattgaacacgtgttcttcagtttttttgatccgatgtttaatatgaattgtattgaattgacaccgtgtataatatgaattaaatcaacaccactaaatgtgtgtgtttcaagtgttactttacccagataaaatatggactagatgtgtttactacaagagcgaatttacgttaggtactaattaacatcataaaatcgtgtgtgcataaccaaagaaaacgttttccttagttttctataaaataatttactaaaaattacatccaaaagttttaggctatccttaacatctgaagaaattacaatgcggtgaaatgtcgtgttatatataagggaatccagtgcaaattttccgaacatacagtttgaatttatctattttatttcagaatatacttacatcaagtaaagatgttgtcagt

SEQ ID NO: 166 - DNA, 1618 bp, Diabrotica virgifera
tctgtattatttacatttatcatcttacgggtagcataccttaatggacttaactatcaatcctgcggtaagtactccttcgcaatatcctcttctctccgatttgggactactgatgaggggggaaagacctccgaaaccggtatagactcttcctgcactctccgatttaccagagtattatgcagctgctgcattttcgtgttgcaaagagttgaaaatgtttatacattttaattcatttactcttttgttgagtactaaggaatctttcttgttggaacttttaccacgctgagcagatgagttgtgaattatttaaaattctctcatcttaatttcctcggcatcctgtatgatttataatttttgaaaatctcgggaggttgtaaccaaagaaagtattccacctgttgtcaatctggtggtatgggaacgatatttattgtcgttttctgtgctacttcgattgataacttacttttgtttttaaaaaattcaacgtttgatagtgtcaatttaagtaaaactaaccttggaaaaagttaagttattgcacacttttgactattcaattataaggttccaccggtgtttcaccatttttaactttatgtatcatgattttactaactgttatgcaatccattcagcagttatgcatgtgtatcacagtgaaggtaatttaaggcgctcgaaattaaaaaaactgatgtttatagggtgagtcaaatactttagggagaactatagatacttgggactttcaatcaggtacatatactaaaagctatgatgttactgcaacttataaaaatataaagttcatcaagaacaaacagtgtttgtacactatttcgctttaatttttggaaatatataaatatttaaagcaaagcaattttggatacgtcaaaatatagttcgataatacttagaggtagcttgccatgaatatcataattccatagttagggattttaaaccacttttaagagatgtagttattgtgtttatggatgtgtgaactcatctgtcgattactggtagtatttttaatgggtgtgttatggggacagtattctacaaccaacggccaggatattttttatttatatattttgtcaaatattttccaatattggtagagaattattcctaaggacttggtaaactatcggaattgtaaagactgtatttgtttcaatatttagatagaggaatttagtgagagaaatatgaatttattggtaggaggattaatttagtagatggatgtgtgaagttaaattgaaacaaagaaagaaaaatgtatacagtgaaaataaagaaattaatggtgtaggaagattaattgtgacaagggactaaaaaaagtatatttaaagcactggtaaaatatttgcgtgctcgaggtaaattgtgctaatgttgaaatgtttgtcgcatcaatcggactcaggaattttcgactcacagaacgcacgcgctccatcggttgtcggtttttgagcgaatatcaaaggattgcgtcgcatatggtttgcagtgtggacgcttcttttggcacagtgtgtgtttttaagttactccgcacagcgaacaataaacaaatttt

SEQ ID NO: 167 - DNA, 1694 bp, Diabrotica virgifera
gtgtggtaggagatgtgaggtggacgttgacagttgtttttttttgttttctttaagttgctactttcataaccatttaagataataaagaataataagaaagtccagttgggatctacataataatagttaagtcggttataatagtgagtcgagcattagatttttttagaaatgttccgaaaaatttgtttgaaacacggtttttgttttttatttttttacattttgaggttaaaaaataagactctgcgtaattttagcacgccactccctcctctgacaccaaaaccgtcatttttatttttatttatttttttttcgtgggttgcaatcgatttaaaaatttcaaaaaattaacacgcatagttcagtcttttacaaaatttgtgtattttttatagaaccgtgtctagtgtaaatagtgtaaaaagtgtaaataaactaaaaaatttttttttttttaggaaaaagcgtatattattttgagatggctgcagatctaatttgttttattttgggttttttttcaaatatatattattatgtatcactttatcaatcaaagatagagtaaaaattttaattttttaattataacgcgggcacataaatttgatacaccctgtatattgatttgtaactatttaatagaaggtagcttttacgcagtgggtctatcctaatgagtttttccctgaagacttaaagacatttgtaaacaaagtgaagtgaaaatacaatttatttcggattataatttaaaaagattgtttgttacgggaaaggtaagatccacatgcagctgtttggaattttaagtctgttttgtttaagcaccagaatatttgtataatttccggaaagtgattaggatgagtagaagtattatttgaaagaatgcctgggtttttttgaatgaaaaagaggaatgtggaaagagaaatgtttctgattggcttgacaatttagaaggggaaaaggaagattgaatgttgagacagtttggaaaagaaaaattattgtgtggtcggcatccgagagaagcagtcgaaagttttcgcgtatagttcagaagcaagtactagtggttgtttaatagtggagagtagctgaaaagtggaacgagagacaaatcaaattgagaagaaaaacctctttgattctgtaaagtccaagagagtaagttacaagaactatagttattaaaattatttgtgacaccaagtaaaaaagatacttgggtctcaggagattattattgagagaaagagaggagagagtattggagtttattgaacgagtactggtcaaaagcggcctggcttgtgttttggagaaatagttgctggtatgctgctggattgatgctgagaacggagagggctttgattggtagcctaacataatcaacaaggaagagctgtttgggtcaaggggagacatcattgtgtgtgaatcaaaaaggtcagtcaataacttatgtgatagatgttctttataatcagaagttaaaatttttgcgtaaaagcatatgaattaagattccaatatttcaaaaatttaataggaagtataagtagttttgcaaatacctaaatttgttgtttagcttattttaataatggtatcaggaacaaagcgataaatatttgtttgaattagattaattatatggaaaatgtttcatttgg

SEQ ID NO: 168 - DNA, 1550 bp, Diabrotica virgifera
  SmartBlast Evalue=9E-13; Info=Putative uncharacterized transposon-derived protein F52C9.6 (Fragment) n=1 Tax= Camponotus floridanus RepID=E2AL50_9HYME
tgttgataggttcccacttttagacgtatcggagtcaaactgtcacaggaaaaattcataaaattatcctgtcacagtggcagctgccaaactcctccgatacgtctgttccgaatggtttgggaacgattaactaaaattaaaataaatgtaaacacaacaaactttcaataatatatttattttaatcggtaaaaagacgtattttgcttatatctcgtaagagtgtgttgttgacctatcccgacgcccgctggggtgtgactcccgacgggcggttgtaaatcgactgccggggctgaaaaaaccacaaacgctaatatgtttgtgtttctaccatctggccagaaaggcgataaattatttagatctggcgtttaaaagttgaaacatttctgcagttttaagaaacgtcttcgaatgcatttccaaagtgagttattgacataaggtctgataaggtaattaatttatggggaattcagtttgttaaactgaacacaccaaaaacatctggttaaggctatatttcgtttcgtaaaacttaacggacccttcttagcatctggtttgtatattaaaagtgaattttatatgacccatattattttgttttgagaaaagttatgaaaaattaaaattagcaaaaatagtaattaaagcatgtcgccacacttaaattacatcttccagcttcgcacgcccttatttcgtatatgttttctcagagatacttctaacatagctcgttcgatggccctctgtgttgttcttaatctgttaactgataactctgtaagtgtcacggtctccattctgtagttcataactggtagaactcagctcttgaacgcccctttctttaggtttattgatatcttttcgtcttacaacacagtacagagtcttcctattgctgatcaagcgattcggattcttctagttgtctctaacgtttgattctgataatttggttgtgtcagctaggaatatattatactcttcgtcacttaatttcatcgaggtcgattgtgatattttgatttgtcatcatttttgttttatttaaattcatttttcaaccaattttcgcagattcttttaagcgtaattcttggttttattagtaaaagtaaaatttaggtatttagatgttttcctttcctttttagggtggttgtgattcaacttttcgatttcgagcaaaaatcgatattgatgtcgctagtaattgagatatatccactaataatatttgttctggtggtcagctcctttgaaatacttcttaaacgtacaagacaaaatgttttacaaataataactatatttaatgatggcttggtttctgtacatttgtcatcgcttctctatgttttaaatacctttactaaggtattaagtatgcatgtacatatagataggatattataatagttgttggaaaatagttatataaatggcaaagctgcattacaatatatcagcagaatggatctatatattaaaatatcctgaaaatatttttgaacacgtggattaataaaact

SEQ ID NO: 169 - DNA, 1396 bp, Diabrotica virgifera
  misc_feature (21)..(21): n is a, c, g, or t
tatccctagacttctccggtntgtgtattagtatactaccattcggcagctcttgtggtacaaacgacaccatctttttactttttgttgccagcaatccgttggaaaagtcgaaatgaaaaaatagataaacgcaagcttattttattttagaatctattgtacataaaatctataaagatataaatttgtaaaaaacaccaattttatttttatataaattatatttttctagatgttaggctattgctatcgtaaaattataaaaaaagactttatttatatactgtagaatgcatcacttgaattttataaaaataatacgatgttttatgtcaaactcggctcgagatacatctagatctagaatatttcaactagcaatccagatatatggggactaaatgtaagaaaattttggagcatttttaaacgagttattcgtattttttaatgtactgaataataatttcaactttgctacaaaagatttgttctagatacataaatgtcagtattttccacattccagttttgtaaatgtcttttgacgagataaagcacaatgaactacagttttttaaggttctttgagtttattccatgctccatcccttcaggatatttcttattccgtcgttttttgtctttcggttgtatcttttctttcttattatatttttcatttttccaacattgacaaaaagttattggttctttgtagttgtggcgacacgctttaattactatttttgctaatttattttttaataacttttctcaaaacgaaataatatgggtcatataaaattcacatttaatatacaaaccagatgttaagaagggccgttaagttttacgaaacgaaatgtatccctaaccatatgtttttggtgtgttcagtttaacaaactgaattcccataaattaattacctattcaaaccttatgtcaataactcactttggaaatgcattcgaagacgtttcttaaaactgcagaaatgtttcaacttttaaacgccagatctaaataatttatcgcctttctggccagatggtagaaacacaaacatattagcgtttgtggttttttcagccccggcagtcgatttacaaccgcccgtcgggagtcacaccccagcgggcgtcgggataggtcaacaacacactcttacgagatataagcaaaatacgtctttttaccgattaaaataaatatattattgaaagtttgttgtgtttacatttattttaattttagttaatcgttcccaaaccattcggaacagacgtatcggaggagtttggcagctgccactgtgacaggataattttatgaatttttcctgtgacagtttgactccgatacgtctaaaagtgggaacctatcaaca

SEQ ID NO: 170 - DNA, 1375 bp, Diabrotica virgifera
tgtaatgtgtatactgttgagtcgtcgtttagctgtatccctatgccagaagatgatttccgccatttttctaagacctcatttatatggctttaaacagtgttagcgataagctccatccatgtcgtagtcctattccgttggtggatgtgttgacggaaacaattatataaataatattaattaaaacgcaaacaattgtcaataatatacttatttatttttgggtaaacaagcgtgcttcgtttattatctcgtaagggttttgttgttgttttagcgagggtgtgtctgaaccgcgcgcctgctgtgtcgatactgcgagaccaccacactcgattatgtcaccatgcttgcggttttacaatatggctagaaaggcaatagattacgacatctgcgttttaaaagatgagaacctttctgtattttaagaagttgacataaagagcgtggcaatctggcctcgaaatctattagtgtttccttgaaaaaaacattaattttatacaatctgcttagggatacattttgtttcttaaacttaacggtccttgttagcatatggtttgtatattaaatgtgaattttaaatgactaatgttatttcgttttgagaaaagttattgaaaatttagcaaaaatagtaattaaagcgtatcgctatattatatgcatttaacaattcaagaaagaactgtgagttgcctacatttggccccactgaactgaataacctaaaaaatttattttaaaagctcttaaatacaatttttttaattgaatataaatacttaactgacaaattccatataaacagttgctttgtttcaattacaactttctattgcaaagttttcaataatgacttttgaaataatagacataaagcagaagcggtaaaagtgctcacaatacaaggttgattcagaccaacagtcagatcaccgttgagtcaaggggcaacccattcacacactcagtccgggcagatcaccgtcagtctacttcggcatttagatcgatcaagatgcaatattatagtcttgtagagttcttagtattgtgttccgatctgcgaaattgagtaaatggaattaattaaaatataagtgtaaacaatgaacagtaatatttattttatttttggttaaagcgagtgcttattcatctcgtaagagggttgtttattgttttggggcagcgagggtgcgcctgaactgcctccctgccgtgacgatactgccgagaccacaacactattatcatcatcatgcggttttacaatatggctagaaaggaaatagattacgacatctgcgttttaaaagctcagaacctttctgtagttttaagaaacgtctttgaatgcatt

SEQ ID NO: 171 - DNA, 6272 bp, Diabrotica virgifera
  SmartBlast Evalue=0; Info="Lethal (2) 44DEa, isoform D n=7 Tax= melanogaster subgroup RepID=A1Z7H2_DROME"
agttttattaatccacgtgttcaaaaatattttcaggatattttaatatatagatccattctgctgatatattgtaatgcagctttgccatttatataactattttccaacaactattataatatcctatctatatgtacatgcatacttaataccttagtaaaggtatttaaaacatagagaagcgatgacaaatgtacagaaaccaagccatcattaaatatagttattatttgtaaaacattttgtcttgtacgtttaagaagtatttcaaaggagctgaccaccagaacaaatattattagtggatatatctcaattactagcgacatcaatatcgatttttgctcgaaatcgaaaagttgaatcacaaccaccctaaaaaggaaaggaaaacatctaaatacctaaattttacttttactaataaaaccaagaattacgcttaaaagaatctgcgaaaattggttgaaaaatgaatttaaataaaacaaaaatgatgacaaatcaaaatatcacaatcgacctcgatgaaattaagtgacgaagagtataatatattcctagctgacacaaccaaattatcagaatcaaacgttagagacaactagaagaatccgaatcgcttgatcagcaataggaagactctgtactgtgttgtaagacgaaaagatatcaataaacctaaagaaaggggcgttcaagagctgagttctaccagttatgaactacagaatggagaccgtgacacttacagagttatcagttaacagattaagaacaacacagagggccatcgaacgagctatgttagaagtatctctgagaaaacatatacgaaataagggcgtgcgaagctggaagatgtaatttaagtgtggcgacatgctttaattactatttttgctaattttaatttttcataacttttctcaaaacaaaataatatggatcatataaaactcacatttaatatacaaaccagatgtttttggtgtgttcagtttgacaaactgaattccccataaatttattaccttatcagaccttatgtgaataactcactttggaaatgcattcgaagacgtttcttaaaactgcagaaatgtttcaacttttaaacgcaagatctaaataatttatcgcctttctggccagatggtagaaacacaaacatattagcgtttgtggtttttttcagccacagcagagtcgatctgcaacctcccgtcggtagtcacactccagcgggcgttgggataggtcaacaacacaccctttcgagatataagcaaaacacgtctttttaccgattaaaataaatatattattgttcgttgtttacacttattttaatcaattccatttactcaattccgcaccacggaacagaagaattgcgcaaataaaatgcaactggataggacatgtggcacgacaaaacaatggaaggtgaacaagaaacattttacatcggagaccacgcgagcacagtcgcggaggccacaaaaataatggttagacgacttcaaagcaaaagttaagaagaactgagaagaaaacggagaagaatggataactcatggggaggcctttgttcaggagtaaatgcaaacaatctgaagaagaagaaatgaaaaaacatgcttaaaaacggaaaattatggaatattataaaataagacacaaaaaagcgtccaattaaaaatcctctagctctaaaggaccatatttagtcatcaaatctcctaagcagcaacagaatataaaaatcttggagtaaagtataaaaaagtctaaatcaaagcaaagaaatgagataaatgattaacagaaaatcaataaaagctgcaatcagttccacctgtcttttttgcaatttctaagtaaaagttagttccgcttttatctttattaactataatatatacatttattgtctataagtataatttcttacaaaaagcagtttttccaataaaaccagcaaaaatatcgtattaaacgtctaactttgtaaaaaaaaacctattcctggtgcctgcacatttgccgcttgagtaaataactatttttatccttaagtacatgtctttaatgaaatagatgtttagaccgatcattgacaaattgacaattacctacatcggtgcaagaacagtcttttactaaaacttaacactttataacaaaaagaaaaacaacaataacaaatatgcgcaaaaaatctcataatattgctactaaaataccacaaccgtctataagttcattccaaccagcctcacagaagacttacagtggaattcttctctcaaaatacacaaaaacagtatttttcgatatttttgttgttttctgtaatatttgtatctttatttattgcttacgtctcctgtattgcttgttgaaagacgctttgttgtgaaaaagttgtcccttgtgaaacaattcatgttttctgtttattaaatgaccttaacttttacacagacgaatagcaccgttaaaatattattctcgaagtaaaactagttgaaaattgcgaaaaataagagaaacatgaatttattacccctaaaggaaccacagtgatgctaacaataatattttaagagtatttttgccttgaaatattgaagagataacaggatttttaataccacattccgtctgtgacattttaccaaaaaaaaaactgtatagtatcacttttcatgtgcccgcacgattatagtctaactctcctataaaaaagcaactatacaacgattgataagagaatttttcacatctaattcagattaatgatggtatatagtctcaagaagatgaaaaattagcaattgaaagtggcgcagtcaatctacacgatttatcatcaagaaaatcatgtctaaacacaatattgagcaaattaatcacaataaaacttcttccgtacaaaaaattagcaaaattcttcatttcatatccactcactccagaatttgatggaaaaattcgttcagagactcaactttaaaacatgtgttgaaagcctggcctaaaaattaatatcattggcggtaaaagtgtcatttatgcagaatctgtgtaattttcactataagcaccactcccgcaatattttgttgacgttggaggtaaaattgagcgatatctaaagcaataattgtaaaattatttgtgaaaaacttgctttcttagactcaaatggtacaatgcctggcctaaacttgctagagttgcaggaattggaagaataaccgcagtaaggaataaagttggagtgacactgactgcataatgtgtttcaaatgttcttttagggagtccgttgaagaaattggaaaatgcctgaccaaaaattacaattattagttgtagaagtattagttgtgcataatttctttaggtatcactaggaacataattcttgtactatgtggataaagttggagaggaaattcagtcgaaaaaacacattaaagaaaaatatagacaaaaaaaccgtgaattttttcaagtactacctcttaagcatctatctccggcaaaaatacccttaaacctaaaaataaacatttgttcttatatacattatacgcccaagagctaatatataaataaaataatacataaaatcttatttgatagcttcgttaaatatttacagaaaaaattacaaatactttttacaaattgtgctataatacacgcttagaaatcatacccttggaatcaggcgggatttcaacgaaaaaagcgaaatatacgcaaacatatttcttctttcagttaattgtagtaaaattagcaaaataaaaaaaaattgtagtaaaaatgtagtttatgtctttaatatcgttttgttctcaaagtatttccaaagttctacaataaagtcctgcctgattccttgtacacccatactagattaatcataagaaaattaaaggtgttgtaactttcaggaggcgtacattctgttgatttcgtgcttatatctctcttggatgtctttcctctttagtttaaaagctgccgttacgagccccatgtcaggggaccatacctcagtcaccaacttaatagctgctggaatttcaaatttggccagtttacttctttttccatgctctgctaattcttgcacaaccgccttctccacagtatcatccacgcacagctcctcgaacgatttatcgttgactcctttcttggcggcaagatctttgagttgctgttgatttggcacgaccagcgcgacacagaagtccttactcgattctccgtacacgcaaatgttatctactaatggacaagtcttcatctcggcctcgactttaccgagggacacgtattcgcctgcttgcagttttaccaagtctttcttacgatctatgattttgagtacaccatcttcgtgaatttcaccaatatcaccggttctaaaccatctggttccgtcttgctctaagaattcctctttcgacttctctggaagcttgtaatatcctgcactgatgttgtctccacccaaaattatttctccacgaggataaggcttatccgtaatgcgatagttgccttcttcccaacttattaacttaatatcacaaatcgtacagggggcacctactcttccgaacgacatatcaaacagatcttgtacagctgcgcaagaagttgattctgttaaaccatatccttgtattattaccacacacatgcatattcctatttgttcgtgagtctcagctgacaatggagcaccgccagatatcatcagtctcatgtttcctccaacaatttttgtgatcggggaaaatacaattttgtctatcaaaggagttgaatatcctcgccttttccatgctgatttgtactcatatgcaaatttgaatatcacttttttaagattgctgcctttgctgactttttcttggatagtttttgatattctgtctagaatgagtggtacacttgtcaacactgttggacataaaatcgtagcatctcctttggttccccttttgattttactggatgtatcagtcatggtcaatgctcctgaatatccaataggcactccagcaaacagacaaacactttccaccaacaattcaaagacgtgagccaatggtaaaaagccgatcattatatcattttcataaataggtgttgaatcacagaatcctttcaaagtagcgattaagttcttttgaagcagtataacacctttgggaacacctgtagatccgctcgtgtacatgatgatggctatgtcgtctgctttagggggttgggcctctatcttagacgaagctcctttctccaaaacgtcctggaacttcaaaatagaaacaccatccttaaaaccatcggtgctttccaagctcttcaactggtcttccatataaatcaagcactgcacacgtggcgtcagctgcaagatctttttgaacttcggtaacagctcgaaactagtgatgagggtcgtcacttcagtttcgttgatagcgtgagcgatagcttcgtcacccaaagtggcgtagatggtgaccaacgggatgttttgtttgaagattccatgagcagcgatcatccattcagctctggtttctgcgaagatggcgacgtttttgccgggatcgttgccgagttcgcggagtccgcggccaaaattggtggctaggatgttgacttcggagaaggtcttccagcgatagtctcccagatcgaacttcttaaaaactcttccgttaggctgaacctcatccatctcggccaatatctgcctggtgcccaaacatcttttgttggcgtattttttgctgcagtattcgaacattttggccatggtgtcgatcttctcgcgaacgagagtgatatggtgctcttttggggctactgtggatcgataagtcaccgatttcgcatcttcttgtatttgtttcgcctttatgcttctggacagttggcgtaaccgccatggcctctggaggattatgtatacggggaacgtgaggacgtcgtacacgaatgctagggccttcagcgcacctatcgctatggtgaacccaacgccatccatatccccaatgttattggcagcttcttaaacagtaaacactccaaaaccgtatcgtatagatatacaaaaactaaaagtaattcacgatcttttaattcaaatagatacaacaaattgtcactgactcaattcgcgttgaggaataaaaataaaattatgccgtccgtatttt

SEQ ID NO: 172 - DNA, 1327 bp, Diabrotica virgifera
tgactaccgatgaaaagcccctatacaaccggtactagaaattcacaaatgaaaaggaaaaaaacgtaccagatttcgtttttctaaatagtttttttttgaaaacttttcaaattcaaaaaacgaaaaatttttaaatcgatttttctagaaaacggtgtatcctaccgacttaaagcaagaggacctcttagtattataatacctcacaatttaataatccagtgtcaaaaatgataataagttaaagacaaaaagttatgtgataaaataaccgttgccctatggaggcgtatcagggttcgttttctaaaaagtttttttttaaacttttttggaacctggattatccgtctctcctttaaccgtcagggtccgtacatacgttttattgactacataagcaaagttgtgatgaggatgcaaacggctatcgattgctgacacacattaaaatcgttgaaatggcaacagtggcggacgaagcagattcagaaactgatacaagcttggaatttgacggtggccatgtcgatgatgctattgcaattgacaatgatttaaagaagctagatttgagtaaagaagcacatgcaacaattcatcgagtaatattctcaacaagaagaagccaatcaggtaggtggcatgatcatgtggcgacacgctttaattactatttttgctaattttattttttaataacttttctcaaaacgtaataatatgggtcatataaaattcacatttaatatacaaaccagatgctaagaagggccgttaatttttacgaaacgaaatgtatccctaaccgtatgtttttggtgtgttcagtttaacaaactgaattcccataaattaattacctattcaaaccttatgtcaataactcactttggaaatgcattcgaagacgtttcttaaaactgcagaaatgtttcaacttttaaacgccagatctaaataatttatcgcctttctggccagatggtagaaacacaaacatattagcgtttgtggttttttcagccccggcagtcgatttacaaccgcccgtcgggagtcacaccccagcgggcgtcgggataggtcaacaacacactcttacgagatataagcaaaatacgtctttttaccgattaaaataaatatattattgaaagtttgttgtgtttacatttattttaattttagttaatcgttcccaaaccattcggaacagacgtatcggaggagtttggcagctgccactgtgacaggataattttatgaatttttcctgtgacagtttgactccgatacgtctaaaagtgggaacctatcaaca

SEQ ID NO: 173 - DNA, 1278 bp, Diabrotica virgifera
  misc_feature (21)..(21): n is a, c, g, or t
tatccctagacttctccggtntgtgtattagtatactaccattcggcagctcttgtggtacaaacgacaccatctttttactttttgttgccagcaatccgttggaaaagtcgaaatgaaaaaatagataaacgcaagcttattttattttagaatctattgtacataaaatctataaagatataaatttgtaaaaaacaccaattttatttttatataaattatatttttctagatgttaggctattgctatcgtaaaattataaaaaaagactttatttatatactgtagaatgcatcacttgaattttataaaaataatacgatgttttatgtcaaactcggctcgagatacatctagatctagaatatttcaactagcaatccagatatatggggactaaatgtaagaaaattttggagcatttttaaacgagttattcgtattttttaatgtactgaataataatttcaactttgctacaaaagatttgttctagatacataaatgtcagtattttccacattccagttttgtaaatgtcttttgacgagataaagcacaatgaactacagttttttaaggttctttgagtttattccatgctccatcccttcaggatatttcttattccgtcgttttttgtctttcggttgtatcttttctttcttattatatttttcatttttccaacattgacaaaaagttattggttctttgtagttgtggcgacacgctttaattactatttttgctaatttattttttaataacttttctcaaaacgaaataatatgggtcatataaaattcacatttaatatacaaaccagatgttaagaagggccgttaagttttacgaaacgaaatgtatccctaaccatatgtttttggtgtgttcagtttaacaaactgaattccccataaattaattaccttatcagaccttatgtcaataacgcactttggaaatgcattcgaagacgtttcttaaaactacagaaaggttctgagcttttaaaacgccagatgtagtaatttatcaccttttctagccatattgtaaaaccgcaaacatgatgatcgtgttgtggtctctgcagtatcgtcacggcaggcaggcagctcagacgccccttcgctgccctcaaacaataaacaaccctcttacgagatgaataagcacgccttttaaccaaaaataaaataaatattactgtttattgtttacacttttttttaatgattccgttaacccacacccacaccatcggaaca

SEQ ID NO: 174 - DNA, 1275 bp, Diabrotica virgifera
  misc_feature (21)..(21): n is a, c, g, or t
tatccctagacttctccggtntgtgtattagtatactaccattcggcagctcttgtggtacaaacgacaccatctttttactttttgttgccagcaatccgttggaaaagtcgaaatgaaaaaatagataaacgcaagcttattttattttagaatctattgtacataaaatctataaagatataaatttgtaaaaaacaccaattttatttttatataaattatatttttctagatgttaggctattgctatcgtaaaattataaaaaaagactttatttatatactgtagaatgcatcacttgaattttataaaaataatacgatgttttatgtcaaactcggctcgagatacatctagatctagaatatttcaactagcaatccagatatatggggactaaatgtaagaaaattttggagcatttttaaacgagttattcgtattttttaatgtactgaataataatttcaactttgctacaaaagatttgttctagatacataaatgtcagtattttccacattccagttttgtaaatgtcttttgacgagataaagcacaatgaactacagttttttaaggttctttgagtttattccatgctccatcccttcaggatatttcttattccgtcgttttttgtctttcggttgtatcttttctttcttattatatttttcatttttccaacattgacaaaaagttattggttctttgtagttgtggcgacacgctttaattactatttttgctaatttattttttaataacttttctcaaaacgaaataatatgggtcatataaaattcacatttaatatacaaaccagatgttaagaagggccgttaagttttacgaaacgaaatgtatccctaaccatatgtttttggtgtgttcagtttaacaaactgaattccccataaattaattaccttatcagaccttatgtcaacgcactttggaaatgcattcgaagacgtttcttaaaactacagaaaggttctgagcttttaaaacgccagatgtagtaatttatcaccttttctagccatattgtaaaaccgcaaacatgatgatcgtgttgtggtctctgcagtatcgtcacggcaggcaggcagctcagacgccccttcgctgccctcaaacaataaacaaccctcttacgagatgaataagcacgccttttaaccaaaaataaaataaatattactgtttattgtttacacttttttttaatgattccgttaacccacacccacaccatcggaaca

SEQ ID NO: 175 - DNA, 1250 bp, Diabrotica virgifera
aatccaaacaatctacctgccgggttaatccaaaaaatcttaagacaatttatgaattgtgttggataaacttttggcaagatgtatatagcgacacccttcatttattatttttttaactgctaattttaaatattaactttcttttctcaaaacgaaataatgtgtgtcatataaaattcacatttaatatacaaaccagatgctaagaaggacccgttaagttttacgaaacgaaatgtatacctaaccagatgtttttggtgtgttcagtttaacaaactgaattccccataaattaattaccttatcagaccttatgtcaataacgcactttggaaatgcattcgaagacgtttcttaaaactacagaaaggttctgagcttttaaaacgccagatgtagtaatttattgccttttctagccatattgtaaaaccgcaaacatgatgataatagtggtgtggtctctgcagtatcgtcacggcaggcaggcagttcagacgcaccttcgctgccctcaaacaataaacaaccctcttacgagatgaataagcacgccttttaaccaaaaataaaataaatattactgttcgttgtttacacttatttttaatcgattccgttaacccacacatcggaacacagccatctatcaacaattagaaaaacatgttccttataaaagttacttattttttatcaggaatcgaaatatttaataaaaatgggggtttccatgtaagattttaaattagcctctttccgctctagggggtgcggccgggggtcgtatttggtgtcatttgatagatttttgaaaaatattgaacacgtgttcttcagtttttttgatccgatgtttaatatgaattgtattgaattgacaccgtgtataatatgaattaaatcaacaccactaaatgtgtgtgtttcaagtgttactttacccagataaaatatggactagatgtgtttactacaagagcgaatttacgttaggtactaattaacatcataaaatcgtgtgtgcataaccaaagaaaacgttttccttagttttctataaaataatttactaaaaattacatccaaaagttttaggctatccttaacatctgaagaaattacaatgcggtgaaatgtcgtgttatatataagggaatccagtgcaaattttccgaacatacagtttgaatttatctattttatttcagaatatacttacatcaagtaaagatgttgtcagt

SEQ ID NO: 176 - DNA, 1247 bp, Diabrotica virgifera
aatccaaacaatctacctgccgggttaatccaaaaaatcttaagacaatttatgaattgtgttggataaacttttggcaagatgtatatagcgacacccttcatttattatttttttaactgctaattttaaatattaactttcttttctcaaaacgaaataatgtgtgtcatataaaattcacatttaatatacaaaccagatgctaagaaggacccgttaagttttacgaaacgaaatgtatacctaaccagatgtttttggtgtgttcagtttaacaaactgaattccccataaattaattaccttatcagaccttatgtcaacgcactttggaaatgcattcgaagacgtttcttaaaactacagaaaggttctgagcttttaaaacgccagatgtagtaatttattgccttttctagccatattgtaaaaccgcaaacatgatgataatagtggtgtggtctctgcagtatcgtcacggcaggcaggcagttcagacgcaccttcgctgccctcaaacaataaacaaccctcttacgagatgaataagcacgccttttaaccaaaaataaaataaatattactgttcgttgtttacacttatttttaatcgattccgttaacccacacatcggaacacagccatctatcaacaattagaaaaacatgttccttataaaagttacttattttttatcaggaatcgaaatatttaataaaaatgggggtttccatgtaagattttaaattagcctctttccgctctagggggtgcggccgggggtcgtatttggtgtcatttgatagatttttgaaaaatattgaacacgtgttcttcagtttttttgatccgatgtttaatatgaattgtattgaattgacaccgtgtataatatgaattaaatcaacaccactaaatgtgtgtgtttcaagtgttactttacccagataaaatatggactagatgtgtttactacaagagcgaatttacgttaggtactaattaacatcataaaatcgtgtgtgcataaccaaagaaaacgttttccttagttttctataaaataatttactaaaaattacatccaaaagttttaggctatccttaacatctgaagaaattacaatgcggtgaaatgtcgtgttatatataagggaatccagtgcaaattttccgaacatacagtttgaatttatctattttatttcagaatatacttacatcaagtaaagatgttgtcagt

SEQ ID NO: 177 - DNA, 1194 bp, Diabrotica virgifera
  misc_feature (21)..(21): n is a, c, g, or t
tatccctagacttctccggtntgtgtattagtatactaccattcggcagctcttgtggtacaaacgacaccatctttttactttttgttgccagcaatccgttggaaaagtcgaaatgaaaaaatagataaacgcaagcttattttattttagaatctattgtacataaaatctataaagatataaatttgtaaaaaacaccaattttatttttatataaattatatttttctagatgttaggctattgctatcgtaaaattataaaaaaagactttatttatatactgtagaatgcatcacttgaattttataaaaataatacgatgttttatgtcaaactcggctcgagatacatctagatctagaatatttcaactagcaatccagatatatggggactaaatgtaagaaaattttggagcatttttaaacgagttattcgtattttttaatgtactgaataataatttcaactttgctacaaaagatttgttctagatacataaatgtcagtattttccacattccagttttgtaaatgtcttttgacgagataaagcacaatgaactacagttttttaaggttctttgagtttattccatgctccatcccttcaggatatttcttattccgtcgttttttgtctttcggttgtatcttttctttcttattatatttttcatttttccaacattgacaaaaagttattggttctttgtagttgtggcgacacgctttaattactatttttgctaatttattttttaataacttttctcaaaacgaaataatatgggtcatataaaattcacatttaatatacaaaccagatgttaagaagggccgttaagttttacgaaacgaaatgtatccctaaccatatgtttttggtgtgttcagtttaacaaactgaattccccataaattaattaccttatcagaccttatgtcaataacgcactttggaaatgcattcgaagacgtttcttaaaactacagaaaggttctgagcttttaaaacgccagatgtagtaatttattgccttttctagccatattgtaaaaccgcaaacatgatgaccgtgttgtggtctctgcagtatcgtcacaggcaggcaggcagttcagacgcaccctcgctgccccaaataataaacaaccctctttacgatatgaataagcacgcatttt

SEQ ID NO: 178 - DNA, 1191 bp, Diabrotica virgifera
  misc_feature (21)..(21): n is a, c, g, or t
tatccctagacttctccggtntgtgtattagtatactaccattcggcagctcttgtggtacaaacgacaccatctttttactttttgttgccagcaatccgttggaaaagtcgaaatgaaaaaatagataaacgcaagcttattttattttagaatctattgtacataaaatctataaagatataaatttgtaaaaaacaccaattttatttttatataaattatatttttctagatgttaggctattgctatcgtaaaattataaaaaaagactttatttatatactgtagaatgcatcacttgaattttataaaaataatacgatgttttatgtcaaactcggctcgagatacatctagatctagaatatttcaactagcaatccagatatatggggactaaatgtaagaaaattttggagcatttttaaacgagttattcgtattttttaatgtactgaataataatttcaactttgctacaaaagatttgttctagatacataaatgtcagtattttccacattccagttttgtaaatgtcttttgacgagataaagcacaatgaactacagttttttaaggttctttgagtttattccatgctccatcccttcaggatatttcttattccgtcgttttttgtctttcggttgtatcttttctttcttattatatttttcatttttccaacattgacaaaaagttattggttctttgtagttgtggcgacacgctttaattactatttttgctaatttattttttaataacttttctcaaaacgaaataatatgggtcatataaaattcacatttaatatacaaaccagatgttaagaagggccgttaagttttacgaaacgaaatgtatccctaaccatatgtttttggtgtgttcagtttaacaaactgaattccccataaattaattaccttatcagaccttatgtcaacgcactttggaaatgcattcgaagacgtttcttaaaactacagaaaggttctgagcttttaaaacgccagatgtagtaatttattgccttttctagccatattgtaaaaccgcaaacatgatgaccgtgttgtggtctctgcagtatcgtcacaggcaggcaggcagttcagacgcaccctcgctgccccaaataataaacaaccctctttacgatatgaataagcacgcatttt

SEQ ID NO: 179 - DNA, 1227 bp, Diabrotica virgifera
  misc_feature (21)..(21): n is a, c, g, or t
tatccctagacttctccggtntgtgtattagtatactaccattcggcagctcttgtggtacaaacgacaccatctttttactttttgttgccagcaatccgttggaaaagtcgaaatgaaaaaatagataaacgcaagcttattttattttagaatctattgtacataaaatctataaagatataaatttgtaaaaaacaccaattttatttttatataaattatatttttctagatgttaggctattgctatcgtaaaattataaaaaaagactttatttatatactgtagaatgcatcacttgaattttataaaaataatacgatgttttatgtcaaactcggctcgagatacatctagatctagaatatttcaactagcaatccagatatatggggactaaatgtaagaaaattttggagcatttttaaacgagttattcgtattttttaatgtactgaataataatttcaactttgctacaaaagatttgttctagatacataaatgtcagtattttccacattccagttttgtaaatgtcttttgacgagataaagcacaatgaactacagttttttaaggttctttgagtttattccatgctccatcccttcaggatatttcttattccgtcgttttttgtctttcggttgtatcttttctttcttattatatttttcatttttccaacattgacaaaaagttattggttctttgtagttgtggcgacacgctttaattactatttttgctaatttattttttaataacttttctcaaaacgaaataatatgggtcatataaaattcacatttaatatacaaaccagatgttaagaagggccgttaagttttacgaaacgaaatgtatccctaaccatatgtttttggtgtgttcagtttaacaaactgaattccccataaattaattaccttatcagaccttatgtcaataacgcactttggaaatgcattcgaagacgtttccttaaaactacagaaaggttctgagcttttaaaacgccagatgcagtaatttattgccttttctagcaatattgtaaaaccgcaaacatgatgataataaacttactaaggaagtaaaacttcacttgtaggtagatggtatataaatttattaaaatttttataaaaagatcccaattggattaaagtgggttcatcactagtacaaaaacacaaacgttttcggaccaatcagtc

SEQ ID NO: 180 - DNA, 1224 bp, Diabrotica virgifera
  misc_feature (21)..(21): n is a, c, g, or t
tatccctagacttctccggtntgtgtattagtatactaccattcggcagctcttgtggtacaaacgacaccatctttttactttttgttgccagcaatccgttggaaaagtcgaaatgaaaaaatagataaacgcaagcttattttattttagaatctattgtacataaaatctataaagatataaatttgtaaaaaacaccaattttatttttatataaattatatttttctagatgttaggctattgctatcgtaaaattataaaaaaagactttatttatatactgtagaatgcatcacttgaattttataaaaataatacgatgttttatgtcaaactcggctcgagatacatctagatctagaatatttcaactagcaatccagatatatggggactaaatgtaagaaaattttggagcatttttaaacgagttattcgtattttttaatgtactgaataataatttcaactttgctacaaaagatttgttctagatacataaatgtcagtattttccacattccagttttgtaaatgtcttttgacgagataaagcacaatgaactacagttttttaaggttctttgagtttattccatgctccatcccttcaggatatttcttattccgtcgttttttgtctttcggttgtatcttttctttcttattatatttttcatttttccaacattgacaaaaagttattggttctttgtagttgtggcgacacgctttaattactatttttgctaatttattttttaataacttttctcaaaacgaaataatatgggtcatataaaattcacatttaatatacaaaccagatgttaagaagggccgttaagttttacgaaacgaaatgtatccctaaccatatgtttttggtgtgttcagtttaacaaactgaattccccataaattaattaccttatcagaccttatgtcaacgcactttggaaatgcattcgaagacgtttccttaaaactacagaaaggttctgagcttttaaaacgccagatgcagtaatttattgccttttctagcaatattgtaaaaccgcaaacatgatgataataaacttactaaggaagtaaaacttcacttgtaggtagatggtatataaatttattaaaatttttataaaaagatcccaattggattaaagtgggttcatcactagtacaaaaacacaaacgttttcggaccaatcagtc

SEQ ID NO: 181 - DNA, 1209 bp, Diabrotica virgifera
tgactaccgatgaaaagcccctatacaaccggtactagaaattcacaaatgaaaaggaaaaaaacgtaccagatttcgtttttctaaatagtttttttttgaaaacttttcaaattcaaaaaacgaaaaatttttaaatcgatttttctagaaaacggtgtatcctaccgacttaaagcaagaggacctcttagtattataatacctcacaatttaataatccagtgtcaaaaatgataataagttaaagacaaaaagttatgtgataaaataaccgttgccctatggaggcgtatcagggttcgttttctaaaaagtttttttttaaacttttttggaacctggattatccgtctctcctttaaccgtcagggtccgtacatacgttttattgactacataagcaaagttgtgatgaggatgcaaacggctatcgattgctgacacacattaaaatcgttgaaatggcaacagtggcggacgaagcagattcagaaactgatacaagcttggaatttgacggtggccatgtcgatgatgctattgcaattgacaatgatttaaagaagctagatttgagtaaagaagcacatgcaacaattcatcgagtaatattctcaacaagaagaagccaatcaggtaggtggcatgatcatgtggcgacacgctttaattactatttttgctaattttattttttaataacttttctcaaaacgtaataatatgggtcatataaaattcacatttaatatacaaaccagatgctaagaagggccgttaatttttacgaaacgaaatgtatccctaaccgtatgtttttggtgtgttcagtttaacaaactgaattccccataaattaattaccttatcagaccttatgtcaataacgcactttggaaatgcattcgaagacgtttcttaaaactacagaaaggttctgagcttttaaaacgccagatgtagtaatttatcaccttttctagccatattgtaaaaccgcaaacatgatgatcgtgttgtggtctctgcagtatcgtcacggcaggcaggcagctcagacgccccttcgctgccctcaaacaataaacaaccctcttacgagatgaataagcacgccttttaaccaaaaataaaataaatattactgtttattgtttacacttttttttaatgattccgttaacccacacccacaccatcggaaca

SEQ ID NO: 182 - DNA, 4676 bp, Diabrotica virgifera
  SmartBlast Evalue=1E-102; Info=Chloride intracellular channel isoform 1 n=1 Tax=Bombyx mori RepID=Q1HPS8_BOMMO
ccttcatgacgttttcgacacggttccactcctcactttccaactggcatcgctgcaaaacttcgccaactgagtcataagatcagttgaatttgtgcgttgagtgagtttcaacaaagtttttcagtgccttttcccggtagaaattttcaacaatggccgacgaagttgctgaaaatggtcacgcagaaaatggagatgtaccagaaatcgagcttatcattagggcctcgacaatagacggtagacgtaaaggagcctgcctattctgtcaggaatacttcatggagttgtacttattggccgaactgaaaactattagtctgaaggtgacgacagtagacatgcagaaacctcctcctgatttccgtacgaattttgaagcgacgcccccaccgatcctgatagacagagggatggccatcttggaaaacgagaaaatcgaaagacatatcatgaagaacgtgccaggaggtcataatttatttgtacaggacaaagaagtagcaacattgattgaaaatctctacacaaagttcaaaacgtacgttagaaagtttgaatcgactgacaccacagaaaataggcaacctctatattcgcatttggagaggatcaacgacttcatggcaaagagaggcacgagatttttaactggtgacactatgtcctgttttgactgtgaattgatgcctagactgcaacacatccgcataggagccaaagccttccgcaaattcgagatcccctcaacattcaaagctttgtggaactacatggcgaacatgtacgaactcgaagccttcatccagagctgcccggccgatcaagacatcatcagtcatatcaaaaaccaattgggccttaagacaaccgcgcggatagaactggaaacgcctgtatacacgacagccattccggtgctatctgaatcgtaaataataacttaaaataaagaattatagtcggtttcgtgatattttgataatataatatgggacgtcatccagaatacgttccggtgaagatagccgcaaatgatgaatggcataataaaatattggtgtttggcagtgttgccaaacacaattatttcgttctgtggccatcatttgcagctatcttcaccggaacgtattctggaagatgtctctacatgtataggcttgcttaaattggacaaacttgatgtatcaaatataaatcatgtttttaaatgacatatatgtctgatagatagtgccttgtattgcttattcaaacttaatccttttgggtcactaaaggactgattatacacagaaacaaataaattagtacatgtaaactaactacatgacgaaactatttattcataatatttttccgatattctatgtgttgcttgattagagttataatacagtaatcaaatttgatgattttgatgtgccatccatacttagtattactggagttttcattttttgacacatgtcaaacgtcacgactgtcaaacatcaatttttgacgcatgtcaaacgtcacgactgtcaaacatcaatttttgacagccattttcaaagagttttcaaggtcaacttaaaaatgttggaaattactacttttgtacgtgatcactactatttctgctgctattatactatcctgtgcttacatggcttgattctaaatgtaactgaacaatattcgaacaattttatatcttatagctgaattctttcgagccgctgtttcaaatattacaaaaccgacaaaccgtttatttttatatgcattttcgacttcgacctagtcaggggaagtaatcagtaagtttcttccaataagagtcagctaccaccatagcagttttgtcaaattacagaaaaaagtttataagaccgcttttttatcattattaataaatattaacagattatcgcacttactgtagcaagacaacaagtggaaacaacggaagaaagaatatctttggttagaaaggcacttgatgaattctatacgttctacagtaatgaaaaataattatcatggcgcatattattgcaagtgaaaatgttgtttctacgatttccagtattagttttattatcttcagttaagttttaattgtagttcattttttaatagatgaaaaacggttctgtatgaatagggcttttcaacgcttctcatttatttcgggcacttgtcatatgtcgtatattaatattatacacagattatacaacatacgacaagttaagatatctatgtcatacgtttttggtttgtatcattggtatatacgaataacgtatgttccatgggtgttcgggaacgattaacttaaattaaaataagtgtaaaaacaacaacttgtcaataatatatttatttgtgtcggtaaaatagcgtgaatatttctcgaaagagagtttgttattcttttgcgagtatggtggtgtgtccgcgccggatggttgctgtggctatactgaaagaaaccacaaacgctaatatgtttgtgtttctaccatctggccagaaaggtgataaattatttagatctggcgtttaaaagttgaaacatttctgcagttttaagaaacgtcttcgaatgcatttccaaagtgagttattgacataaggtctgataaggtaattaatttatggggaatttagtttgttaaactgaacacaccaaaaacatctggttagggatacatttcgtttcgtaaaacttaacgggcccttcttagcatctggtttgtatattaaatgtgaattttgtatgacccatattatttcgttttgagaaaagaaagttaatatttaaaattagcaattaaaaaaataataataaatgaagcgtgtcgctatacgtatgacgtagatatattaatattagaggactcatgacagaatctgacagaaatgacaatcgatgaaaagcccaattaattgacaaatgatgacagatgacggttatgattgtattgcctttcaggattgccaactgttttcctgttaagtttatgtttatgtggacaatcctttgaactttagacgttccatactgatatggtcaacgtttttacagtttccggtaaaaatatcgcttataacgagaccataaactttttaaatccaaaaatgaaaaaacatcgttgttgtgtatcaaattgtcaaaatacaacgaatgaattgtgttgcacaactgatatatgcatataacaattcaagaaagcactgagttgcctacatttggcgctactgagctgaataacctgaaaaattgattttaaaaggccttaaatacaatgtttttaaaaatgtataaacattttcaatttctttgaaacacgaaaatgcagcagctgcataatgctctggttaaatcggagagtgcaggaagagtctataccggtttcggaggtttttccccctcatcagtagtcccatattctattctctccgaattctccacgtatcatactttgggccgttccgaattgcaaagaaagatgtcacggatgaactagagccatctaccgaaaaacaaagtaagttatcaatcgaagtagcacagaaaacgacaataaatgtcgttcccataccaccagattgacaacaggtggatactttctttggttacatctcctgagatttttaaaatttataaatcaaacagtatgccgacagattctctcatcttaatttcctcggcatcctgtttgatttggcagtctgaactgcctgcctgtcgtgacgatactgccgagaccacaacactattatcatcattatgtttgcggttttacaatatggctagaaaaggcaataaattactacatgtggcgtttttaaatttaagaacctttctgtagttttaagaaacgtcttcgaatgcatttccaaagtgcgttattgacataaggtctgataaggtaattaatttatggggaattcagtttgttaaactgaacacaccaaaaacatattatggttagggacacatttcgttttgtaaaacttcttagcatctggtttgtatattaaatgtgaattttaaatgaccgttttaagaaaagttattaaaaaataaaattagctaaaagagtaattaaagcgtgtctccacaattgcaacgaatgaactccattcttgcattttttgagaaaagtagagcgaaccatataacgaccatatgcgcatggcaatatgtcttttataggaataaaatcgacaattttcatattgtctaattgaaatcagttattgatcttgttgctagtgagacaattgttaaggtggttgctgactcttgctgattattataaagcatttttgacaacttacataaaaatatgtaaaaagcatttttacaatgtgatgagaaaatatttatataccaattgtttctttgtaaataaaagttcttaatttttgaatttaattgagtttttaaatgttaggtttgaggaaattgatataaaaaatttctaatacccgctttcttacaatttacaaatgtgaaatattttgtttaatacgttctttttttctatatagttacaatgatgtactggagttattattttttagatatttaggcgaactttgtatttttactaggtcccgttggaagctggatgctttcgactggattcattaataataaaggtgtaaaa

SEQ ID NO: 183 - DNA, 1206 bp, Diabrotica virgifera
tgactaccgatgaaaagcccctatacaaccggtactagaaattcacaaatgaaaaggaaaaaaacgtaccagatttcgtttttctaaatagtttttttttgaaaacttttcaaattcaaaaaacgaaaaatttttaaatcgatttttctagaaaacggtgtatcctaccgacttaaagcaagaggacctcttagtattataatacctcacaatttaataatccagtgtcaaaaatgataataagttaaagacaaaaagttatgtgataaaataaccgttgccctatggaggcgtatcagggttcgttttctaaaaagtttttttttaaacttttttggaacctggattatccgtctctcctttaaccgtcagggtccgtacatacgttttattgactacataagcaaagttgtgatgaggatgcaaacggctatcgattgctgacacacattaaaatcgttgaaatggcaacagtggcggacgaagcagattcagaaactgatacaagcttggaatttgacggtggccatgtcgatgatgctattgcaattgacaatgatttaaagaagctagatttgagtaaagaagcacatgcaacaattcatcgagtaatattctcaacaagaagaagccaatcaggtaggtggcatgatcatgtggcgacacgctttaattactatttttgctaattttattttttaataacttttctcaaaacgtaataatatgggtcatataaaattcacatttaatatacaaaccagatgctaagaagggccgttaatttttacgaaacgaaatgtatccctaaccgtatgtttttggtgtgttcagtttaacaaactgaattccccataaattaattaccttatcagaccttatgtcaacgcactttggaaatgcattcgaagacgtttcttaaaactacagaaaggttctgagcttttaaaacgccagatgtagtaatttatcaccttttctagccatattgtaaaaccgcaaacatgatgatcgtgttgtggtctctgcagtatcgtcacggcaggcaggcagctcagacgccccttcgctgccctcaaacaataaacaaccctcttacgagatgaataagcacgccttttaaccaaaaataaaataaatattactgtttattgtttacacttttttttaatgattccgttaacccacacccacaccatcggaaca

SEQ ID NO: 184 - DNA, 1184 bp, Diabrotica virgifera
  misc_feature (21)..(21): n is a, c, g, or t
tatccctagacttctccggtntgtgtattagtatactaccattcggcagctcttgtggtacaaacgacaccatctttttactttttgttgccagcaatccgttggaaaagtcgaaatgaaaaaatagataaacgcaagcttattttattttagaatctattgtacataaaatctataaagatataaatttgtaaaaaacaccaattttatttttatataaattatatttttctagatgttaggctattgctatcgtaaaattataaaaaaagactttatttatatactgtagaatgcatcacttgaattttataaaaataatacgatgttttatgtcaaactcggctcgagatacatctagatctagaatatttcaactagcaatccagatatatggggactaaatgtaagaaaattttggagcatttttaaacgagttattcgtattttttaatgtactgaataataatttcaactttgctacaaaagatttgttctagatacataaatgtcagtattttccacattccagttttgtaaatgtcttttgacgagataaagcacaatgaactacagttttttaaggttctttgagtttattccatgctccatcccttcaggatatttcttattccgtcgttttttgtctttcggttgtatcttttctttcttattatatttttcatttttccaacattgacaaaaagttattggttctttgtagttgtggcgacacgctttaattactatttttgctaatttattttttaataacttttctcaaaacgaaataatatgggtcatataaaattcacatttaatatacaaaccagatgttaagaagggccgttaagttttacgaaacgaaatgtatccctaaccatatgtttttggtgtgttcagtttaacaaactgaattccccataaattaattaccttatcagaccttatgtcaataacgcactttggaaatgcattcgaagacgtttcttaaaactacagaaaggttctgagcttttaaaacgccagatgtagtaatttatcaccttttctagccatattgtaaaaccacaaaatgatgaccgtgttgtggtctctgcattatcgtcacagcaggcaggcagttcagacgcaccctcgctgctccaaaacaataaacaaccctcttacgagatgcataagca

SEQ ID NO: 185 - DNA, 1181 bp, Diabrotica virgifera
  misc_feature (21)..(21): n is a, c, g, or t
tatccctagacttctccggtntgtgtattagtatactaccattcggcagctcttgtggtacaaacgacaccatctttttactttttgttgccagcaatccgttggaaaagtcgaaatgaaaaaatagataaacgcaagcttattttattttagaatctattgtacataaaatctataaagatataaatttgtaaaaaacaccaattttatttttatataaattatatttttctagatgttaggctattgctatcgtaaaattataaaaaaagactttatttatatactgtagaatgcatcacttgaattttataaaaataatacgatgttttatgtcaaactcggctcgagatacatctagatctagaatatttcaactagcaatccagatatatggggactaaatgtaagaaaattttggagcatttttaaacgagttattcgtattttttaatgtactgaataataatttcaactttgctacaaaagatttgttctagatacataaatgtcagtattttccacattccagttttgtaaatgtcttttgacgagataaagcacaatgaactacagttttttaaggttctttgagtttattccatgctccatcccttcaggatatttcttattccgtcgttttttgtctttcggttgtatcttttctttcttattatatttttcatttttccaacattgacaaaaagttattggttctttgtagttgtggcgacacgctttaattactatttttgctaatttattttttaataacttttctcaaaacgaaataatatgggtcatataaaattcacatttaatatacaaaccagatgttaagaagggccgttaagttttacgaaacgaaatgtatccctaaccatatgtttttggtgtgttcagtttaacaaactgaattccccataaattaattaccttatcagaccttatgtcaacgcactttggaaatgcattcgaagacgtttcttaaaactacagaaaggttctgagcttttaaaacgccagatgtagtaatttatcaccttttctagccatattgtaaaaccacaaaatgatgaccgtgttgtggtctctgcattatcgtcacagcaggcaggcagttcagacgcaccctcgctgctccaaaacaataaacaaccctcttacgagatgcataagca

SEQ ID NO: 186 - DNA, 1166 bp, Diabrotica virgifera
  misc_feature (21)..(21): n is a, c, g, or t
tatccctagacttctccggtntgtgtattagtatactaccattcggcagctcttgtggtacaaacgacaccatctttttactttttgttgccagcaatccgttggaaaagtcgaaatgaaaaaatagataaacgcaagcttattttattttagaatctattgtacataaaatctataaagatataaatttgtaaaaaacaccaattttatttttatataaattatatttttctagatgttaggctattgctatcgtaaaattataaaaaaagactttatttatatactgtagaatgcatcacttgaattttataaaaataatacgatgttttatgtcaaactcggctcgagatacatctagatctagaatatttcaactagcaatccagatatatggggactaaatgtaagaaaattttggagcatttttaaacgagttattcgtattttttaatgtactgaataataatttcaactttgctacaaaagatttgttctagatacataaatgtcagtattttccacattccagttttgtaaatgtcttttgacgagataaagcacaatgaactacagttttttaaggttctttgagtttattccatgctccatcccttcaggatatttcttattccgtcgttttttgtctttcggttgtatcttttctttcttattatatttttcatttttccaacattgacaaaaagttattggttctttgtagttgtggcgacacgctttaattactatttttgctaatttattttttaataacttttctcaaaacgaaataatatgggtcatataaaattcacatttaatatacaaaccagatgttaagaagggccgttaagttttacgaaacgaaatgtatccctaaccatatgtttttggtgtgttcagtttaacaaactgaattccccataaattaattaccttatcagaccttatgtcaataattcaacttttaaacgccaaatctaaataatttatcgcctttctggccagatggtagaaacacaaacatattagcgtttgtggtttttttcagtatagtcacagcgggcacccgatgcagtcacaccagcacactcgcaaagaataacaaaccctctttcgagaaatattcacgctattttaccgacacaaataaatatattattgac

SEQ ID NO: 187 - DNA, 1125 bp, Diabrotica virgifera
tgactaccgatgaaaagcccctatacaaccggtactagaaattcacaaatgaaaaggaaaaaaacgtaccagatttcgtttttctaaatagtttttttttgaaaacttttcaaattcaaaaaacgaaaaatttttaaatcgatttttctagaaaacggtgtatcctaccgacttaaagcaagaggacctcttagtattataatacctcacaatttaataatccagtgtcaaaaatgataataagttaaagacaaaaagttatgtgataaaataaccgttgccctatggaggcgtatcagggttcgttttctaaaaagtttttttttaaacttttttggaacctggattatccgtctctcctttaaccgtcagggtccgtacatacgttttattgactacataagcaaagttgtgatgaggatgcaaacggctatcgattgctgacacacattaaaatcgttgaaatggcaacagtggcggacgaagcagattcagaaactgatacaagcttggaatttgacggtggccatgtcgatgatgctattgcaattgacaatgatttaaagaagctagatttgagtaaagaagcacatgcaacaattcatcgagtaatattctcaacaagaagaagccaatcaggtaggtggcatgatcatgtggcgacacgctttaattactatttttgctaattttattttttaataacttttctcaaaacgtaataatatgggtcatataaaattcacatttaatatacaaaccagatgctaagaagggccgttaatttttacgaaacgaaatgtatccctaaccgtatgtttttggtgtgttcagtttaacaaactgaattccccataaattaattaccttatcagaccttatgtcaataacgcactttggaaatgcattcgaagacgtttcttaaaactacagaaaggttctgagcttttaaaacgccagatgtagtaatttattgccttttctagccatattgtaaaaccgcaaacatgatgaccgtgttgtggtctctgcagtatcgtcacaggcaggcaggcagttcagacgcaccctcgctgccccaaataataaacaaccctctttacgatatgaataagcacgcatttt

SEQ ID NO: 188 - DNA, 1122 bp, Diabrotica virgifera
tgactaccgatgaaaagcccctatacaaccggtactagaaattcacaaatgaaaaggaaaaaaacgtaccagatttcgtttttctaaatagtttttttttgaaaacttttcaaattcaaaaaacgaaaaatttttaaatcgatttttctagaaaacggtgtatcctaccgacttaaagcaagaggacctcttagtattataatacctcacaatttaataatccagtgtcaaaaatgataataagttaaagacaaaaagttatgtgataaaataaccgttgccctatggaggcgtatcagggttcgttttctaaaaagtttttttttaaacttttttggaacctggattatccgtctctcctttaaccgtcagggtccgtacatacgttttattgactacataagcaaagttgtgatgaggatgcaaacggctatcgattgctgacacacattaaaatcgttgaaatggcaacagtggcggacgaagcagattcagaaactgatacaagcttggaatttgacggtggccatgtcgatgatgctattgcaattgacaatgatttaaagaagctagatttgagtaaagaagcacatgcaacaattcatcgagtaatattctcaacaagaagaagccaatcaggtaggtggcatgatcatgtggcgacacgctttaattactatttttgctaattttattttttaataacttttctcaaaacgtaataatatgggtcatataaaattcacatttaatatacaaaccagatgctaagaagggccgttaatttttacgaaacgaaatgtatccctaaccgtatgtttttggtgtgttcagtttaacaaactgaattccccataaattaattaccttatcagaccttatgtcaacgcactttggaaatgcattcgaagacgtttcttaaaactacagaaaggttctgagcttttaaaacgccagatgtagtaatttattgccttttctagccatattgtaaaaccgcaaacatgatgaccgtgttgtggtctctgcagtatcgtcacaggcaggcaggcagttcagacgcaccctcgctgccccaaataataaacaaccctctttacgatatgaataagcacgcatttt

SEQ ID NO: 189 - DNA, 1158 bp, Diabrotica virgifera
tgactaccgatgaaaagcccctatacaaccggtactagaaattcacaaatgaaaaggaaaaaaacgtaccagatttcgtttttctaaatagtttttttttgaaaacttttcaaattcaaaaaacgaaaaatttttaaatcgatttttctagaaaacggtgtatcctaccgacttaaagcaagaggacctcttagtattataatacctcacaatttaataatccagtgtcaaaaatgataataagttaaagacaaaaagttatgtgataaaataaccgttgccctatggaggcgtatcagggttcgttttctaaaaagtttttttttaaacttttttggaacctggattatccgtctctcctttaaccgtcagggtccgtacatacgttttattgactacataagcaaagttgtgatgaggatgcaaacggctatcgattgctgacacacattaaaatcgttgaaatggcaacagtggcggacgaagcagattcagaaactgatacaagcttggaatttgacggtggccatgtcgatgatgctattgcaattgacaatgatttaaagaagctagatttgagtaaagaagcacatgcaacaattcatcgagtaatattctcaacaagaagaagccaatcaggtaggtggcatgatcatgtggcgacacgctttaattactatttttgctaattttattttttaataacttttctcaaaacgtaataatatgggtcatataaaattcacatttaatatacaaaccagatgctaagaagggccgttaatttttacgaaacgaaatgtatccctaaccgtatgtttttggtgtgttcagtttaacaaactgaattccccataaattaattaccttatcagaccttatgtcaataacgcactttggaaatgcattcgaagacgtttccttaaaactacagaaaggttctgagcttttaaaacgccagatgcagtaatttattgccttttctagcaatattgtaaaaccgcaaacatgatgataataaacttactaaggaagtaaaacttcacttgtaggtagatggtatataaatttattaaaatttttataaaaagatcccaattggattaaagtgggttcatcactagtacaaaaacacaaacgttttcggaccaatcagtc

SEQ ID NO: 190 - DNA, 1155 bp, Diabrotica virgifera
tgactaccgatgaaaagcccctatacaaccggtactagaaattcacaaatgaaaaggaaaaaaacgtaccagatttcgtttttctaaatagtttttttttgaaaacttttcaaattcaaaaaacgaaaaatttttaaatcgatttttctagaaaacggtgtatcctaccgacttaaagcaagaggacctcttagtattataatacctcacaatttaataatccagtgtcaaaaatgataataagttaaagacaaaaagttatgtgataaaataaccgttgccctatggaggcgtatcagggttcgttttctaaaaagtttttttttaaacttttttggaacctggattatccgtctctcctttaaccgtcagggtccgtacatacgttttattgactacataagcaaagttgtgatgaggatgcaaacggctatcgattgctgacacacattaaaatcgttgaaatggcaacagtggcggacgaagcagattcagaaactgatacaagcttggaatttgacggtggccatgtcgatgatgctattgcaattgacaatgatttaaagaagctagatttgagtaaagaagcacatgcaacaattcatcgagtaatattctcaacaagaagaagccaatcaggtaggtggcatgatcatgtggcgacacgctttaattactatttttgctaattttattttttaataacttttctcaaaacgtaataatatgggtcatataaaattcacatttaatatacaaaccagatgctaagaagggccgttaatttttacgaaacgaaatgtatccctaaccgtatgtttttggtgtgttcagtttaacaaactgaattccccataaattaattaccttatcagaccttatgtcaacgcactttggaaatgcattcgaagacgtttccttaaaactacagaaaggttctgagcttttaaaacgccagatgcagtaatttattgccttttctagcaatattgtaaaaccgcaaacatgatgataataaacttactaaggaagtaaaacttcacttgtaggtagatggtatataaatttattaaaatttttataaaaagatcccaattggattaaagtgggttcatcactagtacaaaaacacaaacgttttcggaccaatcagtc

SEQ ID NO: 191 - DNA, 1115 bp, Diabrotica virgifera
tgactaccgatgaaaagcccctatacaaccggtactagaaattcacaaatgaaaaggaaaaaaacgtaccagatttcgtttttctaaatagtttttttttgaaaacttttcaaattcaaaaaacgaaaaatttttaaatcgatttttctagaaaacggtgtatcctaccgacttaaagcaagaggacctcttagtattataatacctcacaatttaataatccagtgtcaaaaatgataataagttaaagacaaaaagttatgtgataaaataaccgttgccctatggaggcgtatcagggttcgttttctaaaaagtttttttttaaacttttttggaacctggattatccgtctctcctttaaccgtcagggtccgtacatacgttttattgactacataagcaaagttgtgatgaggatgcaaacggctatcgattgctgacacacattaaaatcgttgaaatggcaacagtggcggacgaagcagattcagaaactgatacaagcttggaatttgacggtggccatgtcgatgatgctattgcaattgacaatgatttaaagaagctagatttgagtaaagaagcacatgcaacaattcatcgagtaatattctcaacaagaagaagccaatcaggtaggtggcatgatcatgtggcgacacgctttaattactatttttgctaattttattttttaataacttttctcaaaacgtaataatatgggtcatataaaattcacatttaatatacaaaccagatgctaagaagggccgttaatttttacgaaacgaaatgtatccctaaccgtatgtttttggtgtgttcagtttaacaaactgaattccccataaattaattaccttatcagaccttatgtcaataacgcactttggaaatgcattcgaagacgtttcttaaaactacagaaaggttctgagcttttaaaacgccagatgtagtaatttatcaccttttctagccatattgtaaaaccacaaaatgatgaccgtgttgtggtctctgcattatcgtcacagcaggcaggcagttcagacgcaccctcgctgctccaaaacaataaacaaccctcttacgagatgcataagca

SEQ ID NO: 192 - DNA, 1112 bp, Diabrotica virgifera
tgactaccgatgaaaagcccctatacaaccggtactagaaattcacaaatgaaaaggaaaaaaacgtaccagatttcgtttttctaaatagtttttttttgaaaacttttcaaattcaaaaaacgaaaaatttttaaatcgatttttctagaaaacggtgtatcctaccgacttaaagcaagaggacctcttagtattataatacctcacaatttaataatccagtgtcaaaaatgataataagttaaagacaaaaagttatgtgataaaataaccgttgccctatggaggcgtatcagggttcgttttctaaaaagtttttttttaaacttttttggaacctggattatccgtctctcctttaaccgtcagggtccgtacatacgttttattgactacataagcaaagttgtgatgaggatgcaaacggctatcgattgctgacacacattaaaatcgttgaaatggcaacagtggcggacgaagcagattcagaaactgatacaagcttggaatttgacggtggccatgtcgatgatgctattgcaattgacaatgatttaaagaagctagatttgagtaaagaagcacatgcaacaattcatcgagtaatattctcaacaagaagaagccaatcaggtaggtggcatgatcatgtggcgacacgctttaattactatttttgctaattttattttttaataacttttctcaaaacgtaataatatgggtcatataaaattcacatttaatatacaaaccagatgctaagaagggccgttaatttttacgaaacgaaatgtatccctaaccgtatgtttttggtgtgttcagtttaacaaactgaattccccataaattaattaccttatcagaccttatgtcaacgcactttggaaatgcattcgaagacgtttcttaaaactacagaaaggttctgagcttttaaaacgccagatgtagtaatttatcaccttttctagccatattgtaaaaccacaaaatgatgaccgtgttgtggtctctgcattatcgtcacagcaggcaggcagttcagacgcaccctcgctgctccaaaacaataaacaaccctcttacgagatgcataagca

SEQ ID NO: 193 - DNA, 4543 bp, Diabrotica virgifera
  SmartBlast Evalue=1E-102; Info=Chloride intracellular channel isoform 1 n=1 Tax=Bombyx mori RepID=Q1HPS8_BOMMO
ccttcatgacgttttcgacacggttccactcctcactttccaactggcatcgctgcaaaacttcgccaactgagtcataagatcagttgaatttgtgcgttgagtgagtttcaacaaagtttttcagtgccttttcccggtagaaattttcaacaatggccgacgaagttgctgaaaatggtcacgcagaaaatggagatgtaccagaaatcgagcttatcattagggcctcgacaatagacggtagacgtaaaggagcctgcctattctgtcaggaatacttcatggagttgtacttattggccgaactgaaaactattagtctgaaggtgacgacagtagacatgcagaaacctcctcctgatttccgtacgaattttgaagcgacgcccccaccgatcctgatagacagagggatggccatcttggaaaacgagaaaatcgaaagacatatcatgaagaacgtgccaggaggtcataatttatttgtacaggacaaagaagtagcaacattgattgaaaatctctacacaaagttcaaaacgtacgttagaaagtttgaatcgactgacaccacagaaaataggcaacctctatattcgcatttggagaggatcaacgacttcatggcaaagagaggcacgagatttttaactggtgacactatgtcctgttttgactgtgaattgatgcctagactgcaacacatccgcataggagccaaagccttccgcaaattcgagatcccctcaacattcaaagctttgtggaactacatggcgaacatgtacgaactcgaagccttcatccagagctgcccggccgatcaagacatcatcagtcatatcaaaaaccaattgggccttaagacaaccgcgcggatagaactggaaacgcctgtatacacgacagccattccggtgctatctgaatcgtaaataataacttaaaataaagaattatagtcggtttcgtgatattttgataatataatatggaacgtattctggaagatgtctctacatgtataggcttgcttaaattggacaaacttgatgtatcaaatataaatcatgtttttaaatgacatatatgtctgatagatagtgccttgtattgcttattcaaacttaatccttttgggtcactaaaggactgattatacacagaaacaaataaattagtacatgtaaactaactacatgacgaaactatttattcataatatttttccgatattctatgtgttgcttgattagagttataatacagtaatcaaatttgatgattttgatgtgccatccatacttagtattactggagttttcattttttgacacatgtcaaacgtcacgactgtcaaacatcaatttttgacgcatgtcaaacgtcacgactgtcaaacatcaatttttgacagccattttcaaagagttttcaaggtcaacttaaaaatgttggaaattactacttttgtacgtgatcactactatttctgctgctattatactatcctgtgcttacatggcttgattctaaatgtaactgaacaatattcgaacaattttatatcttatagctgaattctttcgagccgctgtttcaaatattacaaaaccgacaaaccgtttatttttatatgcattttcgacttcgacctagtcaggggaagtaatcagtaagtttcttccaataagagtcagctaccaccatagcagttttgtcaaattacagaaaaaagtttataagaccgcttttttatcattattaataaatattaacagattatcgcacttactgtagcaagacaacaagtggaaacaacggaagaaagaatatctttggttagaaaggcacttgatgaattctatacgttctacagtaatgaaaaataattatcatggcgcatattattgcaagtgaaaatgttgtttctacgatttccagtattagttttattatcttcagttaagttttaattgtagttcattttttaatagatgaaaaacggttctgtatgaatagggcttttcaacgcttctcatttatttcgggcacttgtcatatgtcgtatattaatattatacacagattatacaacatacgacaagttaagatatctatgtcatacgtttttggtttgtatcattggtatatacgaataacgtatgttccatgggtgttcgggaacgattaacttaaattaaaataagtgtaaaaacaacaacttgtcaataatatatttatttgtgtcggtaaaatagcgtgaatatttctcgaaagagagtttgttattcttttgcgagtatggtggtgtgtccgcgccggatggttgctgtggctatactgaaagaaaccacaaacgctaatatgtttgtgtttctaccatctggccagaaaggtgataaattatttagatctggcgtttaaaagttgaaacatttctgcagttttaagaaacgtcttcgaatgcatttccaaagtgagttattgacataaggtctgataaggtaattaatttatggggaatttagtttgttaaactgaacacaccaaaaacatctggttagggatacatttcgtttcgtaaaacttaacgggcccttcttagcatctggtttgtatattaaatgtgaattttgtatgacccatattatttcgttttgagaaaagaaagttaatatttaaaattagcaattaaaaaaataataataaatgaagcgtgtcgctatacgtatgacgtagatatattaatattagaggactcatgacagaatctgacagaaatgacaatcgatgaaaagcccaattaattgacaaatgatgacagatgacggttatgattgtattgcctttcaggattgccaactgttttcctgttaagtttatgtttatgtggacaatcctttgaactttagacgttccatactgatatggtcaacgtttttacagtttccggtaaaaatatcgcttataacgagaccataaactttttaaatccaaaaatgaaaaaacatcgttgttgtgtatcaaattgtcaaaatacaacgaatgaattgtgttgcacaactgatatatgcatataacaattcaagaaagcactgagttgcctacatttggcgctactgagctgaataacctgaaaaattgattttaaaaggccttaaatacaatgtttttaaaaatgtataaacattttcaatttctttgaaacacgaaaatgcagcagctgcataatgctctggttaaatcggagagtgcaggaagagtctataccggtttcggaggtttttccccctcatcagtagtcccatattctattctctccgaattctccacgtatcatactttgggccgttccgaattgcaaagaaagatgtcacggatgaactagagccatctaccgaaaaacaaagtaagttatcaatcgaagtagcacagaaaacgacaataaatgtcgttcccataccaccagattgacaacaggtggatactttctttggttacatctcctgagatttttaaaatttataaatcaaacagtatgccgacagattctctcatcttaatttcctcggcatcctgtttgatttggcagtctgaactgcctgcctgtcgtgacgatactgccgagaccacaacactattatcatcattatgtttgcggttttacaatatggctagaaaaggcaataaattactacatgtggcgtttttaaatttaagaacctttctgtagttttaagaaacgtcttcgaatgcatttccaaagtgcgttattgacataaggtctgataaggtaattaatttatggggaattcagtttgttaaactgaacacaccaaaaacatattatggttagggacacatttcgttttgtaaaacttcttagcatctggtttgtatattaaatgtgaattttaaatgaccgttttaagaaaagttattaaaaaataaaattagctaaaagagtaattaaagcgtgtctccacaattgcaacgaatgaactccattcttgcattttttgagaaaagtagagcgaaccatataacgaccatatgcgcatggcaatatgtcttttataggaataaaatcgacaattttcatattgtctaattgaaatcagttattgatcttgttgctagtgagacaattgttaaggtggttgctgactcttgctgattattataaagcatttttgacaacttacataaaaatatgtaaaaagcatttttacaatgtgatgagaaaatatttatataccaattgtttctttgtaaataaaagttcttaatttttgaatttaattgagtttttaaatgttaggtttgaggaaattgatataaaaaatttctaatacccgctttcttacaatttacaaatgtgaaatattttgtttaatacgttctttttttctatatagttacaatgatgtactggagttattattttttagatatttaggcgaactttgtatttttactaggtcccgttggaagctggatgctttcgactggattcattaataataaaggtgtaaaa

SEQ ID NO: 194 - DNA, 1097 bp, Diabrotica virgifera
tgactaccgatgaaaagcccctatacaaccggtactagaaattcacaaatgaaaaggaaaaaaacgtaccagatttcgtttttctaaatagtttttttttgaaaacttttcaaattcaaaaaacgaaaaatttttaaatcgatttttctagaaaacggtgtatcctaccgacttaaagcaagaggacctcttagtattataatacctcacaatttaataatccagtgtcaaaaatgataataagttaaagacaaaaagttatgtgataaaataaccgttgccctatggaggcgtatcagggttcgttttctaaaaagtttttttttaaacttttttggaacctggattatccgtctctcctttaaccgtcagggtccgtacatacgttttattgactacataagcaaagttgtgatgaggatgcaaacggctatcgattgctgacacacattaaaatcgttgaaatggcaacagtggcggacgaagcagattcagaaactgatacaagcttggaatttgacggtggccatgtcgatgatgctattgcaattgacaatgatttaaagaagctagatttgagtaaagaagcacatgcaacaattcatcgagtaatattctcaacaagaagaagccaatcaggtaggtggcatgatcatgtggcgacacgctttaattactatttttgctaattttattttttaataacttttctcaaaacgtaataatatgggtcatataaaattcacatttaatatacaaaccagatgctaagaagggccgttaatttttacgaaacgaaatgtatccctaaccgtatgtttttggtgtgttcagtttaacaaactgaattccccataaattaattaccttatcagaccttatgtcaataattcaacttttaaacgccaaatctaaataatttatcgcctttctggccagatggtagaaacacaaacatattagcgtttgtggtttttttcagtatagtcacagcgggcacccgatgcagtcacaccagcacactcgcaaagaataacaaaccctctttcgagaaatattcacgctattttaccgacacaaataaatatattattgac

SEQ ID NO: 195 - DNA, 820 bp, Diabrotica virgifera
tctgtattatttacatttatcatcttacgggtagcataccttaatggacttaactatcaatcctgcggtaagtactccttcgcaatatcctcttctctccgatttgggactactgatgaggggggaaagacctccgaaaccggtatagactcttcctgcactctccgatttaccagagtattatgcagctgctgcattttcgtgttgcaaagagttgaaaatgtttatacattttaattcatttactcttttgttgagtactaaggaatctttcttgttggaacttttaccacgctgagcagatgagttgtgaattatttaaaattctctcatcttaatttcctcggcatcctgtatgatttataatttttgaaaatctcgggaggttgtaaccaaagaaagtattccacctgttgtcaatctggtggtatgggaacgatatttattgtcgttttctgtgctacttcgattgataacttactttgtttttcggtagatggctctagttcatccgtgacatttctttctttgcaattcggaaaggcccaaaatatgatacctggggaaatcggagagaagaggatatggaactactgatgagggggaaaagatctccgaaaccgatatagactcctcctgcactctccgatttaaccagagtattatgcagctgctgcattttcatgttgcaaagaaatttaaaatgtttatacagttttgatttaattcccgtaatggaaatgatgataatgtgccaagatccagcagggcctcgatttttgacctttcgcttcgttatcgaacgcattcgcttcgtatc

SEQ ID NO: 196 - DNA, 857 bp, Diabrotica virgifera
  SmartBlast Evalue=1E-57; Info=Calumenin n=2 Tax=Culicini RepID= B0W572_CULQU
agagggtacataataaggagttaagtgataaagaacacttggaaaatgggcaccacaatcctgaatatgaccacgaagctttcttgggagcagaagaagcaaaaactttcgatcaactgccccctgaagaaagcaaaaggagactgggaataatagcagacaaaattgatgtcaacaatgatggatttatcaacagagaagaactcaaggattggatcagatttactcagaaacgatacattactgaggatgttgacagacagtggaaacaacaaaaccctgatgataagccaaccctaccatgggagaggtaccaaacattggtttatggttttctagaaaatatggatccagcagaaatagaaaatgatagcacaggtttctcctacaaaaagatgatggccagagatcagaggcgttggaagactgcagacagagatcaagatggtgaattaagcaaagaagaattcgctgctttcttacatcctgaagaaaacgactatatgcgtgatctggttgtacaagaaactaccaccgaaagattaacctctatagtgacagaagtagtaactgaaatttcacaaacaatatcctctatagtattcggtactactgaagaaccaaagaaaacagataaatcagaggaacctgtcacagaaagttcgccagaacctacaaaacaaccggaaattcctgaaaccccaactgaaaagacacaagaagttactgaagtcccaatagagaagttaacagaacctgctcaacatgaaacaattgctcatgacgaaactgaagaaccagaagaaccagaagaccatcagacttcgaccgttgccagtaaagactcatctacagcg

SEQ ID NO: 197 - DNA, 766 bp, Diabrotica virgifera
aatccaaacaatctacctgccgggttaatccaaaaaatcttaagacaatttatgaattgtgttggataaacttttggcaagatgtatatagcgacacccttcatttattatttttttaactgctaattttaaatattaactttcttttctcaaaacgaaataatgtgtgtcatataaaattcacatttaatatacaaaccagatgctaagaaggacccgttaagttttacgaaacgaaatgtatacctaaccagatgtttttggtgtgttcagtttaacaaactgaattcccataaattaattacctattcaaaccttatgtcaataactcactttggaaatgcattcgaagacgtttcttaaaactgcagaaatgtttcaacttttaaacgccagatctaaataatttatcgcctttctggccagatggtagaaacacaaacatattagcgtttgtggttttttcagccccggcagtcgatttacaaccgcccgtcgggagtcacaccccagcgggcgtcgggataggtcaacaacacactcttacgagatataagcaaaatacgtctttttaccgattaaaataaatatattattgaaagtttgttgtgtttacatttattttaattttagttaatcgttcccaaaccattcggaacagacgtatcggaggagtttggcagctgccactgtgacaggataattttatgaatttttcctgtgacagtttgactccgatacgtctaaaagtgggaacctatcaaca

SEQ ID NO: 198 - DNA, 648 bp, Diabrotica virgifera
aatccaaacaatctacctgccgggttaatccaaaaaatcttaagacaatttatgaattgtgttggataaacttttggcaagatgtatatagcgacacccttcatttattatttttttaactgctaattttaaatattaactttcttttctcaaaacgaaataatgtgtgtcatataaaattcacatttaatatacaaaccagatgctaagaaggacccgttaagttttacgaaacgaaatgtatacctaaccagatgtttttggtgtgttcagtttaacaaactgaattccccataaattaattaccttatcagaccttatgtcaataacgcactttggaaatgcattcgaagacgtttcttaaaactacagaaaggttctgagcttttaaaacgccagatgtagtaatttatcaccttttctagccatattgtaaaaccgcaaacatgatgatcgtgttgtggtctctgcagtatcgtcacggcaggcaggcagctcagacgccccttcgctgccctcaaacaataaacaaccctcttacgagatgaataagcacgccttttaaccaaaaataaaataaatattactgtttattgtttacacttttttttaatgattccgttaacccacacccacaccatcggaaca

SEQ ID NO: 199 - DNA, 645 bp, Diabrotica virgifera
aatccaaacaatctacctgccgggttaatccaaaaaatcttaagacaatttatgaattgtgttggataaacttttggcaagatgtatatagcgacacccttcatttattatttttttaactgctaattttaaatattaactttcttttctcaaaacgaaataatgtgtgtcatataaaattcacatttaatatacaaaccagatgctaagaaggacccgttaagttttacgaaacgaaatgtatacctaaccagatgtttttggtgtgttcagtttaacaaactgaattccccataaattaattaccttatcagaccttatgtcaacgcactttggaaatgcattcgaagacgtttcttaaaactacagaaaggttctgagcttttaaaacgccagatgtagtaatttatcaccttttctagccatattgtaaaaccgcaaacatgatgatcgtgttgtggtctctgcagtatcgtcacggcaggcaggcagctcagacgccccttcgctgccctcaaacaataaacaaccctcttacgagatgaataagcacgccttttaaccaaaaataaaataaatattactgtttattgtttacacttttttttaatgattccgttaacccacacccacaccatcggaaca

SEQ ID NO: 200 - DNA, 564 bp, Diabrotica virgifera
aatccaaacaatctacctgccgggttaatccaaaaaatcttaagacaatttatgaattgtgttggataaacttttggcaagatgtatatagcgacacccttcatttattatttttttaactgctaattttaaatattaactttcttttctcaaaacgaaataatgtgtgtcatataaaattcacatttaatatacaaaccagatgctaagaaggacccgttaagttttacgaaacgaaatgtatacctaaccagatgtttttggtgtgttcagtttaacaaactgaattccccataaattaattaccttatcagaccttatgtcaataacgcactttggaaatgcattcgaagacgtttcttaaaactacagaaaggttctgagcttttaaaacgccagatgtagtaatttattgccttttctagccatattgtaaaaccgcaaacatgatgaccgtgttgtggtctctgcagtatcgtcacaggcaggcaggcagttcagacgcaccctcgctgccccaaataataaacaaccctctttacgatatgaataagcacgcatttt

SEQ ID NO: 201 - DNA, 561 bp, Diabrotica virgifera
aatccaaacaatctacctgccgggttaatccaaaaaatcttaagacaatttatgaattgtgttggataaacttttggcaagatgtatatagcgacacccttcatttattatttttttaactgctaattttaaatattaactttcttttctcaaaacgaaataatgtgtgtcatataaaattcacatttaatatacaaaccagatgctaagaaggacccgttaagttttacgaaacgaaatgtatacctaaccagatgtttttggtgtgttcagtttaacaaactgaattccccataaattaattaccttatcagaccttatgtcaacgcactttggaaatgcattcgaagacgtttcttaaaactacagaaaggttctgagcttttaaaacgccagatgtagtaatttattgccttttctagccatattgtaaaaccgcaaacatgatgaccgtgttgtggtctctgcagtatcgtcacaggcaggcaggcagttcagacgcaccctcgctgccccaaataataaacaaccctctttacgatatgaataagcacgcatttt

SEQ ID NO: 202 - DNA, 597 bp, Diabrotica virgifera
aatccaaacaatctacctgccgggttaatccaaaaaatcttaagacaatttatgaattgtgttggataaacttttggcaagatgtatatagcgacacccttcatttattatttttttaactgctaattttaaatattaactttcttttctcaaaacgaaataatgtgtgtcatataaaattcacatttaatatacaaaccagatgctaagaaggacccgttaagttttacgaaacgaaatgtatacctaaccagatgtttttggtgtgttcagtttaacaaactgaattccccataaattaattaccttatcagaccttatgtcaataacgcactttggaaatgcattcgaagacgtttccttaaaactacagaaaggttctgagcttttaaaacgccagatgcagtaatttattgccttttctagcaatattgtaaaaccgcaaacatgatgataataaacttactaaggaagtaaaacttcacttgtaggtagatggtatataaatttattaaaatttttataaaaagatcccaattggattaaagtgggttcatcactagtacaaaaacacaaacgttttcggaccaatcagtc

SEQ ID NO: 203 - DNA, 594 bp, Diabrotica virgifera
aatccaaacaatctacctgccgggttaatccaaaaaatcttaagacaatttatgaattgtgttggataaacttttggcaagatgtatatagcgacacccttcatttattatttttttaactgctaattttaaatattaactttcttttctcaaaacgaaataatgtgtgtcatataaaattcacatttaatatacaaaccagatgctaagaaggacccgttaagttttacgaaacgaaatgtatacctaaccagatgtttttggtgtgttcagtttaacaaactgaattccccataaattaattaccttatcagaccttatgtcaacgcactttggaaatgcattcgaagacgtttccttaaaactacagaaaggttctgagcttttaaaacgccagatgcagtaatttattgccttttctagcaatattgtaaaaccgcaaacatgatgataataaacttactaaggaagtaaaacttcacttgtaggtagatggtatataaatttattaaaatttttataaaaagatcccaattggattaaagtgggttcatcactagtacaaaaacacaaacgttttcggaccaatcagtc

SEQ ID NO: 204 - DNA, 4573 bp, Diabrotica virgifera
  SmartBlast Evalue=1E-102; Info=Chloride intracellular channel isoform 1 n=1 Tax=Bombyx mori RepID=Q1HPS8_BOMMO
ccttcatgacgttttcgacacggttccactcctcactttccaactggcatcgctgcaaaacttcgccaactgagtcataagatcagttgaatttgtgcgttgagtgagtttcaacaaagtttttcagtgccttttcccggtagaaattttcaacaatggccgacgaagttgctgaaaatggtcacgcagaaaatggagatgtaccagaaatcgagcttatcattagggcctcgacaatagacggtagacgtaaaggagcctgcctattctgtcaggaatacttcatggagttgtacttattggccgaactgaaaactattagtctgaaggtgacgacagtagacatgcagaaacctcctcctgatttccgtacgaattttgaagcgacgcccccaccgatcctgatagacagagggatggccatcttggaaaacgagaaaatcgaaagacatatcatgaagaacgtgccaggaggtcataatttatttgtacaggacaaagaagtagcaacattgattgaaaatctctacacaaagttcaaaacgtacgttagaaagtttgaatcgactgacaccacagaaaataggcaacctctatattcgcatttggagaggatcaacgacttcatggcaaagagaggcacgagatttttaactggtgacactatgtcctgttttgactgtgaattgatgcctagactgcaacacatccgcataggagccaaagccttccgcaaattcgagatcccctcaacattcaaagctttgtggaactacatggcgaacatgtacgaactcgaagccttcatccagagctgcccggccgatcaagacatcatcagtcatatcaaaaaccaattgggccttaagacaaccgcgcggatagaactggaaacgcctgtatacacgacagccattccggtgctatctgaatcgtaaataataacttaaaataaagaattatagtcggtttcgtgatattttgataatataatatgggacgtcatccagaatacgttccggtgaagatagccgcaaatgatgaatggcataataaaatattggtgtttggcagtgttgccaaacacaattatttcgttctgtggccatcatttgcagctatcttcaccggaacgtattctggaagatgtctctacatgtataggcttgcttaaattggacaaacttgatgtatcaaatataaatcatgtttttaaatgacatatatgtctgatagatagtgccttgtattgcttattcaaacttaatccttttgggtcactaaaggactgattatacacagaaacaaataaattagtacatgtaaactaactacatgacgaaactatttattcataatatttttccgatattctatgtgttgcttgattagagttataatacagtaatcaaatttgatgattttgatgtgccatccatacttagtattactggagttttcattttttgacacatgtcaaacgtcacgactgtcaaacatcaatttttgacgcatgtcaaacgtcacgactgtcaaacatcaatttttgacagccattttcaaagagttttcaaggtcaacttaaaaatgttggaaattactacttttgtacgtgatcactactatttctgctgctattatactatcctgtgcttacatggcttgattctaaatgtaactgaacaatattcgaacaattttatatcttatagctgaattctttcgagccgctgtttcaaatattacaaaaccgacaaaccgtttatttttatatgcattttcgacttcgacctagtcaggggaagtaatcagtaagtttcttccaataagagtcagctaccaccatagcagttttgtcaaattacagaaaaaagtttataagaccgcttttttatcattattaataaatattaacagattatcgcacttactgtagcaagacaacaagtggaaacaacggaagaaagaatatctttggttagaaaggcacttgatgaattctatacgttctacagtaatgaaaaataattatcatggcgcatattattgcaagtgaaaatgttgtttctacgatttccagtattagttttattatcttcagttaagttttaattgtagttcattttttaatagatgaaaaacggttctgtatgaatagggcttttcaacgcttctcatttatttcgggcacttgtcatatgtcgtatattaatattatacacagattatacaacatacgacaagttaagatatctatgtcatacgtttttggtttgtatcattggtatatacgaataacgtatgttccatgggtgttcgggaacgattaacttaaattaaaataagtgtaaaaacaacaacttgtcaataatatatttatttgtgtcggtaaaatagcgtgaatatttctcgaaagagagtttgttattcttttgcgagtatggtggtgtgtccgcgccggatggttgctgtggctatactgaaagaaaccacaaacgctaatatgtttgtgtttctaccatctggccagaaaggtgataaattatttagatctggcgtttaaaagttgaaacatttctgcagttttaagaaacgtcttcgaatgcatttccaaagtgagttattgacataaggtctgataaggtaattaatttatggggaatttagtttgttaaactgaacacaccaaaaacatctggttagggatacatttcgtttcgtaaaacttaacgggcccttcttagcatctggtttgtatattaaatgtgaattttgtatgacccatattatttcgttttgagaaaagaaagttaatatttaaaattagcaattaaaaaaataataataaatgaagcgtgtcgctatacgtatgacgtagatatattaatattagaggactcatgacagaatctgacagaaatgacaatcgatgaaaagcccaattaattgacaaatgatgacagatgacggttatgattgtattgcctttcaggattgccaactgttttcctgttaagtttatgtttatgtggacaatcctttgaactttagacgttccatactgatatggtcaacgtttttacagtttccggtaaaaatatcgcttataacgagaccataaactttttaaatccaaaaatgaaaaaacatcgttgttgtgtatcaaattgtcaaaatacaacgaatgaattgtgttgcacaactgatatatgcatataacaatttaagaaaggactgtgagttgtctacatttggcgccactgagctgaataacctgaaaaatttattttaaatgctcttaaatacaatgtttttgttccgacggtaggttgcggaatcaattaaaaataagtgtaaacaatgaacagtaatatatttatttataatatttttatattataatattttattattataatatttttatattataaacaagcgtgcttcgtttattatctcgtaagggttttgttgttttagcgagggtgtgtctgaaccgcgcgcctgctgtgacgatactgcgagaccaccacactattatatcaccatgcttgcggttttacaatatggctagaaaggcaatagattacgacatctgcgttttaaaagatgagaacctttctgtattttaagaagttgacataaagagcgtggcaatctggcctcgaaatctattagtgtttccttgaaaaaaacattaattttatacaatctgcttagggatacattttgtttcttaaacttaacggtccttgttagcatatggtttgtatattaaatgtgaattttaaatgactaatgttatttcgttttgagaaaagttattgaaaatttagcaaaaatagtaattaaagcgtatcgctatattatatgcatttaacaattcaagaaagaactgtgagttgcctacatttggccccactgaactgaataacctaaaaaatttattttaaaagctcttaaatacaatttttttaattgaatataaatacttaactgacaaattccatataaacagttgctttgtttcaattacaactttctattgcaaagttttcaataatgacttttgaaataatagacataaagcagaagcggtaaaagtgctcacaatacaaggttgattcagaccaacagtcagatcaccgttgagtcaaggggcaacccattcacacactcagtccgggcagatcaccgtcagtctacttcggcatttagatcgatcaagatgcaatattatagtcttgtagagttcttagtattgtgttccgatctgcgaaattgagtaaatggaattaattaaaatataagtgtaaacaatgaacagtaatatttattttatttttggttaaagcgagtgcttattcatctcgtaagagggttgtttattgttttggggcagcgagggtgcgcctgaactgcctccctgccgtgacgatactgccgagaccacaacactattatcatcatcatgcggttttacaatatggctagaaaggaaatagattacgacatctgcgttttaaaagctcagaacctttctgtagttttaagaaacgtctttgaatgcatt

SEQ ID NO: 205 - DNA, 554 bp, Diabrotica virgifera
aatccaaacaatctacctgccgggttaatccaaaaaatcttaagacaatttatgaattgtgttggataaacttttggcaagatgtatatagcgacacccttcatttattatttttttaactgctaattttaaatattaactttcttttctcaaaacgaaataatgtgtgtcatataaaattcacatttaatatacaaaccagatgctaagaaggacccgttaagttttacgaaacgaaatgtatacctaaccagatgtttttggtgtgttcagtttaacaaactgaattccccataaattaattaccttatcagaccttatgtcaataacgcactttggaaatgcattcgaagacgtttcttaaaactacagaaaggttctgagcttttaaaacgccagatgtagtaatttatcaccttttctagccatattgtaaaaccacaaaatgatgaccgtgttgtggtctctgcattatcgtcacagcaggcaggcagttcagacgcaccctcgctgctccaaaacaataaacaaccctcttacgagatgcataagca

SEQ ID NO: 206 - DNA, 551 bp, Diabrotica virgifera
aatccaaacaatctacctgccgggttaatccaaaaaatcttaagacaatttatgaattgtgttggataaacttttggcaagatgtatatagcgacacccttcatttattatttttttaactgctaattttaaatattaactttcttttctcaaaacgaaataatgtgtgtcatataaaattcacatttaatatacaaaccagatgctaagaaggacccgttaagttttacgaaacgaaatgtatacctaaccagatgtttttggtgtgttcagtttaacaaactgaattccccataaattaattaccttatcagaccttatgtcaacgcactttggaaatgcattcgaagacgtttcttaaaactacagaaaggttctgagcttttaaaacgccagatgtagtaatttatcaccttttctagccatattgtaaaaccacaaaatgatgaccgtgttgtggtctctgcattatcgtcacagcaggcaggcagttcagacgcaccctcgctgctccaaaacaataaacaaccctcttacgagatgcataagca

SEQ ID NO: 207 - DNA, 536 bp, Diabrotica virgifera
aatccaaacaatctacctgccgggttaatccaaaaaatcttaagacaatttatgaattgtgttggataaacttttggcaagatgtatatagcgacacccttcatttattatttttttaactgctaattttaaatattaactttcttttctcaaaacgaaataatgtgtgtcatataaaattcacatttaatatacaaaccagatgctaagaaggacccgttaagttttacgaaacgaaatgtatacctaaccagatgtttttggtgtgttcagtttaacaaactgaattccccataaattaattaccttatcagaccttatgtcaataattcaacttttaaacgccaaatctaaataatttatcgcctttctggccagatggtagaaacacaaacatattagcgtttgtggtttttttcagtatagtcacagcgggcacccgatgcagtcacaccagcacactcgcaaagaataacaaaccctctttcgagaaatattcacgctattttaccgacacaaataaatatattattgac

SEQ ID NO: 208 - DNA, 4639 bp, Diabrotica virgifera
  SmartBlast Evalue=0; Info=Long-chain-fatty-acid--CoA ligase 3 n= 1 Tax=Camponotus floridanus RepID=E2AYR1_9HYME
aattggtcataaaatatccgaagcagcaacagaaaataaaaatcttggagtgcagtatgcgaaagtcaacagtaaagcaaatcaacgagataaatgaacaacagaatagcaataaaagctgcctgatcagccccactagtcttttttgcaatttctaagtaaaaagttagttccgctttcatttttattacctataatatttacatttattgtctataaggataatttcttacaaaaagcagttttttccaataaaaccggcaaaaaatatagtatctaacgtctaactttgtaaaaaaacctattcctggcgtctgcacatttgccgcttgagtaaataactatttttatccttaagtacatgtctttaatgaaatagatgtttagaccgatcattgacaaattgacaattacctacatcggtgcaagaacagtcttttactaaaacttaacactttataacaaaaagaaaaacaacaataacaaatatgcgcaaaaaatctcataatattgctactaaaataccacaaccgtctataagttcattccaaccagcctcacagaagacttacagtggaattcttctctcaaaatacacaaaaacagtatttttcgatatttttgttgttttctgtaatatttgtatctttatttattgcttacgtctcctgtattgcttgttgaaagacgctttgttgtgaaaaagttgtcccttgtgaaacaattcatgttttctgtttattaaatgaccttaacttttacacagacgaatagcaccgttaaaatattattctcgaagtaaaactagttgaaaattgcgaaaaataagagaaacatgaatttattacccctaaaggaaccacagtgatgctaacaataatattttaagagtatttttgccttgaaatattgaagagataacaggatttttaataccacattccgtctgtgacattttaccaaaaaaaaaactgtatagtatcacttttcatgtgcccgcacgattatagtctaactctcctataaaaaagcaactatacaacgattgataagagaatttttcacatctaattcagattaatgatggtatatagtctcaagaagatgaaaaattagcaattgaaagtggcgcagtcaatctacacgatttatcatcaagaaaatcatgtctaaacacaatattgagcaaattaatcacaataaaacttcttccgtacaaaaaattagcaaaattcttcatttcatatccactcactccagaatttgatggaaaaattcgttcagagactcaactttaaaacatgtgttgaaagcctggcctaaaaattaatatcattggcggtaaaagtgtcatttatgcagaatctgtgtaattttcactataagcaccactcccgcaatattttgttgacgttggaggtaaaattgagcgatatctaaagcaataattgtaaaattatttgtgaaaaacttgctttcttagactcaaatggtacaatgcctggcctaaacttgctagagttgcaggaattggaagaataaccgcagtaaggaataaagttggagtgacactgactgcataatgtgtttcaaatgttcttttagggagtccgttgaagaaattggaaaatgcctgaccaaaaattacaattattagttgtagaagtattagttgtgcataatttctttaggtatcactaggaacataattcttgtactatgtggataaagttggagaggaaattcagtcgaaaaaacacattaaagaaaaatatagacaaaaaaaccgtgaattttttcaagtactacctcttaagcatctatctccggcaaaaatacccttaaacctaaaaataaacatttgttcttatatacattatacgcccaagagctaatatataaataaaataatacataaaatcttatttgatagcttcgttaaatatttacagaaaaaattacaaatactttttacaaattgtgctataatacacgcttagaaatcatacccttggaatcaggcgggatttcaacgaaaaaagcgaaatatacgcaaacatatttcttctttcagttaattgtagtaaaattagcaaaataaaaaaaaattgtagtaaaaatgtagtttatgtctttaatatcgttttgttctcaaagtatttccaaagttctacaataaagtcctgcctgattccttgtacacccatactagattaatcataagaaaattaaaggtgttgtaactttcaggaggcgtacattctgttgatttcgtgcttatatctctcttggatgtctttcctctttagtttaaaagctgccgttacgagccccatgtcaggggaccatacctcagtcaccaacttaatagctgctggaatttcaaatttggccagtttacttctttttccatgctctgctaattcttgcacaaccgccttctccacagtatcatccacgcacagctcctcgaacgatttatcgttgactcctttcttggcggcaagatctttgagttgctgttgatttggcacgaccagcgcgacacagaagtccttactcgattctccgtacacgcaaatgttatctactaatggacaagtcttcatctcggcctcgactttaccgagggacacgtattcgcctgcttgcagttttaccaagtctttcttacgatctatgattttgagtacaccatcttcgtgaatttcaccaatatcaccggttctaaaccatctggttccgtcttgctctaagaattcctctttcgacttctctggaagcttgtaatatcctgcactgatgttgtctccacccaaaattatttctccacgaggataaggcttatccgtaatgcgatagttgccttcttcccaacttattaacttaatatcacaaatcgtacagggggcacctactcttccgaacgacatatcaaacagatcttgtacagctgcgcaagaagttgattctgttaaaccatatccttgtattattaccacacacatgcatattcctatttgttcgtgagtctcagctgacaatggagcaccgccagatatcatcagtctcatgtttcctccaacaatttttgtgatcggggaaaatacaattttgtctatcaaaggagttgaatatcctcgccttttccatgctgatttgtactcatatgcaaatttgaatatcacttttttaagattgctgcctttgctgactttttcttggatagtttttgatattctgtctagaatgagtggtacacttgtcaatactgtcggacataatatcgtagcatctcctttggtcccccttttgattttactggacgtatcagtcatagtcaatgcacccgaatatccaataggaactccagcgaacagacaaacgctctccaccaacaactcgaagacgtgagccaacggtaagaaaccgatcattatatcattttcataaattggtgttgaatcacagaatcctttcaaagtagcgattaagttcttttgaagcagtataacacctttgggaacgcctgtagatccgctcgtgtacatgatgatggctatgtcgtctgctttagggggttgagcctctatcttagacgaagctcctttctccaaaacgtcttggaacttcaaaatagaaacaccatccttaaaaccatcggtactttccaagctcttcaattggtcttccatataaatcaagcactgcacacgtggcgtcagctgcaagatctttttaaacttcggtaacagctcgaaactggtgataagagtggtcacttcagtttcgttgatagcgtgagcgatcgcttcgtcacccaaggttgcgtagatggtgaccaaagggatgttttgcttgaagattccatgagcagcgatcatccattcggctctggtttcagcgaagatggcgacatttttgccgggatcgtttcccaattcgcggagtccacggccaaaattggtggctaggatgttgacttcggagaaagtcttccagcggtagtctcccagatcgaacttcttaaaaactcttccgttaggctgaacctcatccatctcggccaatatctgcctggtgcccaaacatcttttgttggcgtattttttgctgcagtattcgaacattttggccatggtgtcgatcttctcgcgaacgagagtgatatggtgctcttttggggctactgtggatcgataagtcaccgatttcgcatcttcttgtatttgtttcgcctttatcttttttagtcggcgtaacccttacgctgttagcgttattgttttccttcatgtcaaggacaaaatctttagaggggtccttttcgacgtcgatgataacggcctttatgcttctggacagttggcgtaaccgccatggcctctggaggattatgtatacggggaacgtgaggacgtcgtacacgaatgctagggccttcagcgcgcctatcgctatggtgaacccaacgccatccatatccccgaaatacacagtcatgatgctatcctcctggccaaaaaataaaatacaaaaacaagaaacctaaaaaataaatcgaacacaaaaacacaaattatcacaatcaacacgcactaatcagttgagtatcacaaggaagtgtgttcactttgac

SEQ ID NO: 209 - DNA, 4639 bp, Diabrotica virgifera
  SmartBlast Evalue=0; Info=Long-chain-fatty-acid--CoA ligase 3 n= 1 Tax=Camponotus floridanus RepID=E2AYR1_9HYME
aattggtcataaaatatccgaagcagcaacagaaaataaaaatcttggagtgcagtatgcgaaagtcaacagtaaagcaaatcaacgagataaatgaacaacagaatagcaataaaagctgcctgatcagccccactagtcttttttgcaatttctaagtaaaaagttagttccgctttcatttttattacctataatatttacatttattgtctataaggataatttcttacaaaaagcagttttttccaataaaaccggcaaaaaatatagtatctaacgtctaactttgtaaaaaaacctattcctggcgtctgcacatttgccgcttgagtaaataactatttttatccttaagtacatgtctttaatgaaatagatgtttagaccgatcattgacaaattgacaattacctacatcggtgcaagaacagtcttttactaaaacttaacactttataacaaaaagaaaaacaacaataacaaatatgcgcaaaaaatctcataatattgctactaaaataccacaaccgtctataagttcattccaaccagcctcacagaagacttacagtggaattcttctctcaaaatacacaaaaacagtatttttcgatatttttgttgttttctgtaatatttgtatctttatttattgcttacgtctcctgtattgcttgttgaaagacgctttgttgtgaaaaagttgtcccttgtgaaacaattcatgttttctgtttattaaatgaccttaacttttacacagacgaatagcaccgttaaaatattattctcgaagtaaaactagttgaaaattgcgaaaaataagagaaacatgaatttattacccctaaaggaaccacagtgatgctaacaataatattttaagagtatttttgccttgaaatattgaagagataacaggatttttaataccacattccgtctgtgacattttaccaaaaaaaaaactgtatagtatcacttttcatgtgcccgcacgattatagtctaactctcctataaaaaagcaactatacaacgattgataagagaatttttcacatctaattcagattaatgatggtatatagtctcaagaagatgaaaaattagcaattgaaagtggcgcagtcaatctacacgatttatcatcaagaaaatcatgtctaaacacaatattgagcaaattaatcacaataaaacttcttccgtacaaaaaattagcaaaattcttcatttcatatccactcactccagaatttgatggaaaaattcgttcagagactcaactttaaaacatgtgttgaaagcctggcctaaaaattaatatcattggcggtaaaagtgtcatttatgcagaatctgtgtaattttcactataagcaccactcccgcaatattttgttgacgttggaggtaaaattgagcgatatctaaagcaataattgtaaaattatttgtgaaaaacttgctttcttagactcaaatggtacaatgcctggcctaaacttgctagagttgcaggaattggaagaataaccgcagtaaggaataaagttggagtgacactgactgcataatgtgtttcaaatgttcttttagggagtccgttgaagaaattggaaaatgcctgaccaaaaattacaattattagttgtagaagtattagttgtgcataatttctttaggtatcactaggaacataattcttgtactatgtggataaagttggagaggaaattcagtcgaaaaaacacattaaagaaaaatatagacaaaaaaaccgtgaattttttcaagtactacctcttaagcatctatctccggcaaaaatacccttaaacctaaaaataaacatttgttcttatatacattatacgcccaagagctaatatataaataaaataatacataaaatcttatttgatagcttcgttaaatatttacagaaaaaattacaaatactttttacaaattgtgctataatacacgcttagaaatcatacccttggaatcaggcgggatttcaacgaaaaaagcgaaatatacgcaaacatatttcttctttcagttaattgtagtaaaattagcaaaataaaaaaaaattgtagtaaaaatgtagtttatgtctttaatatcgttttgttctcaaagtatttccaaagttctacaataaagtcctgcctgattccttgtacacccatactagattaatcataagaaaattaaaggtgttgtaactttcaggaggcgtacattctgttgatttcgtgcttatatctctcttggatgtctttcctctttagtttaaaagctgccgttacgagccccatgtcaggggaccatacctcagtcaccaacttaatagctgctggaatttcaaatttggccagtttacttctttttccatgctctgctaattcttgcacaaccgccttctccacagtatcatccacgcacagctcctcgaacgatttatcgttgactcctttcttggcggcaagatctttgagttgctgttgatttggcacgaccagcgcgacacagaagtccttactcgattctccgtacacgcaaatgttatctactaatggacaagtcttcatctcggcctcgactttaccgagggacacgtattcgcctgcttgcagttttaccaagtctttcttacgatctatgattttgagtacaccatcttcgtgaatttcaccaatatcaccggttctaaaccatctggttccgtcttgctctaagaattcctctttcgacttctctggaagcttgtaatatcctgcactgatgttgtctccacccaaaattatttctccacgaggataaggcttatccgtaatgcgatagttgccttcttcccaacttattaacttaatatcacaaatcgtacagggggcacctactcttccgaacgacatatcaaacagatcttgtacagctgcgcaagaagttgattctgttaaaccatatccttgtattattaccacacacatgcatattcctatttgttcgtgagtctcagctgacaatggagcaccgccagatatcatcagtctcatgtttcctccaacaatttttgtgatcggggaaaatacaattttgtctatcaaaggagttgaatatcctcgccttttccatgctgatttgtactcatatgcaaatttgaatatcacttttttaagattgctgcctttgctgactttttcttggatagtttttgatattctgtctagaatgagtggtacacttgtcaacactgttggacataaaatcgtagcatctcctttggttccccttttgattttactggatgtatcagtcatggtcaatgctcctgaatatccaataggcactccagcaaacagacaaacactttccaccaacaattcaaagacgtgagccaatggtaaaaagccgatcattatatcattttcataaataggtgttgaatcacagaatcctttcaaagtagcgattaagttcttttgaagcagtataacacctttgggaacacctgtagatccgctcgtgtacatgatgatggctatgtcgtctgctttagggggttgggcctctatcttagacgaagctcctttctccaaaacgtcctggaacttcaaaatagaaacaccatccttaaaaccatcggtgctttccaagctcttcaactggtcttccatataaatcaagcactgcacacgtggcgtcagctgcaagatctttttgaacttcggtaacagctcgaaactagtgatgagggtcgtcacttcagtttcgttgatagcgtgagcgatagcttcgtcacccaaagtggcgtagatggtgaccaacgggatgttttgtttgaagattccatgagcagcgatcatccattcagctctggtttctgcgaagatggcgacgtttttgccgggatcgttgccgagttcgcggagtccgcggccaaaattggtggctaggatgttgacttcggagaaggtcttccagcgatagtctcccagatcgaacttcttaaaaactcttccgttaggctgaacctcatccatctcggccaatatctgcctggtgcccaaacatcttttgttggcgtattttttgctgcagtattcgaacattttggccatggtgtcgatcttctcgcgaacgagagtgatatggtgctcttttggggctactgtggatcgataagtcaccgatttcgcatcttcttgtatttgtttcgcctttatcttttttagtcggcgtaacccttacgctgttagcgttattgttttccttcatgtcaaggacaaaatctttagaggggtccttttcgacgtcgatgataacggcctttatgcttctggacagttggcgtaaccgccatggcctctggaggattatgtatacggggaacgtgaggacgtcgtacacgaatgctagggccttcagcgcgcctatcgctatggtgaacccaacgccatccatatccccgaaatacacagtcatgatgctatcctcctggccaaaaaataaaatacaaaaacaagaaacctaaaaaataaatcgaacacaaaaacacaaattatcacaatcaacacgcactaatcagttgagtatcacaaggaagtgtgttcactttgac

SEQ ID NO: 210 - DNA, 2225 bp, Diabrotica virgifera
  SmartBlast Evalue=1E-47; Info=Vacuolar fusion protein MON1-like protein A n=2 Tax=Formicidae RepID=E2A1P7_9HYME
gggaaggtccgataagtacttagcatctccgccgatggcgccactatcgcaaaagaaatctactatcgtgtaatgcatttccttatatgagtccttatattagtcatacaactaatgtcaaaattttgaacacggcccaaaatagcgacaattctaccttatcagttattcgcggtgtgcaagtacttggaaagggaaacgagaaacgaccgtgcgcgagtcgcggagaaatattgcaactatcttaaataattcatattgtcaattgaaattgtcaaattgacgtatatttcataccttctgtcattgacgcagaaaaattatatattgctccacaatattgatatgatatgcaattattatataaaggtaaatttaattaattgtattttgcttgcagtactgcattttaataactgattttatttactacatacaattgtttacgtttgctaaacataacctgcatcttattttttcttcttattatttttttggactatggtcttgacaattatccagcaaccaggaccaatataattggccaatataattaaaagtgcgaaaaatgttgctgagctatgaaaccaggtgtcgctttgccggacttgcacggtcccaatagcatagataatttcaatgtaaagcgaataatctttaaattgtttttatttatttatatttgttagtagtcagtgttaccacccctagcccttatacaagctacaatatgcgtgggcatgcacctaatcaaattgtcaacattttgtggtaggttgctccactcttcaagagcagcttgtactagccgtgcggtgttttgtggattatcccggtgagctctaatgtttcttttaagcgtataccacaaatgctctatagggttaaggtcgggtgagtaagcaggccattccagaccagtgttatcatttttctttaagtatgtggagatgcattatcatacgtggaaattaaattttcctcttcagagcttaactccggttctagaacccaatcaacatacctgcgaactcctgtctccttagattcgatgctagcgtattcctctacggcctacggtcatgtttcttacttatccgaagactgtcaagtgtgtttgttacttctaacagtggaaagggatgtattttttactttgagtgaagcgaaacagaaaatcgtagaaaaattaagaagaaacaactgcttggaatccatcaacgaatcactggcagctccgggatatagttgtgcgagtgctggttttgtagagatacattatttgtataaatgtaagtccactgcccagttctatcaacctgttttaagccccccttatactcaagcgaagatctatctgactgaactttacaagggagctcatcaaagactgcataattctaccaaaccacttaaacttatgtttgaacggagttcgagggaggcgattcttgcctgggacactaaggggtttgaattgttcgttgtttttgagcctttgatcgatactcgttagcgattctcctggttggtaggcttttaaattggattaaaaaacaagaagataaactatttcacctaaatgcacctactttttaaatgaaggtacctgttctcacttattttaacctttgtcatgggcaaattataactcacacattaaacaaaagaatatttttatggacaccatcgaaatggtgagaatttgtgaattcttttgagtttgcctgtggattctatagtccacaatagatctctatcccatcattgtacaaaaagtggtgaattctttttagaattcgcccttataataatataacatagtacattttgggaacatagaaaatataataaaattgttttaaatgtatgtaaaatacaaatattgatattatttctagctttgaattaaagcgaatgtaaaaaactagcatacgaaatcaaacagtatttattttaaagcaatttaatcatcaatacataaaaattaaagaaaaccatgaaatcttgaaatcacaaattgaaactatttgtttaaagtcaattcgcggtgtgcaagtacttggagggggatacgagaaacgatcgagcgcgaatagcggagaaatattgcaactttcttaaataattcatattgtcaattgaaattgtcaaattgacatatgtttcatacctactgtcattgaagaagataaaatatatattgctccacaatattgatatga

SEQ ID NO: 211 - DNA, 2192 bp, Diabrotica virgifera
gacctctatttggcgcctagactataccttattgtaaatgtttcagtattgtaataaaaaattacaaattaaatacctatttggaaaatgtacctacctagctaatctagctacttacctacctaggtaatgctttgatttaccaacaaaaatctccatctaatatattgcttttttagtctatattttattgtattttaattccacaagaatcaaacttatttgattaaactaagagaataaacaactgtcaaaaaattttaaaacgtttagatgctatatcttcccacttctttcacgtgtctcggtagttaaattctgcgtggggtgagttcaaaataatctaacaacctgataggcgcaggttcaattcccaatgcaaattttatttttttttatacattttatgattgtaagtatatttattatatttttttttcagaaaatacgatttagttaaaattttctcaacaattattgttcagaaatcatttctttgtttcatgtttcaatgtgtttgcgtgtgttttattcttttatttttttaatttttggtattgttttaataaaaatttttggaaagtagtaagtattaaaattagtttaatatttaaataaaatataaataaactgtttaaagtatattgatttcgttgaaatcatataatagaagtataccttcttacgtgcgtacaaagtacacaaaaattcttttttttatatctctcacgcgaagcaaaagatcgaaaattcacccctcttgtggattcgcaataggccgcgcttaaattttaaatttcagtcgaccatctcaaaaaatgtgaaccatcaatctccatgactgtccaaaatttcaaatctgtatttattttgatagtagaaatattggggtttcttcaccttagatgagacacactttaagtgtaatatactttttggaatcagagttttagtatctttcatagtatgtcacatgacaccctttgctatttaaaaaagttgagagtgtgactgtcacccgatgggggtacatcgaaatgctgaaacgttgataccattagatattagaacaagcttaaacatcgacatgttccagcgattatgttttatctttgcaaaaacgagttgacagagaggtacgattttatcatctcactgtacgaacaatggatatgaaaagtgctgaaatttgtttttgacaaatattggtaaataggcgagttaaagcgtataaaaaaatggtatcagcatggatcctacgtaaattgggaacatcataaatggtaaagtttgtttagcagtaaatggttgacttcaattcggtcaatgcggtcgtaaatattattaaatttatctgacttggcccattgttaagaccggtccggagcgataagtaaacgaggtagacagagttggtcttttgaaaattaacactgactagactagacggtactcctataataaagcaaaggatccacaaaatttacaataattacgacgacaaaaacaaaaaacggatgtaaaaaccctcttatcagtacagtttcgtcaatataagccttatctgtattaatgaaattataatgagtttgaattgtacgcaattaaatcaacattaagaaatgaagattgacaaattttaccaggaaacatatttaaattttacctgaaaccgggccttttatactattatcggttaacccaggatgtttatagtctgtactaattgaagtcaaccatttactgctaaacaaactataatcttttctttgcatttaatacgcagattattgttggtatgtatcgccacatcaattagtgttgtttgtctcggttatttattaactaatatgagatctggtctattacgtgtcattgtttggtctgtgagcacagtgcggtcccagtataagttggtaggtgtcattctcaggaatgtattgataatataggagatggtgggtttggagaacttccagtttgatatatatctcttgatgaaagatgttttcaagtgaatcatgtgaatcttaattcaattgcagcaaatacctggcagccccggtaagatgttacatgatttcttagatttgacatccaaatcagcatttgtcgttttgaacctgaaggtctttgaggatatatttcaggtaatttggctcgtataacctcatcctgtttcaagaaccttc

SEQ ID NO: 212 - DNA, 2080 bp, Diabrotica virgifera
gattaccaatacaatttctaccaatcttcatatctaataaattgcttttttagtcaatattttgttgtatgttaatattttaattccgcaagaatcaaacttatttaattaaactaagagaataagcagctgtcaaaaaagtttaaaacgtttagttgctaatgttcccacatcattcaaatgtctcgctagctaagttctgcgtgcggtgagttcaaaatctaacaaccttatagacgcaggttcaattcccaatgcaaatttttatttttttaattttttttatacattttatgattgtaagtatatttattatatttttttttcagaaaatacgatttagttaaaatttttctcaacaattattgttcagaaatcatttctttgtttcatgtttcaatgtgtttgcgtgtgttttattcttttatttttttaatttttggtattgttttaataaaaatttttggaaagtagtaagtattaaaattagtttaatatttaaataaaatataaataaactgtttaaagtatattgatttcgttgaaatcatataatagaagtataccttcttacgtgcgtacaaagtacacaaaaattcttttttttatatctctcacgcgaagcaaaagatcgaaaattcacccctcttgtggattcgcaataggccgcgcttaaattttaaatttcagtcgaccatctcaaaaaatgtgaaccatcaatctccatgactgtccaaaatttcaaatctgtatttattttgatagtagaaatattggggtttcttcaccttagatgagacacactttaagtgtaatatactttttggaatcagagttttagtatctttcatagtatgtcacatgacaccctttgctatttaaaaaagttgagagtgtgactgtcacccgatgggggtacatcgaaatgctgaaacgttgataccattagatattagaacaagcttaaacatcgacatgttccagcgattatgttttatctttgcaaaaacgagttgacagagaggtacgattttatcatctcactgtacgaacaatggatatgaaaagtgctgaaatttgtttttgacaaatattggtaaataggcgagttaaagcgtataaaaaaatggtatcagcatggatcctacgtaaattgggaacatcataaatggtaaagtttgtttagcagtaaatggttgacttcaattcggtcaatgcggtcgtaaatattattaaatttatctgacttggcccattgttaagaccggtccggagcgataagtaaacgaggtagacagagttggtcttttgaaaattaacactgactagactagacggtactcctataataaagcaaaggatccacaaaatttacaataattacgacgacaaaaacaaaaaacggatgtaaaaaccctcttatcagtacagtttcgtcaatataagccttatctgtattaatgaaattataatgagtttgaattgtacgcaattaaatcaacattaagaaatgaagattgacaaattttaccaggaaacatatttaaattttacctgaaaccgggccttttatactattatcggttaacccaggatgtttatagtctgtactaattgaagtcaaccatttactgctaaacaaactataatcttttctttgcatttaatacgcagattattgttggtatgtatcgccacatcaattagtgttgtttgtctcggttatttattaactaatatgagatctggtctattacgtgtcattgtttggtctgtgagcacagtgcggtcccagtataagttggtaggtgtcattctcaggaatgtattgataatataggagatggtgggtttggagaacttccagtttgatatatatctcttgatgaaagatgttttcaagtgaatcatgtgaatcttaattcaattgcagcaaatacctggcagccccggtaagatgttacatgatttcttagatttgacatccaaatcagcatttgtcgttttgaacctgaaggtctttgaggatatatttcaggtaatttggctcgtataacctcatcctgtttcaagaaccttc

SEQ ID NO: 213 - DNA, 1992 bp, Diabrotica virgifera
gacctctatttggcgcctagactataccttattgtaaatgtttcagtattgtaataaaaaattacaaattaaatacctatttggaaaatgtacctacctagctaatctagctacttacctacctaggtaatgctttgatttaccaacaaaaatctccatctaatatattgcttttttagtctatattttattgtattttaattccacaagaatcaaacttatttgattaaactaagagaataaacaactgtcaaaaaattttaaaacgtttagatgctatatcttcccacttctttcacgtgtctcggtagttaaattctgcgtggggtgagttcaaaataatctaacaacctgataggcgcaggttcaattcccaatgcaaattttatttttttttatacattttatgattgtaagtatatttattatatttttttttcagaaaatacgatttagttaaaattttctcaacaattattgttcagaaatcatttctttgtttcatgtttcaatgtgtttgcgtgtgttttattcttttatttttttaatttttggtattgttttaataaaaatttttggaaagtagtaagtattaaaattagtttaatatttaaataaaatataaataaactgtttaaagtatattgatttcgttgaaatcatataatagaagtataacttcttacgtgcgtacaaagtacacacacattattttttttatgtgatgggtctacgttgaactgcgtttggtctttcaatgatttggaaggaagtggaaatgcttcaggtgtcagtgacattgacatccaggagggggcaatttttaatgtattaattttaatgttattcgcggtgtgcaagtacttggaagggatacgagaaacgatcgtgcgcgaatagcggagaaatattgcaactttcttaaataattcatattgtcaattgaaattgtcaaattgacgtatatttcataccttctgtcattgaagcagaaaaattatatattgctccacaatattgatatgatatgcaattattatataaaggtaaatttaattaattgtattttgcttgcagtactgcattttaataactaattttatttactacatacaattgtttacgttttataacataacctgcatcttattttttcttcttattatttttttggactatggccttgacaattatccagcaaccaggactaatataattggccaatataattaaaagtgcgaataaaagtacagagcgtagaaatagaggtcgctttgccgaacttgcacggtcccaataccgtgtattgcatgtcgctgtgactttggttaatagtgatcatttatttggttgagcctgttagtcttgacaaatcttttattttaaatattttgcggcgttttaaattcttctctaaagtttaaaattttctcactttctggatttacttatttttagaaaatggctgcaccagtattaattgcactcgtaaaatagctgattcctccaaggaactaagatttttatcgtgatgctgacccaaccaggcaaacgacagtcgttttgagtagtatggacctctataagaagatcctatatgttttctgcagtcgattgtttgaacttaattagttattaacaaattaaggtcaaaaacggtcaattttcacttttttcgcctatgagtaaagagttaagcattggaaacaaatttgagagtaagaatcttgtaagtcatacaacaactcacgaatttggctttacattcacagaatgattacccactccttttagagagtttagagtcagtttccacagaaagttaccataatttatgttttattttttaaatattgttctgaggctatttatttgtggtatttatgtaatttactattctaatttagaaataagccgcaatttaagttgaaaaatgattttattgacgtttcgacttccactccggaggtcgttatcgaaatacaaaatgta

SEQ ID NO: 214 - DNA, 1875 bp, Diabrotica virgifera
gacctctatttggcgcctagactataccttattgtaaatgtttcagtattgtaataaaaaattacaaattaaatacctatttggaaaatgtacctacctagctaatctagctacttacctacctaggtaatgctttgatttaccaacaaaaatctccatctaatatattgcttttttagtctatattttattgtattttaattccacaagaatcaaacttatttgattaaactaagagaataaacaactgtcaaaaaattttaaaacgtttagatgctatatcttcccacttctttcacgtgtctcggtagttaaattctgcgtggggtgagttcaaaataatctaacaacctgataggcgcaggttcaattcccaatgcaaattttatttttttttatacattttatgattgtaagtatatttattatatttttttttcagaaaatacgatttagttaaaattttctcaacaattattgttcagaaatcatttctttgtttcatgtttcaatgtgtttgcgtgtgttttattcttttatttttttaatttttggtattgttttaataaaaatttttggaaagtagtaagtattaaaattagtttaatatttaaataaaatataaataaactgtttaaagtatattgatttcgttgaaatcatataatagaagtataacttcttacgtgcgtacaaagtacacacacattattttttttatgtgatgggtctacgttgaactgcgtttggtctttcaatgatttggaaggaagtggaaatgcttcaggtgtcagtgacattgacatccaggagggggcaatttttaatgtattaattttaatgttattcgcggtgtgcaagtacttggaagggatacgagaaacgatcgtgcgcgaatagcggagaaatattgcaactttcttaaataattcatattgtcaattgaaattgtcaaattgacgtatatttcataccttctgtcattgaagcagaaaaattatatattgctccacaatattgatatgatatgcaattattatataaaggtaaatttaattaattgtattttgcttgcagtactgcattttaataactaattttatttactacatacaattgtttacgttttataacataacctgcatcttattttttcttcttattatttttttggactatggccttgacaattatccagcaaccaggactaatataattggccaatataattaaaagtgcgaataaaagtacagagcgtagaaatagaggtcgctttgccgaacttgcacggtcccaataaacctgaaatgatacttcattataacaaaacaaaaggagctgttgacgtagtagccaaatggcacaacaatacacaacacagcgcaaaacacgcaggtagttttttcactatttactttattatttcagccataaaggttttcaaaatttggaaaataaaaaatccaaattacgatgggaaacatttgtatgcaagacaaagttttttatgagacttagggtgggaattggtataagaaaatgttatctagtcatcaaaacacaaataatagcctcagttacgtcaaatgatgaaaattgcatattctatcctgaattagacgtttcagatgttcctcctggggctaacagagttgcgggaccatgtcgacaaggtcggtgctacttatgccagagaaaaaaaagactgaaagtcccggcattaccctattgtgtgtaaaaactttgtgttgctcactctgtaaaaaatgtcatgtgtttgtcttgcaacgataattaacttttttaagaagaaataagtattttgtttgtaaaatgttacttcatagtataataaacaagttctaattatctttc

SEQ ID NO: 215 - DNA, 1880 bp, Diabrotica virgifera
gattaccaatacaatttctaccaatcttcatatctaataaattgcttttttagtcaatattttgttgtatgttaatattttaattccgcaagaatcaaacttatttaattaaactaagagaataagcagctgtcaaaaaagtttaaaacgtttagttgctaatgttcccacatcattcaaatgtctcgctagctaagttctgcgtgcggtgagttcaaaatctaacaaccttatagacgcaggttcaattcccaatgcaaatttttatttttttaattttttttatacattttatgattgtaagtatatttattatatttttttttcagaaaatacgatttagttaaaatttttctcaacaattattgttcagaaatcatttctttgtttcatgtttcaatgtgtttgcgtgtgttttattcttttatttttttaatttttggtattgttttaataaaaatttttggaaagtagtaagtattaaaattagtttaatatttaaataaaatataaataaactgtttaaagtatattgatttcgttgaaatcatataatagaagtataacttcttacgtgcgtacaaagtacacacacattattttttttatgtgatgggtctacgttgaactgcgtttggtctttcaatgatttggaaggaagtggaaatgcttcaggtgtcagtgacattgacatccaggagggggcaatttttaatgtattaattttaatgttattcgcggtgtgcaagtacttggaagggatacgagaaacgatcgtgcgcgaatagcggagaaatattgcaactttcttaaataattcatattgtcaattgaaattgtcaaattgacgtatatttcataccttctgtcattgaagcagaaaaattatatattgctccacaatattgatatgatatgcaattattatataaaggtaaatttaattaattgtattttgcttgcagtactgcattttaataactaattttatttactacatacaattgtttacgttttataacataacctgcatcttattttttcttcttattatttttttggactatggccttgacaattatccagcaaccaggactaatataattggccaatataattaaaagtgcgaataaaagtacagagcgtagaaatagaggtcgctttgccgaacttgcacggtcccaataccgtgtattgcatgtcgctgtgactttggttaatagtgatcatttatttggttgagcctgttagtcttgacaaatcttttattttaaatattttgcggcgttttaaattcttctctaaagtttaaaattttctcactttctggatttacttatttttagaaaatggctgcaccagtattaattgcactcgtaaaatagctgattcctccaaggaactaagatttttatcgtgatgctgacccaaccaggcaaacgacagtcgttttgagtagtatggacctctataagaagatcctatatgttttctgcagtcgattgtttgaacttaattagttattaacaaattaaggtcaaaaacggtcaattttcacttttttcgcctatgagtaaagagttaagcattggaaacaaatttgagagtaagaatcttgtaagtcatacaacaactcacgaatttggctttacattcacagaatgattacccactccttttagagagtttagagtcagtttccacagaaagttaccataatttatgttttattttttaaatattgttctgaggctatttatttgtggtatttatgtaatttactattctaatttagaaataagccgcaatttaagttgaaaaatgattttattgacgtttcgacttccactccggaggtcgttatcgaaatacaaaatgta

SEQ ID NO: 216 - DNA, 1839 bp, Diabrotica virgifera
taaaaatgtattgcttcaaaacttactttcagtggcatttcagtgggttttagccatcttatggagagtggtctaacacactttctaggtacagctgtggtttttaaaaggaaatataatgaatcgcttttgttttcgaaatttacattgggaatcccttagtgtccttatatttgccctacagagtttcatttaaactgaaattgggtaatttacatagacctaaagctttcacgtctatatagcctaattagaccacaaaattgacttgctttacgtgaaatgtatgaaccattcaaacatatttatatgacaacaatataatataatacaatataatataaataactgacaacatttaaaattagaatttttacccacaatttttctctgccatgtgtcatctagtacaagaagtatggcaatttagccctactcctcttattgtacatttcttgtaattcctcattttctttttcaattacttcgatcttttaaacttaattcaccaagtttatttgcaatattcttcttgaagtctatagtttgaattccttcaatatatttgtaatgttattcttcagtgtcaatccttgcattccatgaaagaacacgaaaaagatgcagcacgttatttgtccatattcctgctacatacttatttttcgattaacacattcactgccagcgtattcgcggtgtgcaagtacttggaaagggaaacgagaaacgaccctgcgcgagtcgcggagaaatattgcaactatcttaaataattcatattgtcaattgaaattgtcaaattgacgtatatttcataccttctgtcaatgaagcagaaaaattatatattgctccacaatattgatatgatatgcaattattatataaaggtaaatttaattaattgtattttgcttgcagtactgcattttaataactaattttatttactacatacaattgtttacgttttataacataacctgcatcttattttttcttcttattatttttttggactatggccttgacaattatccagcaaccaggactaatataattggccaatataattaaaagtgcgaataaaagtacagagcgtagaaatagaggtcgctttgccgaacttgcacggtcccaataccgtgtattgcatgtcgctgtgactttggttaatagtgatcatttatttggttgagcctgttagtcttgacaaatcttttattttaaatattttgcggcgttttaaattcttctctaaagtttaaaattttctcactttctggatttacttatttttagaaaatggctgcaccagtattaattgcactcgtaaaatagctgattcctccaaggaactaagatttttatcgtgatgctgacccaaccaggcaaacgacagtcgttttgagtagtatggacctctataagaagatcctatatgttttctgcagtcgattgtttgaacttaattagttattaacaaattaaggtcaaaaacggtcaattttcacttttttcgcctatgagtaaagagttaagcattggaaacaaatttgagagtaagaatcttgtaagtcatacaacaactcacgaatttggctttacattcacagaatgattacccactccttttagagagtttagagtcagtttccacagaaagttaccataatttatgttttattttttaaatattgttctgaggctatttatttgtggtatttatgtaatttactattctaatttagaaataagccgcaatttaagttgaaaaatgattttattgacgtttcgacttccactccggaggtcgttatcgaaatacaaaatgta

SEQ ID NO: 217 - DNA, 1743 bp, Diabrotica virgifera
gacctctatttggcgcctagactataccttattgtaaatgtttcagtattgtaataaaaaattacaaattaaatacctatttggaaaatgtacctacctagctaatctagctacttacctacctaggtaatgctttgatttaccaacaaaaatctccatctaatatattgcttttttagtctatattttattgtattttaattccacaagaatcaaacttatttgattaaactaagagaataaacaactgtcaaaaaattttaaaacgtttagatgctatatcttcccacttctttcacgtgtctcggtagttaaattctgcgtggggtgagttcaaaataatctaacaacctgataggcgcaggttcaattcccaatgcaaattttatttttttttatacattttatgattgtaagtatatttattatatttttttttcagaaaatacgatttagttaaaattttctcaacaattattgttcagaaatcatttctttgtttcatgtttcaatgtgtttgcgtgtgttttattcttttatttttttaatttttggtattgttttaataaaaatttttggaaagtagtaagtattaaaattagtttaatatttaaataaaatataaataaactgtttaaagtatattgatttcgttgaaatcatataatagaagtataacttcttacgtgcgtacaaagtacacacacattattttttttatgtgatgggtctacgttgaactgcgtttggtctttcaatgatttggaaggaagtggaaatgcttcaggtgtcagtgacattgacatccaggagggggcaatttttaatgtattaattttaatgttattcgcggtgtgcaagtacttggaagggatacgagaaacgatcgtgcgcgaatagcggagaaatattgcaactttcttaaataattcatattgtcaattgaaattgtcaaattgacgtatatttcataccttctgtcattgaagcagaaaaattatatattgctccacaatattgatatgatatgcaattattatataaaggtaaatttaattaattgtattttgcttgcagtactgcattttaataactaattttatttactacatacaattgtttacgttttataacataacctgcatcttattttttcttcttattatttttttggactatggccttgacaattatccagcaaccaggactaatataattggccaatataattaaaagtgcgaattttagtatagagcgtagaaataggggtcgctttgccgaacttgcacggtcccaatacgctgcgagttcgtacatagaggggatatttaaaagttcgtgagcgccagtagtgacaagtcaatgaattttactggaaattttacataaatgtcaaagtaattaattcaaaacattgaaattaaaaacattaataggaaaaaatattagttgtgcaaagctgtggtgtatatttttaccttaaatatacttacgttttaaatactgaatttaagtttttttaatatttcgtaatatgtaattataaattaaacttgagatcataattgctattttatttttaatcaaaagttattcgggctcaaaaattgcaatttttagatttttttttaagttgaaccgcgtgtatctcgaaaactatacattttacgaaaaaaactagtaaggacattttttgcttagcatgacccaaaagatacaaaaaaaaatgtttttttgcgaaaa

SEQ ID NO: 218 - DNA, 1763 bp, Diabrotica virgifera
gattaccaatacaatttctaccaatcttcatatctaataaattgcttttttagtcaatattttgttgtatgttaatattttaattccgcaagaatcaaacttatttaattaaactaagagaataagcagctgtcaaaaaagtttaaaacgtttagttgctaatgttcccacatcattcaaatgtctcgctagctaagttctgcgtgcggtgagttcaaaatctaacaaccttatagacgcaggttcaattcccaatgcaaatttttatttttttaattttttttatacattttatgattgtaagtatatttattatatttttttttcagaaaatacgatttagttaaaatttttctcaacaattattgttcagaaatcatttctttgtttcatgtttcaatgtgtttgcgtgtgttttattcttttatttttttaatttttggtattgttttaataaaaatttttggaaagtagtaagtattaaaattagtttaatatttaaataaaatataaataaactgtttaaagtatattgatttcgttgaaatcatataatagaagtataacttcttacgtgcgtacaaagtacacacacattattttttttatgtgatgggtctacgttgaactgcgtttggtctttcaatgatttggaaggaagtggaaatgcttcaggtgtcagtgacattgacatccaggagggggcaatttttaatgtattaattttaatgttattcgcggtgtgcaagtacttggaagggatacgagaaacgatcgtgcgcgaatagcggagaaatattgcaactttcttaaataattcatattgtcaattgaaattgtcaaattgacgtatatttcataccttctgtcattgaagcagaaaaattatatattgctccacaatattgatatgatatgcaattattatataaaggtaaatttaattaattgtattttgcttgcagtactgcattttaataactaattttatttactacatacaattgtttacgttttataacataacctgcatcttattttttcttcttattatttttttggactatggccttgacaattatccagcaaccaggactaatataattggccaatataattaaaagtgcgaataaaagtacagagcgtagaaatagaggtcgctttgccgaacttgcacggtcccaataaacctgaaatgatacttcattataacaaaacaaaaggagctgttgacgtagtagccaaatggcacaacaatacacaacacagcgcaaaacacgcaggtagttttttcactatttactttattatttcagccataaaggttttcaaaatttggaaaataaaaaatccaaattacgatgggaaacatttgtatgcaagacaaagttttttatgagacttagggtgggaattggtataagaaaatgttatctagtcatcaaaacacaaataatagcctcagttacgtcaaatgatgaaaattgcatattctatcctgaattagacgtttcagatgttcctcctggggctaacagagttgcgggaccatgtcgacaaggtcggtgctacttatgccagagaaaaaaaagactgaaagtcccggcattaccctattgtgtgtaaaaactttgtgttgctcactctgtaaaaaatgtcatgtgtttgtcttgcaacgataattaacttttttaagaagaaataagtattttgtttgtaaaatgttacttcatagtataataaacaagttctaattatctttc

SEQ ID NO: 219 - DNA, 1722 bp, Diabrotica virgifera
taaaaatgtattgcttcaaaacttactttcagtggcatttcagtgggttttagccatcttatggagagtggtctaacacactttctaggtacagctgtggtttttaaaaggaaatataatgaatcgcttttgttttcgaaatttacattgggaatcccttagtgtccttatatttgccctacagagtttcatttaaactgaaattgggtaatttacatagacctaaagctttcacgtctatatagcctaattagaccacaaaattgacttgctttacgtgaaatgtatgaaccattcaaacatatttatatgacaacaatataatataatacaatataatataaataactgacaacatttaaaattagaatttttacccacaatttttctctgccatgtgtcatctagtacaagaagtatggcaatttagccctactcctcttattgtacatttcttgtaattcctcattttctttttcaattacttcgatcttttaaacttaattcaccaagtttatttgcaatattcttcttgaagtctatagtttgaattccttcaatatatttgtaatgttattcttcagtgtcaatccttgcattccatgaaagaacacgaaaaagatgcagcacgttatttgtccatattcctgctacatacttatttttcgattaacacattcactgccagcgtattcgcggtgtgcaagtacttggaaagggaaacgagaaacgaccctgcgcgagtcgcggagaaatattgcaactatcttaaataattcatattgtcaattgaaattgtcaaattgacgtatatttcataccttctgtcaatgaagcagaaaaattatatattgctccacaatattgatatgatatgcaattattatataaaggtaaatttaattaattgtattttgcttgcagtactgcattttaataactaattttatttactacatacaattgtttacgttttataacataacctgcatcttattttttcttcttattatttttttggactatggccttgacaattatccagcaaccaggactaatataattggccaatataattaaaagtgcgaataaaagtacagagcgtagaaatagaggtcgctttgccgaacttgcacggtcccaataaacctgaaatgatacttcattataacaaaacaaaaggagctgttgacgtagtagccaaatggcacaacaatacacaacacagcgcaaaacacgcaggtagttttttcactatttactttattatttcagccataaaggttttcaaaatttggaaaataaaaaatccaaattacgatgggaaacatttgtatgcaagacaaagttttttatgagacttagggtgggaattggtataagaaaatgttatctagtcatcaaaacacaaataatagcctcagttacgtcaaatgatgaaaattgcatattctatcctgaattagacgtttcagatgttcctcctggggctaacagagttgcgggaccatgtcgacaaggtcggtgctacttatgccagagaaaaaaaagactgaaagtcccggcattaccctattgtgtgtaaaaactttgtgttgctcactctgtaaaaaatgtcatgtgtttgtcttgcaacgataattaacttttttaagaagaaataagtattttgtttgtaaaatgttacttcatagtataataaacaagttctaattatctttc

SEQ ID NO: 220 - DNA, 2901 bp, Diabrotica virgifera
  SmartBlast Evalue=1E-47; Info=Vacuolar fusion protein MON1-like protein A n=2 Tax=Formicidae RepID=E2A1P7_9HYME
gacctctatttggcgcctagactataccttattgtaaatgtttcagtattgtaataaaaaattacaaattaaatacctatttggaaaatgtacctacctagctaatctagctacttacctacctaggtaatgctttgatttaccaacaaaaatctccatctaatatattgcttttttagtctatattttattgtattttaattccacaagaatcaaacttatttgattaaactaagagaataaacaactgtcaaaaaattttaaaacgtttagatgctatatcttcccacttctttcacgtgtctcggtagttaaattctgcgtggggtgagttcaaaataatctaacaacctgataggcgcaggttcaattcccaatgcaaattttatttttttttatacattttatgattgtaagtatatttattatatttttttttcagaaaatacgatttagttaaaattttctcaacaattattgttcagaaatcatttctttgtttcatgtttcaatgtgtttgcgtgtgttttattcttttatttttttaatttttggtattgttttaataaaaatttttggaaagtagtaagtattaaaattagtttaatatttaaataaaatataaataaactgtttaaagtatattgatttcgttgaaatcatataatagaagtataacttcttacgtgcgtacaaagtacacacacattattttttttatgtgatgggtctacgttgaactgcgtttggtctttcaatgatttggaaggaagtggaaatgcttcaggtgtcagtgacattgacatccaggagggggcaatttttaatgtattaattttaatgttattcgcggtgtgcaagtacttggaagggatacgagaaacgatcgtgcgcgaatagcggagaaatattgcaactttcttaaataattcatattgtcaattgaaattgtcaaattgacgtatatttcataccttctgtcattgaagcagaaaaattatatattgctccacaatattgatatgatatgcaattattatataaaggtaaatttaattaattgtattttgcttgcagtactgcattttaataactaattttatttactacatacaattgtttacgttttataacataacctgcatcttattttttcttcttattatttttttggactatggccttgacaattatccagcaaccaggaccaatataattggccaatataattaaaagtgcgaaaaatgttgctgagctatgaaaccaggtgtcgctttgccggacttgcacggtcccaatagcatagataatttcaatgtaaagcgaataatctttaaattgtttttatttatttatatttgttagtagtcagtgttaccacccctagcccttatacaagctacaatatgcgtgggcatgcacctaatcaaattgtcaacattttgtggtaggttgctccactcttcaagagcagcttgtactagccgtgcggtgttttgtggattatcccggtgagctctaatgtttcttttaagcgtataccacaaatgctctatagggttaaggtcgggtgagtaagcaggccattccagaccagtgttatcatttttctttaagtatgtggagatgcattatcatacgtggaaattaaattttcctcttcagagcttaactccggttctagaacccaatcaacatacctgcgaactcctgtctccttagattcgatgctagcgtattcctctacggcctacggtcatgtttcttacttatccgaagactgtcaagtgtgtttgttacttctaacagtggaaagggatgtattttttactttgagtgaagcgaaacagaaaatcgtagaaaaattaagaagaaacaactgcttggaatccatcaacgaatcactggcagctccgggatatagttgtgcgagtgctggttttgtagagatacattatttgtataaatgtaagtccactgcccagttctatcaacctgttttaagccccccttatactcaagcgaagatctatctgactgaactttacaagggagctcatcaaagactgcataattctaccaaaccacttaaacttatgtttgaacggagttcgagggaggcgattcttgcctgggacactaaggggtttgaattgttcgttgtttttgagcctttgatcgatactcgttagcgattctcctggttggtaggcttttaaattggattaaaaaacaagaagataaactatttcacctaaatgcacctactttttaaatgaaggtacctgttctcacttattttaacctttgtcatgggcaaattataactcacacattaaacaaaagaatatttttatggacaccatcgaaatggtgagaatttgtgaattcttttgagtttgcctgtggattctatagtccacaatagatctctatcccatcattgtacaaaaagtggtgaattctttttagaattcgcccttataataatataacatagtacattttgggaacatagaaaatataataaaattgttttaaatgtatgtaaaatacaaatattgatattatttctagctttgaattaaagcgaatgtaaaaaactagcatacgaaatcaaacagtatttattttaaagcaatttaatcatcaatacataaaaattaaagaaaaccatgaaatcttgaaatcacaaattgaaactatttgtttaaagtcaattcgcggtgtgcaagtacttggagggggatacgagaaacgatcgagcgcgaatagcggagaaatattgcaactttcttaaataattcatattgtcaattgaaattgtcaaattgacatatgtttcatacctactgtcattgaagaagataaaatatatattgctccacaatattgatatga

SEQ ID NO: 221 - DNA, 1591 bp, Diabrotica virgifera
gacctctatttggcgcctagactataccttattgtaaatgtttcagtattgtaataaaaaattacaaattaaatacctatttggaaaatgtacctacctagctaatctagctacttacctacctaggtaatgctttgatttaccaacaaaaatctccatctaatatattgcttttttagtctatattttattgtattttaattccacaagaatcaaacttatttgattaaactaagagaataaacaactgtcaaaaaattttaaaacgtttagatgctatatcttcccacttctttcacgtgtctcggtagttaaattctgcgtggggtgagttcaaaataatctaacaacctgataggcgcaggttcaattcccaatgcaaattttatttttttttatacattttatgattgtaagtatatttattatatttttttttcagaaaatacgatttagttaaaattttctcaacaattattgttcagaaatcatttctttgtttcatgtttcaatgtgtttgcgtgtgttttattcttttatttttttaatttttggtattgttttaataaaaatttttggaaagtagtaagtattaaaattagtttaatatttaaataaaatataaataaactgtttaaagtatattgatttcgttgaaatcatataatagaagtataacttcttacgtgcgtacaaagtacacacacattattttttttatgtgatgggtctacgttgaactgcgtttggtctttcaatgatttggaaggaagtggaaatgcttcaggtgtcagtgacattgacatccaggagggggcaatttttaatgtattaattttaatgttattcgcggtgtgcaagtacttggaagggatacgagaaacgatcgtgcgcgaatagcggagaaatattgcaactttcttaaataattcatattgtcaattgaaattgtcaaattgacgtatatttcataccttctgtcattgaagcagaaaaattatatattgctccacaatattgatatgatatgcaattattatataaaggtaaatttaattaattgtattttgcttgcagtactgcattttaataactaattttatttactacatacaattgtttacgttttataacataacctgcatcttattttttcttcttattatttttttggactatggccttgacaattatccagcaaccaggaccaatataattggccaatataattaaaagtgcgaaaaatgttgctgagctatgaaaccaggtgtcgcttttccgaacttgcacggtcccatgtaaacacaaggcttgtaaacaaaagatgaattgacagattgaaatgaaacttcagacacgttcatatgaagagtatatacagtcgaaaaaatgaaagaatacccatgaacgatcatatcaagcacatattttggatttgctgcctttttctataaataacaaacgagagagatagattattaagtgttgtctacaaagcaaaaacgttatccaagacatacgcagttacatatttataattgacagagtgagacggcgatacaatggttcaacggagttataataatttagt

SEQ ID NO: 222 - DNA, 1631 bp, Diabrotica virgifera
gattaccaatacaatttctaccaatcttcatatctaataaattgcttttttagtcaatattttgttgtatgttaatattttaattccgcaagaatcaaacttatttaattaaactaagagaataagcagctgtcaaaaaagtttaaaacgtttagttgctaatgttcccacatcattcaaatgtctcgctagctaagttctgcgtgcggtgagttcaaaatctaacaaccttatagacgcaggttcaattcccaatgcaaatttttatttttttaattttttttatacattttatgattgtaagtatatttattatatttttttttcagaaaatacgatttagttaaaatttttctcaacaattattgttcagaaatcatttctttgtttcatgtttcaatgtgtttgcgtgtgttttattcttttatttttttaatttttggtattgttttaataaaaatttttggaaagtagtaagtattaaaattagtttaatatttaaataaaatataaataaactgtttaaagtatattgatttcgttgaaatcatataatagaagtataacttcttacgtgcgtacaaagtacacacacattattttttttatgtgatgggtctacgttgaactgcgtttggtctttcaatgatttggaaggaagtggaaatgcttcaggtgtcagtgacattgacatccaggagggggcaatttttaatgtattaattttaatgttattcgcggtgtgcaagtacttggaagggatacgagaaacgatcgtgcgcgaatagcggagaaatattgcaactttcttaaataattcatattgtcaattgaaattgtcaaattgacgtatatttcataccttctgtcattgaagcagaaaaattatatattgctccacaatattgatatgatatgcaattattatataaaggtaaatttaattaattgtattttgcttgcagtactgcattttaataactaattttatttactacatacaattgtttacgttttataacataacctgcatcttattttttcttcttattatttttttggactatggccttgacaattatccagcaaccaggactaatataattggccaatataattaaaagtgcgaattttagtatagagcgtagaaataggggtcgctttgccgaacttgcacggtcccaatacgctgcgagttcgtacatagaggggatatttaaaagttcgtgagcgccagtagtgacaagtcaatgaattttactggaaattttacataaatgtcaaagtaattaattcaaaacattgaaattaaaaacattaataggaaaaaatattagttgtgcaaagctgtggtgtatatttttaccttaaatatacttacgttttaaatactgaatttaagtttttttaatatttcgtaatatgtaattataaattaaacttgagatcataattgctattttatttttaatcaaaagttattcgggctcaaaaattgcaatttttagatttttttttaagttgaaccgcgtgtatctcgaaaactatacattttacgaaaaaaactagtaaggacattttttgcttagcatgacccaaaagatacaaaaaaaaatgtttttttgcgaaaa

SEQ ID NO: 223 - DNA, 1525 bp, Diabrotica virgifera
gacctctatttggcgcctagactataccttattgtaaatgtttcagtattgtaataaaaaattacaaattaaatacctatttggaaaatgtacctacctagctaatctagctacttacctacctaggtaatgctttgatttaccaacaaaaatctccatctaatatattgcttttttagtctatattttattgtattttaattccacaagaatcaaacttatttgattaaactaagagaataaacaactgtcaaaaaattttaaaacgtttagatgctatatcttcccacttctttcacgtgtctcggtagttaaattctgcgtggggtgagttcaaaataatctaacaacctgataggcgcaggttcaattcccaatgcaaattttatttttttttatacattttatgattgtaagtatatttattatatttttttttcagaaaatacgatttagttaaaattttctcaacaattattgttcagaaatcatttctttgtttcatgtttcaatgtgtttgcgtgtgttttattcttttatttttttaatttttggtattgttttaataaaaatttttggaaagtagtaagtattaaaattagtttaatatttaaataaaatataaataaactgtttaaagtatattgatttcgttgaaatcatataatagaagtataacttcttacgtgcgtacaaagtacacacacattattttttttatgtgatgggtctacgttgaactgcgtttggtctttcaatgatttggaaggaagtggaaatgcttcaggtgtcagtgacattgacatccaggagggggcaatttttaatgtattaattttaatgttattcgcggtgtgcaagtacttggaagggatacgagaaacgatcgtgcgcgaatagcggagaaatattgcaactttcttaaataattcatattgtcaattgaaattgtcaaattgacgtatatttcataccttctgtcattgaagcagaaaaattatatattgctccacaatattgatatgatatgcaattattatataaaggtaaatttaattaattgtattttgcttgcagtactgcattttaataactaattttatttactacatacaattgtttacgttttataacataacctgcatcttattttttcttcttattatttttttggactatggccttgacaattatccagcaaccaggactaatataattggccaatataattaaaagtgcgaataaaagtacagagcgtagaaatagaggtcgctttgccgaacttgcacggtcccatattcccatatataaaaactataaattattataacaaatttgtataagtagaactagtagaagtgtaagtagtattttaggcatagactacttggtgtacttaaataaaaataaaacaaccccagtaacattatagtactaagaccaaatgtatttatttggtaaggtagtttggaacaaaaaaaggtttaaagaagactcttcataacgaatcaactacaaaaaccaa

SEQ ID NO: 224 - DNA, 1590 bp, Diabrotica virgifera
taaaaatgtattgcttcaaaacttactttcagtggcatttcagtgggttttagccatcttatggagagtggtctaacacactttctaggtacagctgtggtttttaaaaggaaatataatgaatcgcttttgttttcgaaatttacattgggaatcccttagtgtccttatatttgccctacagagtttcatttaaactgaaattgggtaatttacatagacctaaagctttcacgtctatatagcctaattagaccacaaaattgacttgctttacgtgaaatgtatgaaccattcaaacatatttatatgacaacaatataatataatacaatataatataaataactgacaacatttaaaattagaatttttacccacaatttttctctgccatgtgtcatctagtacaagaagtatggcaatttagccctactcctcttattgtacatttcttgtaattcctcattttctttttcaattacttcgatcttttaaacttaattcaccaagtttatttgcaatattcttcttgaagtctatagtttgaattccttcaatatatttgtaatgttattcttcagtgtcaatccttgcattccatgaaagaacacgaaaaagatgcagcacgttatttgtccatattcctgctacatacttatttttcgattaacacattcactgccagcgtattcgcggtgtgcaagtacttggaaagggaaacgagaaacgaccctgcgcgagtcgcggagaaatattgcaactatcttaaataattcatattgtcaattgaaattgtcaaattgacgtatatttcataccttctgtcaatgaagcagaaaaattatatattgctccacaatattgatatgatatgcaattattatataaaggtaaatttaattaattgtattttgcttgcagtactgcattttaataactaattttatttactacatacaattgtttacgttttataacataacctgcatcttattttttcttcttattatttttttggactatggccttgacaattatccagcaaccaggactaatataattggccaatataattaaaagtgcgaattttagtatagagcgtagaaataggggtcgctttgccgaacttgcacggtcccaatacgctgcgagttcgtacatagaggggatatttaaaagttcgtgagcgccagtagtgacaagtcaatgaattttactggaaattttacataaatgtcaaagtaattaattcaaaacattgaaattaaaaacattaataggaaaaaatattagttgtgcaaagctgtggtgtatatttttaccttaaatatacttacgttttaaatactgaatttaagtttttttaatatttcgtaatatgtaattataaattaaacttgagatcataattgctattttatttttaatcaaaagttattcgggctcaaaaattgcaatttttagatttttttttaagttgaaccgcgtgtatctcgaaaactatacattttacgaaaaaaactagtaaggacattttttgcttagcatgacccaaaagatacaaaaaaaaatgtttttttgcgaaaa

SEQ ID NO: 225 - DNA, 1479 bp, Diabrotica virgifera
gattaccaatacaatttctaccaatcttcatatctaataaattgcttttttagtcaatattttgttgtatgttaatattttaattccgcaagaatcaaacttatttaattaaactaagagaataagcagctgtcaaaaaagtttaaaacgtttagttgctaatgttcccacatcattcaaatgtctcgctagctaagttctgcgtgcggtgagttcaaaatctaacaaccttatagacgcaggttcaattcccaatgcaaatttttatttttttaattttttttatacattttatgattgtaagtatatttattatatttttttttcagaaaatacgatttagttaaaatttttctcaacaattattgttcagaaatcatttctttgtttcatgtttcaatgtgtttgcgtgtgttttattcttttatttttttaatttttggtattgttttaataaaaatttttggaaagtagtaagtattaaaattagtttaatatttaaataaaatataaataaactgtttaaagtatattgatttcgttgaaatcatataatagaagtataacttcttacgtgcgtacaaagtacacacacattattttttttatgtgatgggtctacgttgaactgcgtttggtctttcaatgatttggaaggaagtggaaatgcttcaggtgtcagtgacattgacatccaggagggggcaatttttaatgtattaattttaatgttattcgcggtgtgcaagtacttggaagggatacgagaaacgatcgtgcgcgaatagcggagaaatattgcaactttcttaaataattcatattgtcaattgaaattgtcaaattgacgtatatttcataccttctgtcattgaagcagaaaaattatatattgctccacaatattgatatgatatgcaattattatataaaggtaaatttaattaattgtattttgcttgcagtactgcattttaataactaattttatttactacatacaattgtttacgttttataacataacctgcatcttattttttcttcttattatttttttggactatggccttgacaattatccagcaaccaggaccaatataattggccaatataattaaaagtgcgaaaaatgttgctgagctatgaaaccaggtgtcgcttttccgaacttgcacggtcccatgtaaacacaaggcttgtaaacaaaagatgaattgacagattgaaatgaaacttcagacacgttcatatgaagagtatatacagtcgaaaaaatgaaagaatacccatgaacgatcatatcaagcacatattttggatttgctgcctttttctataaataacaaacgagagagatagattattaagtgttgtctacaaagcaaaaacgttatccaagacatacgcagttacatatttataattgacagagtgagacggcgatacaatggttcaacggagttataataatttagt

SEQ ID NO: 226 - DNA, 1413 bp, Diabrotica virgifera
gattaccaatacaatttctaccaatcttcatatctaataaattgcttttttagtcaatattttgttgtatgttaatattttaattccgcaagaatcaaacttatttaattaaactaagagaataagcagctgtcaaaaaagtttaaaacgtttagttgctaatgttcccacatcattcaaatgtctcgctagctaagttctgcgtgcggtgagttcaaaatctaacaaccttatagacgcaggttcaattcccaatgcaaatttttatttttttaattttttttatacattttatgattgtaagtatatttattatatttttttttcagaaaatacgatttagttaaaatttttctcaacaattattgttcagaaatcatttctttgtttcatgtttcaatgtgtttgcgtgtgttttattcttttatttttttaatttttggtattgttttaataaaaatttttggaaagtagtaagtattaaaattagtttaatatttaaataaaatataaataaactgtttaaagtatattgatttcgttgaaatcatataatagaagtataacttcttacgtgcgtacaaagtacacacacattattttttttatgtgatgggtctacgttgaactgcgtttggtctttcaatgatttggaaggaagtggaaatgcttcaggtgtcagtgacattgacatccaggagggggcaatttttaatgtattaattttaatgttattcgcggtgtgcaagtacttggaagggatacgagaaacgatcgtgcgcgaatagcggagaaatattgcaactttcttaaataattcatattgtcaattgaaattgtcaaattgacgtatatttcataccttctgtcattgaagcagaaaaattatatattgctccacaatattgatatgatatgcaattattatataaaggtaaatttaattaattgtattttgcttgcagtactgcattttaataactaattttatttactacatacaattgtttacgttttataacataacctgcatcttattttttcttcttattatttttttggactatggccttgacaattatccagcaaccaggactaatataattggccaatataattaaaagtgcgaataaaagtacagagcgtagaaatagaggtcgctttgccgaacttgcacggtcccatattcccatatataaaaactataaattattataacaaatttgtataagtagaactagtagaagtgtaagtagtattttaggcatagactacttggtgtacttaaataaaaataaaacaaccccagtaacattatagtactaagaccaaatgtatttatttggtaaggtagtttggaacaaaaaaaggtttaaagaagactcttcataacgaatcaactacaaaaaccaa

SEQ ID NO: 227 - DNA, 1430 bp, Diabrotica virgifera
gacctctatttggcgcctagactataccttattgtaaatgtttcagtattgtaataaaaaattacaaattaaatacctatttggaaaatgtacctacctagctaatctagctacttacctacctaggtaatgctttgatttaccaacaaaaatctccatctaatatattgcttttttagtctatattttattgtattttaattccacaagaatcaaacttatttgattaaactaagagaataaacaactgtcaaaaaattttaaaacgtttagatgctatatcttcccacttctttcacgtgtctcggtagttaaattctgcgtggggtgagttcaaaataatctaacaacctgataggcgcaggttcaattcccaatgcaaattttatttttttttatacattttatgattgtaagtatatttattatatttttttttcagaaaatacgatttagttaaaattttctcaacaattattgttcagaaatcatttctttgtttcatgtttcaatgtgtttgcgtgtgttttattcttttatttttttaatttttggtattgttttaataaaaatttttggaaagtagtaagtattaaaattagtttaatatttaaataaaatataaataaactgtttaaagtatattgatttcgttgaaatcatataatagaagtataacttcttacgtgcgtacaaagtacacacacattattttttttatgtgatgggtctacgttgaactgcgtttggtctttcaatgatttggaaggaagtggaaatgcttcaggtgtcagtgacattgacatccaggagggggcaatttttaatgtattaattttaatgttattcgcggtgtgcaagtacttggaagggatacgagaaacgatcgtgcgcgaatagcggagaaatattgcaactttcttaaataattcatattgtcaattgaaattgtcaaattgacgtgtatttcatacctactgtcattgaagaagaaaaattatatgttgctccacaatattgatatgatatgcaattattatataaaagtaaatttaattaattgtattttgcttgtagtactgcattttaataattaattttatttactacacacaattgcttaccttttaatatcataacctcaatcttactttctcttcttataatttttttttggccaatataattaaaagtgctaaaaatgttgctgagctatgaaaccaggtgtcgcttttcgaacttgcacggtcccaatacattgtgtatactgtatactatacacatcgacgtacatttcactttgtgttttgatttgatttgtttgaaagtgaaccatgacgcatgggcaaggataaaatggaacaactttattaaacaattgaaaataaataatgcgcaataataaataatgcgcaataataaatagtggc

SEQ ID NO: 228 - DNA, 1438 bp, Diabrotica virgifera
taaaaatgtattgcttcaaaacttactttcagtggcatttcagtgggttttagccatcttatggagagtggtctaacacactttctaggtacagctgtggtttttaaaaggaaatataatgaatcgcttttgttttcgaaatttacattgggaatcccttagtgtccttatatttgccctacagagtttcatttaaactgaaattgggtaatttacatagacctaaagctttcacgtctatatagcctaattagaccacaaaattgacttgctttacgtgaaatgtatgaaccattcaaacatatttatatgacaacaatataatataatacaatataatataaataactgacaacatttaaaattagaatttttacccacaatttttctctgccatgtgtcatctagtacaagaagtatggcaatttagccctactcctcttattgtacatttcttgtaattcctcattttctttttcaattacttcgatcttttaaacttaattcaccaagtttatttgcaatattcttcttgaagtctatagtttgaattccttcaatatatttgtaatgttattcttcagtgtcaatccttgcattccatgaaagaacacgaaaaagatgcagcacgttatttgtccatattcctgctacatacttatttttcgattaacacattcactgccagcgtattcgcggtgtgcaagtacttggaaagggaaacgagaaacgaccctgcgcgagtcgcggagaaatattgcaactatcttaaataattcatattgtcaattgaaattgtcaaattgacgtatatttcataccttctgtcaatgaagcagaaaaattatatattgctccacaatattgatatgatatgcaattattatataaaggtaaatttaattaattgtattttgcttgcagtactgcattttaataactaattttatttactacatacaattgtttacgttttataacataacctgcatcttattttttcttcttattatttttttggactatggccttgacaattatccagcaaccaggaccaatataattggccaatataattaaaagtgcgaaaaatgttgctgagctatgaaaccaggtgtcgcttttccgaacttgcacggtcccatgtaaacacaaggcttgtaaacaaaagatgaattgacagattgaaatgaaacttcagacacgttcatatgaagagtatatacagtcgaaaaaatgaaagaatacccatgaacgatcatatcaagcacatattttggatttgctgcctttttctataaataacaaacgagagagatagattattaagtgttgtctacaaagcaaaaacgttatccaagacatacgcagttacatatttataattgacagagtgagacggcgatacaatggttcaacggagttataataatttagt

SEQ ID NO: 229 - DNA, 1493 bp, Diabrotica virgifera
taaaaatgtattgcttcaaaacttactttcagtggcatttcagtgggttttagccatcttatggagagtggtctaacacactttctaggtacagctgtggtttttaaaaggaaatataatgaatcgcttttgttttcgaaatttacattgggaatcccttagtgtccttatatttgccctacagagtttcatttaaactgaaattgggtaatttacatagacctaaagctttcacgtctatatagcctaattagaccacaaaattgacttgctttacgtgaaatgtatgaaccattcaaacatatttatatgacaacaatataatataatacaatataatataaataactgacaacatttaaaattagaatttttacccacaatttttctctgccatgtgtcatctagtacaagaagtatggcaatttagccctactcctcttattgtacatttcttgtaattcctcattttctttttcaattacttcgatcttttaaacttaattcaccaagtttatttgcaatattcttcttgaagtctatagtttgaattccttcaatatatttgtaatgttattcttcagtgtcaatccttgcattccatgaaagaacacgaaaaagatgcagcacgttatttgtccatattcctgctacatagttatttttcgattaacacattcactgccagcgtatagtaaactggcactttactatacgctaaacgaaaatttggccttgcagattttcctaaaacacgtagcagctacgccactgaatggacttaggatcccctatcgtttcgctggttgcaatagtccggtaactagagacaaaagtgggtcattttgcacacttcatataattctcgttttctgtacttcacgagtatttttttgtcggatatgtattgaatagtatcggtgacaacacactgccctgcgtgacacccctttcaaaacctatgtgggaacaatatgtatctttggagaactttttgtacccttcccctaaaaactaaatatttttttcacttagtgcaattttaatattagtctcaccttatttctagaatacggtcggtctaaatgtataatctcaactttcagcttatacttcgaaaaccgagaagtataaactgtaagaatatttaacgttatatgtattttattaggataatgattgttgaaagtatgtttcccaacacgtgtaagttacatttcgtactctttccatttttattacaaacaaaaatgtttatttagataaactgttgcggaacatactttctcgatgcatgactgaaaagaacgttaacatttatacgtatttgtttttattttgtgtctgatgtgacaacccagatcttagcgaaagcgtagaggacaaaagatgagtttttaagtttcccattgaactttttccgtccttaaatcaaatacaacaactattcacttaagttttctaaacatttttgctaatatgggcccctgcac

SEQ ID NO: 230 - DNA, 1425 bp, Diabrotica virgifera
ttataactctatataccaaaaataaatcacctttaattaaactaacttatttttgtctattatattccaagatgtaactgtattctctaaagcgaataacgttctgtagagaaagttagaggaaaaccaaagagttgcatctgccatctctcggagactagtgtacttacacatgtaactattttttccatagtagaagtcattatttagaaggcattgatgcaataaaaaaaaacattttgagatggaaccctcttcttccaaatgaacgatatgttattcgcggtgtgcaagtacttggaagggatacgagaaacgatcgtgcgcgaatagcggagaaatattgcaactttcttaaataattcatattgtcaattgaaattgtcaaattgacgtatatttcataccttctgtcattgaagcagaaaaattatatattgctccacaatattgatatgatatgcaattattatataaaggtaaatttaattaattgtattttgcttgcagtactgcattttaataactaattttatttactacatacaattgtttacgttttataacataacctgcatcttattttttcttcttattatttttttggactatggccttgacaattatccagcaaccaggactaatataattggccaatataattaaaagtgcgaataaaagtacagagcgtagaaatagaggtcgctttgccgaacttgcacggtcccaataccgtgtattgcatgtcgctgtgactttggttaatagtgatcatttatttggttgagcctgttagtcttgacaaatcttttattttaaatattttgcggcgttttaaattcttctctaaagtttaaaattttctcactttctggatttacttatttttagaaaatggctgcaccagtattaattgcactcgtaaaatagctgattcctccaaggaactaagatttttatcgtgatgctgacccaaccaggcaaacgacagtcgttttgagtagtatggacctctataagaagatcctatatgttttctgcagtcgattgtttgaacttaattagttattaacaaattaaggtcaaaaacggtcaattttcacttttttcgcctatgagtaaagagttaagcattggaaacaaatttgagagtaagaatcttgtaagtcatacaacaactcacgaatttggctttacattcacagaatgattacccactccttttagagagtttagagtcagtttccacagaaagttaccataatttatgttttattttttaaatattgttctgaggctatttatttgtggtatttatgtaatttactattctaatttagaaataagccgcaatttaagttgaaaaatgattttattgacgtttcgacttccactccggaggtcgttatcgaaatacaaaatgta

SEQ ID NO: 231 - DNA, 2789 bp, Diabrotica virgifera
  SmartBlast Evalue=1E-47; Info=Vacuolar fusion protein MON1-like protein A n=2 Tax=Formicidae RepID=E2A1P7_9HYME
gattaccaatacaatttctaccaatcttcatatctaataaattgcttttttagtcaatattttgttgtatgttaatattttaattccgcaagaatcaaacttatttaattaaactaagagaataagcagctgtcaaaaaagtttaaaacgtttagttgctaatgttcccacatcattcaaatgtctcgctagctaagttctgcgtgcggtgagttcaaaatctaacaaccttatagacgcaggttcaattcccaatgcaaatttttatttttttaattttttttatacattttatgattgtaagtatatttattatatttttttttcagaaaatacgatttagttaaaatttttctcaacaattattgttcagaaatcatttctttgtttcatgtttcaatgtgtttgcgtgtgttttattcttttatttttttaatttttggtattgttttaataaaaatttttggaaagtagtaagtattaaaattagtttaatatttaaataaaatataaataaactgtttaaagtatattgatttcgttgaaatcatataatagaagtataacttcttacgtgcgtacaaagtacacacacattattttttttatgtgatgggtctacgttgaactgcgtttggtctttcaatgatttggaaggaagtggaaatgcttcaggtgtcagtgacattgacatccaggagggggcaatttttaatgtattaattttaatgttattcgcggtgtgcaagtacttggaagggatacgagaaacgatcgtgcgcgaatagcggagaaatattgcaactttcttaaataattcatattgtcaattgaaattgtcaaattgacgtatatttcataccttctgtcattgaagcagaaaaattatatattgctccacaatattgatatgatatgcaattattatataaaggtaaatttaattaattgtattttgcttgcagtactgcattttaataactaattttatttactacatacaattgtttacgttttataacataacctgcatcttattttttcttcttattatttttttggactatggccttgacaattatccagcaaccaggaccaatataattggccaatataattaaaagtgcgaaaaatgttgctgagctatgaaaccaggtgtcgctttgccggacttgcacggtcccaatagcatagataatttcaatgtaaagcgaataatctttaaattgtttttatttatttatatttgttagtagtcagtgttaccacccctagcccttatacaagctacaatatgcgtgggcatgcacctaatcaaattgtcaacattttgtggtaggttgctccactcttcaagagcagcttgtactagccgtgcggtgttttgtggattatcccggtgagctctaatgtttcttttaagcgtataccacaaatgctctatagggttaaggtcgggtgagtaagcaggccattccagaccagtgttatcatttttctttaagtatgtggagatgcattatcatacgtggaaattaaattttcctcttcagagcttaactccggttctagaacccaatcaacatacctgcgaactcctgtctccttagattcgatgctagcgtattcctctacggcctacggtcatgtttcttacttatccgaagactgtcaagtgtgtttgttacttctaacagtggaaagggatgtattttttactttgagtgaagcgaaacagaaaatcgtagaaaaattaagaagaaacaactgcttggaatccatcaacgaatcactggcagctccgggatatagttgtgcgagtgctggttttgtagagatacattatttgtataaatgtaagtccactgcccagttctatcaacctgttttaagccccccttatactcaagcgaagatctatctgactgaactttacaagggagctcatcaaagactgcataattctaccaaaccacttaaacttatgtttgaacggagttcgagggaggcgattcttgcctgggacactaaggggtttgaattgttcgttgtttttgagcctttgatcgatactcgttagcgattctcctggttggtaggcttttaaattggattaaaaaacaagaagataaactatttcacctaaatgcacctactttttaaatgaaggtacctgttctcacttattttaacctttgtcatgggcaaattataactcacacattaaacaaaagaatatttttatggacaccatcgaaatggtgagaatttgtgaattcttttgagtttgcctgtggattctatagtccacaatagatctctatcccatcattgtacaaaaagtggtgaattctttttagaattcgcccttataataatataacatagtacattttgggaacatagaaaatataataaaattgttttaaatgtatgtaaaatacaaatattgatattatttctagctttgaattaaagcgaatgtaaaaaactagcatacgaaatcaaacagtatttattttaaagcaatttaatcatcaatacataaaaattaaagaaaaccatgaaatcttgaaatcacaaattgaaactatttgtttaaagtcaattcgcggtgtgcaagtacttggagggggatacgagaaacgatcgagcgcgaatagcggagaaatattgcaactttcttaaataattcatattgtcaattgaaattgtcaaattgacatatgtttcatacctactgtcattgaagaagataaaatatatattgctccacaatattgatatga

SEQ ID NO: 232 - DNA, 1443 bp, Diabrotica virgifera
tatttctgaactttgtttttaagttattgcttatgcagtatttttcttattttccgttttgtgagcttatgttccgtttccttgtttatttcacataaactttttattattgtcaggagaatagcatatatcgatagttgttctacatttattatattacgatagttgatcacttaaatcgcaactaacacataattctatgatatagttgttccattttatctttgcccatgcagcacgtttcattttcaaacaattgagtcataacagaaagtgaaacgtatgtcgatgtgtatattcgctgtatgcaagtacttggaggggatacgagaaacgatcgtgcgcgaatagcggagaaatcttgcaactttcttaaataattcatattgtcaattgaaattgtcaaattgacgtatatttcataccttctgtcattgaagcagaaaaattatatattgctccacaatattgatatgatatgcaattattatataaaggtaaatttaattaattgtattttgcttgcagtactgcattttaataactaattttatttactacatacaattgtttacgttttataacataacctgcatcttattttttcttcttattatttttttggactatggccttgacaattatccagcaaccaggactaatataattggccaatataattaaaagtgcgaataaaagtacagagcgtagaaatagaggtcgctttgccgaacttgcacggtcccaataccgtgtattgcatgtcgctgtgactttggttaatagtgatcatttatttggttgagcctgttagtcttgacaaatcttttattttaaatattttgcggcgttttaaattcttctctaaagtttaaaattttctcactttctggatttacttatttttagaaaatggctgcaccagtattaattgcactcgtaaaatagctgattcctccaaggaactaagatttttatcgtgatgctgacccaaccaggcaaacgacagtcgttttgagtagtatggacctctataagaagatcctatatgttttctgcagtcgattgtttgaacttaattagttattaacaaattaaggtcaaaaacggtcaattttcacttttttcgcctatgagtaaagagttaagcattggaaacaaatttgagagtaagaatcttgtaagtcatacaacaactcacgaatttggctttacattcacagaatgattacccactccttttagagagtttagagtcagtttccacagaaagttaccataatttatgttttattttttaaatattgttctgaggctatttatttgtggtatttatgtaatttactattctaatttagaaataagccgcaatttaagttgaaaaatgattttattgacgtttcgacttccactccggaggtcgttatcgaaatacaaaatgta

SEQ ID NO: 233 - DNA, 1412 bp, Diabrotica virgifera
catacatattgttaaatttacttacatgcaaataaatccgtttatattcaatgttctacataatatgtattttcttttcgttaatttaaaaaataaatttactgtattttgccttttgaaataaagctttgagaattcaataaaacgacactacctatgaatcactaaacaaatactatacaggttgatgttttagtattcaaaacaacctcttccttttgacattctggaaattagctaaaagggttttattatttacaacgtattcgtggtgtgcaagtacttggaaggggaaacgagaaacgaccctgcgcgagtcgcggagaaatattgcaactatcttaaataattcatattgtcaattgaaattgtcaaattgacgtatatttcataccttctgtcaatgaagcagaaaaattatatattgctccacaatattgatatgatatgcaattattatataaaggtaaatttaattaattgtattttgcttgcagtactgcattttaataactaattttatttactacatacaattgtttacgttttataacataacctgcatcttattttttcttcttattatttttttggactatggccttgacaattatccagcaaccaggactaatataattggccaatataattaaaagtgcgaataaaagtacagagcgtagaaatagaggtcgctttgccgaacttgcacggtcccaataccgtgtattgcatgtcgctgtgactttggttaatagtgatcatttatttggttgagcctgttagtcttgacaaatcttttattttaaatattttgcggcgttttaaattcttctctaaagtttaaaattttctcactttctggatttacttatttttagaaaatggctgcaccagtattaattgcactcgtaaaatagctgattcctccaaggaactaagatttttatcgtgatgctgacccaaccaggcaaacgacagtcgttttgagtagtatggacctctataagaagatcctatatgttttctgcagtcgattgtttgaacttaattagttattaacaaattaaggtcaaaaacggtcaattttcacttttttcgcctatgagtaaagagttaagcattggaaacaaatttgagagtaagaatcttgtaagtcatacaacaactcacgaatttggctttacattcacagaatgattacccactccttttagagagtttagagtcagtttccacagaaagttaccataatttatgttttattttttaaatattgttctgaggctatttatttgtggtatttatgtaatttactattctaatttagaaataagccgcaatttaagttgaaaaatgattttattgacgtttcgacttccactccggaggtcgttatcgaaatacaaaatgta

SEQ ID NO: 234 - DNA, 1372 bp, Diabrotica virgifera
taaaaatgtattgcttcaaaacttactttcagtggcatttcagtgggttttagccatcttatggagagtggtctaacacactttctaggtacagctgtggtttttaaaaggaaatataatgaatcgcttttgttttcgaaatttacattgggaatcccttagtgtccttatatttgccctacagagtttcatttaaactgaaattgggtaatttacatagacctaaagctttcacgtctatatagcctaattagaccacaaaattgacttgctttacgtgaaatgtatgaaccattcaaacatatttatatgacaacaatataatataatacaatataatataaataactgacaacatttaaaattagaatttttacccacaatttttctctgccatgtgtcatctagtacaagaagtatggcaatttagccctactcctcttattgtacatttcttgtaattcctcattttctttttcaattacttcgatcttttaaacttaattcaccaagtttatttgcaatattcttcttgaagtctatagtttgaattccttcaatatatttgtaatgttattcttcagtgtcaatccttgcattccatgaaagaacacgaaaaagatgcagcacgttatttgtccatattcctgctacatacttatttttcgattaacacattcactgccagcgtattcgcggtgtgcaagtacttggaaagggaaacgagaaacgaccctgcgcgagtcgcggagaaatattgcaactatcttaaataattcatattgtcaattgaaattgtcaaattgacgtatatttcataccttctgtcaatgaagcagaaaaattatatattgctccacaatattgatatgatatgcaattattatataaaggtaaatttaattaattgtattttgcttgcagtactgcattttaataactaattttatttactacatacaattgtttacgttttataacataacctgcatcttattttttcttcttattatttttttggactatggccttgacaattatccagcaaccaggactaatataattggccaatataattaaaagtgcgaataaaagtacagagcgtagaaatagaggtcgctttgccgaacttgcacggtcccatattcccatatataaaaactataaattattataacaaatttgtataagtagaactagtagaagtgtaagtagtattttaggcatagactacttggtgtacttaaataaaaataaaacaaccccagtaacattatagtactaagaccaaatgtatttatttggtaaggtagtttggaacaaaaaaaggtttaaagaagactcttcataacgaatcaactacaaaaaccaa

SEQ ID NO: 235 - DNA, 1384 bp, Diabrotica virgifera
gggtggcaatagtgtaacgattgaccaaaataagagacacatcgatctgaccgttcaaaaattatgacgaatacaaatttctgtcaaaatttgaaactcggcctgtacatcactaaacaaggagggcagacacccttcaatggtcatttgtcattccccataggagcctttataagaggaaggagtatgtaccgttcctcataactcaccctgtatcttcttcgtacgttattggtattcgcggtgtgcaagtacttggaaagggaaacgagaaacgaccctgcgcgagtcgcggagaaatattgcaactatcttaaataattcatattgtcaattgaaattgtcaaattgacgtatatttcataccttctgtcaatgaagcagaaaaattacatattgctccacaatattgatatgatatgcaattattatataaaggtaaatttaattaattgtattttgcttgcagtactgcattttaataactaattttatttactacatacaattgtttacgttttataacataacctgcatcttattttttcttcttattatttttttggactatggccttgacaattatccagcaaccaggactaatataattggccaatataattaaaagtgcgaataaaagtacagagcgtagaaatagaggtcgctttgccgaacttgcacggtcccaataccgtgtattgcatgtcgctgtgactttggttaatagtgatcatttatttggttgagcctgttagtcttgacaaatcttttattttaaatattttgcggcgttttaaattcttctctaaagtttaaaattttctcactttctggatttacttatttttagaaaatggctgcaccagtattaattgcactcgtaaaatagctgattcctccaaggaactaagatttttatcgtgatgctgacccaaccaggcaaacgacagtcgttttgagtagtatggacctctataagaagatcctatatgttttctgcagtcgattgtttgaacttaattagttattaacaaattaaggtcaaaaacggtcaattttcacttttttcgcctatgagtaaagagttaagcattggaaacaaatttgagagtaagaatcttgtaagtcatacaacaactcacgaatttggctttacattcacagaatgattacccactccttttagagagtttagagtcagtttccacagaaagttaccataatttatgttttattttttaaatattgttctgaggctatttatttgtggtatttatgtaatttactattctaatttagaaataagccgcaatttaagttgaaaaatgattttattgacgtttcgacttccactccggaggtcgttatcgaaatacaaaatgta

SEQ ID NO: 236 - DNA, 1318 bp, Diabrotica virgifera
gattaccaatacaatttctaccaatcttcatatctaataaattgcttttttagtcaatattttgttgtatgttaatattttaattccgcaagaatcaaacttatttaattaaactaagagaataagcagctgtcaaaaaagtttaaaacgtttagttgctaatgttcccacatcattcaaatgtctcgctagctaagttctgcgtgcggtgagttcaaaatctaacaaccttatagacgcaggttcaattcccaatgcaaatttttatttttttaattttttttatacattttatgattgtaagtatatttattatatttttttttcagaaaatacgatttagttaaaatttttctcaacaattattgttcagaaatcatttctttgtttcatgtttcaatgtgtttgcgtgtgttttattcttttatttttttaatttttggtattgttttaataaaaatttttggaaagtagtaagtattaaaattagtttaatatttaaataaaatataaataaactgtttaaagtatattgatttcgttgaaatcatataatagaagtataacttcttacgtgcgtacaaagtacacacacattattttttttatgtgatgggtctacgttgaactgcgtttggtctttcaatgatttggaaggaagtggaaatgcttcaggtgtcagtgacattgacatccaggagggggcaatttttaatgtattaattttaatgttattcgcggtgtgcaagtacttggaagggatacgagaaacgatcgtgcgcgaatagcggagaaatattgcaactttcttaaataattcatattgtcaattgaaattgtcaaattgacgtgtatttcatacctactgtcattgaagaagaaaaattatatgttgctccacaatattgatatgatatgcaattattatataaaagtaaatttaattaattgtattttgcttgtagtactgcattttaataattaattttatttactacacacaattgcttaccttttaatatcataacctcaatcttactttctcttcttataatttttttttggccaatataattaaaagtgctaaaaatgttgctgagctatgaaaccaggtgtcgcttttcgaacttgcacggtcccaatacattgtgtatactgtatactatacacatcgacgtacatttcactttgtgttttgatttgatttgtttgaaagtgaaccatgacgcatgggcaaggataaaatggaacaactttattaaacaattgaaaataaataatgcgcaataataaataatgcgcaataataaatagtggc

SEQ ID NO: 237 - DNA, 1370 bp, Diabrotica virgifera
acaaaaaatatacaaattatatacaaaaaacttacaaatggtttgtttgttgaaatattagacataatgtcgggatcttttaaatacctaataacaatatttttctgtgatactccaacaaaaaagtttaatgaattgagacatcatatctatgatgcacagttagaattttttatattaatttttcaatataccgagaatttgagaatatctcaaaccaatattcgcggtgtgcaagtacttggaagggaaacgagaaacgaccgtgcgcgagtcgcggagaaatattgcaactatcttaaataattcatattgtcaattgaaattgtcaaattgacgtatatttcataccttctgtcattgacgcagaaaaattatatattgctccacaatattgatatgatatgcaattattatataaaggtaaatttaattaattgtattttgcttgcagtactgcattttaataactgattttatttactacatacaattgtttacgtttgctaaacataacctgcatcttattttttcttcttattatttttttggactatggtcttgacaattatccagcaaccaggactaatataattggccaatataattaaaagtgcgaataaaagtacagagcgtagaaatagaggtcgctttgccgaacttgcacggtcccaataccgtgtattgcatgtcgctgtgactttggttaatagtgatcatttatttggttgagcctgttagtcttgacaaatcttttattttaaatattttgcggcgttttaaattcttctctaaagtttaaaattttctcactttctggatttacttatttttagaaaatggctgcaccagtattaattgcactcgtaaaatagctgattcctccaaggaactaagatttttatcgtgatgctgacccaaccaggcaaacgacagtcgttttgagtagtatggacctctataagaagatcctatatgttttctgcagtcgattgtttgaacttaattagttattaacaaattaaggtcaaaaacggtcaattttcacttttttcgcctatgagtaaagagttaagcattggaaacaaatttgagagtaagaatcttgtaagtcatacaacaactcacgaatttggctttacattcacagaatgattacccactccttttagagagtttagagtcagtttccacagaaagttaccataatttatgttttattttttaaatattgttctgaggctatttatttgtggtatttatgtaatttactattctaatttagaaataagccgcaatttaagttgaaaaatgattttattgacgtttcgacttccactccggaggtcgttatcgaaatacaaaatgta

SEQ ID NO: 238 - DNA, 1308 bp, Diabrotica virgifera
ttataactctatataccaaaaataaatcacctttaattaaactaacttatttttgtctattatattccaagatgtaactgtattctctaaagcgaataacgttctgtagagaaagttagaggaaaaccaaagagttgcatctgccatctctcggagactagtgtacttacacatgtaactattttttccatagtagaagtcattatttagaaggcattgatgcaataaaaaaaaacattttgagatggaaccctcttcttccaaatgaacgatatgttattcgcggtgtgcaagtacttggaagggatacgagaaacgatcgtgcgcgaatagcggagaaatattgcaactttcttaaataattcatattgtcaattgaaattgtcaaattgacgtatatttcataccttctgtcattgaagcagaaaaattatatattgctccacaatattgatatgatatgcaattattatataaaggtaaatttaattaattgtattttgcttgcagtactgcattttaataactaattttatttactacatacaattgtttacgttttataacataacctgcatcttattttttcttcttattatttttttggactatggccttgacaattatccagcaaccaggactaatataattggccaatataattaaaagtgcgaataaaagtacagagcgtagaaatagaggtcgctttgccgaacttgcacggtcccaataaacctgaaatgatacttcattataacaaaacaaaaggagctgttgacgtagtagccaaatggcacaacaatacacaacacagcgcaaaacacgcaggtagttttttcactatttactttattatttcagccataaaggttttcaaaatttggaaaataaaaaatccaaattacgatgggaaacatttgtatgcaagacaaagttttttatgagacttagggtgggaattggtataagaaaatgttatctagtcatcaaaacacaaataatagcctcagttacgtcaaatgatgaaaattgcatattctatcctgaattagacgtttcagatgttcctcctggggctaacagagttgcgggaccatgtcgacaaggtcggtgctacttatgccagagaaaaaaaagactgaaagtcccggcattaccctattgtgtgtaaaaactttgtgttgctcactctgtaaaaaatgtcatgtgtttgtcttgcaacgataattaacttttttaagaagaaataagtattttgtttgtaaaatgttacttcatagtataataaacaagttctaattatctttc

SEQ ID NO: 239 - DNA, 1326 bp, Diabrotica virgifera
tatttctgaactttgtttttaagttattgcttatgcagtatttttcttattttccgttttgtgagcttatgttccgtttccttgtttatttcacataaactttttattattgtcaggagaatagcatatatcgatagttgttctacatttattatattacgatagttgatcacttaaatcgcaactaacacataattctatgatatagttgttccattttatctttgcccatgcagcacgtttcattttcaaacaattgagtcataacagaaagtgaaacgtatgtcgatgtgtatattcgctgtatgcaagtacttggaggggatacgagaaacgatcgtgcgcgaatagcggagaaatcttgcaactttcttaaataattcatattgtcaattgaaattgtcaaattgacgtatatttcataccttctgtcattgaagcagaaaaattatatattgctccacaatattgatatgatatgcaattattatataaaggtaaatttaattaattgtattttgcttgcagtactgcattttaataactaattttatttactacatacaattgtttacgttttataacataacctgcatcttattttttcttcttattatttttttggactatggccttgacaattatccagcaaccaggactaatataattggccaatataattaaaagtgcgaataaaagtacagagcgtagaaatagaggtcgctttgccgaacttgcacggtcccaataaacctgaaatgatacttcattataacaaaacaaaaggagctgttgacgtagtagccaaatggcacaacaatacacaacacagcgcaaaacacgcaggtagttttttcactatttactttattatttcagccataaaggttttcaaaatttggaaaataaaaaatccaaattacgatgggaaacatttgtatgcaagacaaagttttttatgagacttagggtgggaattggtataagaaaatgttatctagtcatcaaaacacaaataatagcctcagttacgtcaaatgatgaaaattgcatattctatcctgaattagacgtttcagatgttcctcctggggctaacagagttgcgggaccatgtcgacaaggtcggtgctacttatgccagagaaaaaaaagactgaaagtcccggcattaccctattgtgtgtaaaaactttgtgttgctcactctgtaaaaaatgtcatgtgtttgtcttgcaacgataattaacttttttaagaagaaataagtattttgtttgtaaaatgttacttcatagtataataaacaagttctaattatctttc

SEQ ID NO: 240 - DNA, 1266 bp, Diabrotica virgifera
tccgtctcactcgtgctttctgttacaaatttttttatggataactcttatattttttttcgtcaatgttagcgttttgtagcatttttatcataatcaaggattgtgataagtaggtattcgcggtgtgcaagtacttggaagggaatacgagaaacgatcgtgcgcgaatagcggagaaatattgcaactttcttaaataattcatattgtcaattgaaattgtcaaattgacgtacatttcatacctactgtcattgaagaagaaaaattatatattgctccacaatattgatatgatatgcaattattatataaaggtaaatttaattaattgtattttgcttgcagtactgcattttaataactaattttatttactacatacaattgtttacgttttataacataacctgcatcttattttttcttcttattatttttttggactatggccttgacaattatccagcaaccaggactaatataattggccaatataattaaaagtgcgaataaaagtacagagcgtagaaatagaggtcgctttgccgaacttgcacggtcccaataccgtgtattgcatgtcgctgtgactttggttaatagtgatcatttatttggttgagcctgttagtcttgacaaatcttttattttaaatattttgcggcgttttaaattcttctctaaagtttaaaattttctcactttctggatttacttatttttagaaaatggctgcaccagtattaattgcactcgtaaaatagctgattcctccaaggaactaagatttttatcgtgatgctgacccaaccaggcaaacgacagtcgttttgagtagtatggacctctataagaagatcctatatgttttctgcagtcgattgtttgaacttaattagttattaacaaattaaggtcaaaaacggtcaattttcacttttttcgcctatgagtaaagagttaagcattggaaacaaatttgagagtaagaatcttgtaagtcatacaacaactcacgaatttggctttacattcacagaatgattacccactccttttagagagtttagagtcagtttccacagaaagttaccataatttatgttttattttttaaatattgttctgaggctatttatttgtggtatttatgtaatttactattctaatttagaaataagccgcaatttaagttgaaaaatgattttattgacgtttcgacttccactccggaggtcgttatcgaaatacaaaatgta

SEQ ID NO: 241 - DNA, 1295 bp, Diabrotica virgifera
catacatattgttaaatttacttacatgcaaataaatccgtttatattcaatgttctacataatatgtattttcttttcgttaatttaaaaaataaatttactgtattttgccttttgaaataaagctttgagaattcaataaaacgacactacctatgaatcactaaacaaatactatacaggttgatgttttagtattcaaaacaacctcttccttttgacattctggaaattagctaaaagggttttattatttacaacgtattcgtggtgtgcaagtacttggaaggggaaacgagaaacgaccctgcgcgagtcgcggagaaatattgcaactatcttaaataattcatattgtcaattgaaattgtcaaattgacgtatatttcataccttctgtcaatgaagcagaaaaattatatattgctccacaatattgatatgatatgcaattattatataaaggtaaatttaattaattgtattttgcttgcagtactgcattttaataactaattttatttactacatacaattgtttacgttttataacataacctgcatcttattttttcttcttattatttttttggactatggccttgacaattatccagcaaccaggactaatataattggccaatataattaaaagtgcgaataaaagtacagagcgtagaaatagaggtcgctttgccgaacttgcacggtcccaataaacctgaaatgatacttcattataacaaaacaaaaggagctgttgacgtagtagccaaatggcacaacaatacacaacacagcgcaaaacacgcaggtagttttttcactatttactttattatttcagccataaaggttttcaaaatttggaaaataaaaaatccaaattacgatgggaaacatttgtatgcaagacaaagttttttatgagacttagggtgggaattggtataagaaaatgttatctagtcatcaaaacacaaataatagcctcagttacgtcaaatgatgaaaattgcatattctatcctgaattagacgtttcagatgttcctcctggggctaacagagttgcgggaccatgtcgacaaggtcggtgctacttatgccagagaaaaaaaagactgaaagtcccggcattaccctattgtgtgtaaaaactttgtgttgctcactctgtaaaaaatgtcatgtgtttgtcttgcaacgataattaacttttttaagaagaaataagtattttgtttgtaaaatgttacttcatagtataataaacaagttctaattatctttc

SEQ ID NO: 242 - DNA, 2748 bp, Diabrotica virgifera
  SmartBlast Evalue=1E-47; Info=Vacuolar fusion protein MON1-like protein A n=2 Tax=Formicidae RepID=E2A1P7_9HYME
taaaaatgtattgcttcaaaacttactttcagtggcatttcagtgggttttagccatcttatggagagtggtctaacacactttctaggtacagctgtggtttttaaaaggaaatataatgaatcgcttttgttttcgaaatttacattgggaatcccttagtgtccttatatttgccctacagagtttcatttaaactgaaattgggtaatttacatagacctaaagctttcacgtctatatagcctaattagaccacaaaattgacttgctttacgtgaaatgtatgaaccattcaaacatatttatatgacaacaatataatataatacaatataatataaataactgacaacatttaaaattagaatttttacccacaatttttctctgccatgtgtcatctagtacaagaagtatggcaatttagccctactcctcttattgtacatttcttgtaattcctcattttctttttcaattacttcgatcttttaaacttaattcaccaagtttatttgcaatattcttcttgaagtctatagtttgaattccttcaatatatttgtaatgttattcttcagtgtcaatccttgcattccatgaaagaacacgaaaaagatgcagcacgttatttgtccatattcctgctacatacttatttttcgattaacacattcactgccagcgtattcgcggtgtgcaagtacttggaaagggaaacgagaaacgaccctgcgcgagtcgcggagaaatattgcaactatcttaaataattcatattgtcaattgaaattgtcaaattgacgtatatttcataccttctgtcaatgaagcagaaaaattatatattgctccacaatattgatatgatatgcaattattatataaaggtaaatttaattaattgtattttgcttgcagtactgcattttaataactaattttatttactacatacaattgtttacgttttataacataacctgcatcttattttttcttcttattatttttttggactatggccttgacaattatccagcaaccaggaccaatataattggccaatataattaaaagtgcgaaaaatgttgctgagctatgaaaccaggtgtcgctttgccggacttgcacggtcccaatagcatagataatttcaatgtaaagcgaataatctttaaattgtttttatttatttatatttgttagtagtcagtgttaccacccctagcccttatacaagctacaatatgcgtgggcatgcacctaatcaaattgtcaacattttgtggtaggttgctccactcttcaagagcagcttgtactagccgtgcggtgttttgtggattatcccggtgagctctaatgtttcttttaagcgtataccacaaatgctctatagggttaaggtcgggtgagtaagcaggccattccagaccagtgttatcatttttctttaagtatgtggagatgcattatcatacgtggaaattaaattttcctcttcagagcttaactccggttctagaacccaatcaacatacctgcgaactcctgtctccttagattcgatgctagcgtattcctctacggcctacggtcatgtttcttacttatccgaagactgtcaagtgtgtttgttacttctaacagtggaaagggatgtattttttactttgagtgaagcgaaacagaaaatcgtagaaaaattaagaagaaacaactgcttggaatccatcaacgaatcactggcagctccgggatatagttgtgcgagtgctggttttgtagagatacattatttgtataaatgtaagtccactgcccagttctatcaacctgttttaagccccccttatactcaagcgaagatctatctgactgaactttacaagggagctcatcaaagactgcataattctaccaaaccacttaaacttatgtttgaacggagttcgagggaggcgattcttgcctgggacactaaggggtttgaattgttcgttgtttttgagcctttgatcgatactcgttagcgattctcctggttggtaggcttttaaattggattaaaaaacaagaagataaactatttcacctaaatgcacctactttttaaatgaaggtacctgttctcacttattttaacctttgtcatgggcaaattataactcacacattaaacaaaagaatatttttatggacaccatcgaaatggtgagaatttgtgaattcttttgagtttgcctgtggattctatagtccacaatagatctctatcccatcattgtacaaaaagtggtgaattctttttagaattcgcccttataataatataacatagtacattttgggaacatagaaaatataataaaattgttttaaatgtatgtaaaatacaaatattgatattatttctagctttgaattaaagcgaatgtaaaaaactagcatacgaaatcaaacagtatttattttaaagcaatttaatcatcaatacataaaaattaaagaaaaccatgaaatcttgaaatcacaaattgaaactatttgtttaaagtcaattcgcggtgtgcaagtacttggagggggatacgagaaacgatcgagcgcgaatagcggagaaatattgcaactttcttaaataattcatattgtcaattgaaattgtcaaattgacatatgtttcatacctactgtcattgaagaagataaaatatatattgctccacaatattgatatga

SEQ ID NO: 243 - DNA, 1316 bp, Diabrotica virgifera
gggaaggtccgataagtacttagcatctccgccgatggcgccactatcgcaaaagaaatctactatcgtgtaatgcatttccttatatgagtccttatattagtcatacaactaatgtcaaaattttgaacacggcccaaaatagcgacaattctaccttatcagttattcgcggtgtgcaagtacttggaaagggaaacgagaaacgaccgtgcgcgagtcgcggagaaatattgcaactatcttaaataattcatattgtcaattgaaattgtcaaattgacgtatatttcataccttctgtcattgacgcagaaaaattatatattgctccacaatattgatatgatatgcaattattatataaaggtaaatttaattaattgtattttgcttgcagtactgcattttaataactgattttatttactacatacaattgtttacgtttgctaaacataacctgcatcttattttttcttcttattatttttttggactatggtcttgacaattatccagcaaccaggactaatataattggccaatataattaaaagtgcgaataaaagtacagagcgtagaaatagaggtcgctttgccgaacttgcacggtcccaataccgtgtattgcatgtcgctgtgactttggttaatagtgatcatttatttggttgagcctgttagtcttgacaaatcttttattttaaatattttgcggcgttttaaattcttctctaaagtttaaaattttctcactttctggatttacttatttttagaaaatggctgcaccagtattaattgcactcgtaaaatagctgattcctccaaggaactaagatttttatcgtgatgctgacccaaccaggcaaacgacagtcgttttgagtagtatggacctctataagaagatcctatatgttttctgcagtcgattgtttgaacttaattagttattaacaaattaaggtcaaaaacggtcaattttcacttttttcgcctatgagtaaagagttaagcattggaaacaaatttgagagtaagaatcttgtaagtcatacaacaactcacgaatttggctttacattcacagaatgattacccactccttttagagagtttagagtcagtttccacagaaagttaccataatttatgttttattttttaaatattgttctgaggctatttatttgtggtatttatgtaatttactattctaatttagaaataagccgcaatttaagttgaaaaatgattttattgacgtttcgacttccactccggaggtcgttatcgaaatacaaaatgta

SEQ ID NO: 244 - DNA, 1267 bp, Diabrotica virgifera
gggtggcaatagtgtaacgattgaccaaaataagagacacatcgatctgaccgttcaaaaattatgacgaatacaaatttctgtcaaaatttgaaactcggcctgtacatcactaaacaaggagggcagacacccttcaatggtcatttgtcattccccataggagcctttataagaggaaggagtatgtaccgttcctcataactcaccctgtatcttcttcgtacgttattggtattcgcggtgtgcaagtacttggaaagggaaacgagaaacgaccctgcgcgagtcgcggagaaatattgcaactatcttaaataattcatattgtcaattgaaattgtcaaattgacgtatatttcataccttctgtcaatgaagcagaaaaattacatattgctccacaatattgatatgatatgcaattattatataaaggtaaatttaattaattgtattttgcttgcagtactgcattttaataactaattttatttactacatacaattgtttacgttttataacataacctgcatcttattttttcttcttattatttttttggactatggccttgacaattatccagcaaccaggactaatataattggccaatataattaaaagtgcgaataaaagtacagagcgtagaaatagaggtcgctttgccgaacttgcacggtcccaataaacctgaaatgatacttcattataacaaaacaaaaggagctgttgacgtagtagccaaatggcacaacaatacacaacacagcgcaaaacacgcaggtagttttttcactatttactttattatttcagccataaaggttttcaaaatttggaaaataaaaaatccaaattacgatgggaaacatttgtatgcaagacaaagttttttatgagacttagggtgggaattggtataagaaaatgttatctagtcatcaaaacacaaataatagcctcagttacgtcaaatgatgaaaattgcatattctatcctgaattagacgtttcagatgttcctcctggggctaacagagttgcgggaccatgtcgacaaggtcggtgctacttatgccagagaaaaaaaagactgaaagtcccggcattaccctattgtgtgtaaaaactttgtgttgctcactctgtaaaaaatgtcatgtgtttgtcttgcaacgataattaacttttttaagaagaaataagtattttgtttgtaaaatgttacttcatagtataataaacaagttctaattatctttc

SEQ ID NO: 245 - DNA, 1253 bp, Diabrotica virgifera
acaaaaaatatacaaattatatacaaaaaacttacaaatggtttgtttgttgaaatattagacataatgtcgggatcttttaaatacctaataacaatatttttctgtgatactccaacaaaaaagtttaatgaattgagacatcatatctatgatgcacagttagaattttttatattaatttttcaatataccgagaatttgagaatatctcaaaccaatattcgcggtgtgcaagtacttggaagggaaacgagaaacgaccgtgcgcgagtcgcggagaaatattgcaactatcttaaataattcatattgtcaattgaaattgtcaaattgacgtatatttcataccttctgtcattgacgcagaaaaattatatattgctccacaatattgatatgatatgcaattattatataaaggtaaatttaattaattgtattttgcttgcagtactgcattttaataactgattttatttactacatacaattgtttacgtttgctaaacataacctgcatcttattttttcttcttattatttttttggactatggtcttgacaattatccagcaaccaggactaatataattggccaatataattaaaagtgcgaataaaagtacagagcgtagaaatagaggtcgctttgccgaacttgcacggtcccaataaacctgaaatgatacttcattataacaaaacaaaaggagctgttgacgtagtagccaaatggcacaacaatacacaacacagcgcaaaacacgcaggtagttttttcactatttactttattatttcagccataaaggttttcaaaatttggaaaataaaaaatccaaattacgatgggaaacatttgtatgcaagacaaagttttttatgagacttagggtgggaattggtataagaaaatgttatctagtcatcaaaacacaaataatagcctcagttacgtcaaatgatgaaaattgcatattctatcctgaattagacgtttcagatgttcctcctggggctaacagagttgcgggaccatgtcgacaaggtcggtgctacttatgccagagaaaaaaaagactgaaagtcccggcattaccctattgtgtgtaaaaactttgtgttgctcactctgtaaaaaatgtcatgtgtttgtcttgcaacgataattaacttttttaagaagaaataagtattttgtttgtaaaatgttacttcatagtataataaacaagttctaattatctttc

SEQ ID NO: 246 - DNA, 1176 bp, Diabrotica virgifera
ttataactctatataccaaaaataaatcacctttaattaaactaacttatttttgtctattatattccaagatgtaactgtattctctaaagcgaataacgttctgtagagaaagttagaggaaaaccaaagagttgcatctgccatctctcggagactagtgtacttacacatgtaactattttttccatagtagaagtcattatttagaaggcattgatgcaataaaaaaaaacattttgagatggaaccctcttcttccaaatgaacgatatgttattcgcggtgtgcaagtacttggaagggatacgagaaacgatcgtgcgcgaatagcggagaaatattgcaactttcttaaataattcatattgtcaattgaaattgtcaaattgacgtatatttcataccttctgtcattgaagcagaaaaattatatattgctccacaatattgatatgatatgcaattattatataaaggtaaatttaattaattgtattttgcttgcagtactgcattttaataactaattttatttactacatacaattgtttacgttttataacataacctgcatcttattttttcttcttattatttttttggactatggccttgacaattatccagcaaccaggactaatataattggccaatataattaaaagtgcgaattttagtatagagcgtagaaataggggtcgctttgccgaacttgcacggtcccaatacgctgcgagttcgtacatagaggggatatttaaaagttcgtgagcgccagtagtgacaagtcaatgaattttactggaaattttacataaatgtcaaagtaattaattcaaaacattgaaattaaaaacattaataggaaaaaatattagttgtgcaaagctgtggtgtatatttttaccttaaatatacttacgttttaaatactgaatttaagtttttttaatatttcgtaatatgtaattataaattaaacttgagatcataattgctattttatttttaatcaaaagttattcgggctcaaaaattgcaatttttagatttttttttaagttgaaccgcgtgtatctcgaaaactatacattttacgaaaaaaactagtaaggacattttttgcttagcatgacccaaaagatacaaaaaaaaatgtttttttgcgaaaa

SEQ ID NO: 247 - DNA, 1149 bp, Diabrotica virgifera
tccgtctcactcgtgctttctgttacaaatttttttatggataactcttatattttttttcgtcaatgttagcgttttgtagcatttttatcataatcaaggattgtgataagtaggtattcgcggtgtgcaagtacttggaagggaatacgagaaacgatcgtgcgcgaatagcggagaaatattgcaactttcttaaataattcatattgtcaattgaaattgtcaaattgacgtacatttcatacctactgtcattgaagaagaaaaattatatattgctccacaatattgatatgatatgcaattattatataaaggtaaatttaattaattgtattttgcttgcagtactgcattttaataactaattttatttactacatacaattgtttacgttttataacataacctgcatcttattttttcttcttattatttttttggactatggccttgacaattatccagcaaccaggactaatataattggccaatataattaaaagtgcgaataaaagtacagagcgtagaaatagaggtcgctttgccgaacttgcacggtcccaataaacctgaaatgatacttcattataacaaaacaaaaggagctgttgacgtagtagccaaatggcacaacaatacacaacacagcgcaaaacacgcaggtagttttttcactatttactttattatttcagccataaaggttttcaaaatttggaaaataaaaaatccaaattacgatgggaaacatttgtatgcaagacaaagttttttatgagacttagggtgggaattggtataagaaaatgttatctagtcatcaaaacacaaataatagcctcagttacgtcaaatgatgaaaattgcatattctatcctgaattagacgtttcagatgttcctcctggggctaacagagttgcgggaccatgtcgacaaggtcggtgctacttatgccagagaaaaaaaagactgaaagtcccggcattaccctattgtgtgtaaaaactttgtgttgctcactctgtaaaaaatgtcatgtgtttgtcttgcaacgataattaacttttttaagaagaaataagtattttgtttgtaaaatgttacttcatagtataataaacaagttctaattatctttc

SEQ ID NO: 248 - DNA, 1194 bp, Diabrotica virgifera
tatttctgaactttgtttttaagttattgcttatgcagtatttttcttattttccgttttgtgagcttatgttccgtttccttgtttatttcacataaactttttattattgtcaggagaatagcatatatcgatagttgttctacatttattatattacgatagttgatcacttaaatcgcaactaacacataattctatgatatagttgttccattttatctttgcccatgcagcacgtttcattttcaaacaattgagtcataacagaaagtgaaacgtatgtcgatgtgtatattcgctgtatgcaagtacttggaggggatacgagaaacgatcgtgcgcgaatagcggagaaatcttgcaactttcttaaataattcatattgtcaattgaaattgtcaaattgacgtatatttcataccttctgtcattgaagcagaaaaattatatattgctccacaatattgatatgatatgcaattattatataaaggtaaatttaattaattgtattttgcttgcagtactgcattttaataactaattttatttactacatacaattgtttacgttttataacataacctgcatcttattttttcttcttattatttttttggactatggccttgacaattatccagcaaccaggactaatataattggccaatataattaaaagtgcgaattttagtatagagcgtagaaataggggtcgctttgccgaacttgcacggtcccaatacgctgcgagttcgtacatagaggggatatttaaaagttcgtgagcgccagtagtgacaagtcaatgaattttactggaaattttacataaatgtcaaagtaattaattcaaaacattgaaattaaaaacattaataggaaaaaatattagttgtgcaaagctgtggtgtatatttttaccttaaatatacttacgttttaaatactgaatttaagtttttttaatatttcgtaatatgtaattataaattaaacttgagatcataattgctattttatttttaatcaaaagttattcgggctcaaaaattgcaatttttagatttttttttaagttgaaccgcgtgtatctcgaaaactatacattttacgaaaaaaactagtaaggacattttttgcttagcatgacccaaaagatacaaaaaaaaatgtttttttgcgaaaa

SEQ ID NO: 249 - DNA, 1163 bp, Diabrotica virgifera
catacatattgttaaatttacttacatgcaaataaatccgtttatattcaatgttctacataatatgtattttcttttcgttaatttaaaaaataaatttactgtattttgccttttgaaataaagctttgagaattcaataaaacgacactacctatgaatcactaaacaaatactatacaggttgatgttttagtattcaaaacaacctcttccttttgacattctggaaattagctaaaagggttttattatttacaacgtattcgtggtgtgcaagtacttggaaggggaaacgagaaacgaccctgcgcgagtcgcggagaaatattgcaactatcttaaataattcatattgtcaattgaaattgtcaaattgacgtatatttcataccttctgtcaatgaagcagaaaaattatatattgctccacaatattgatatgatatgcaattattatataaaggtaaatttaattaattgtattttgcttgcagtactgcattttaataactaattttatttactacatacaattgtttacgttttataacataacctgcatcttattttttcttcttattatttttttggactatggccttgacaattatccagcaaccaggactaatataattggccaatataattaaaagtgcgaattttagtatagagcgtagaaataggggtcgctttgccgaacttgcacggtcccaatacgctgcgagttcgtacatagaggggatatttaaaagttcgtgagcgccagtagtgacaagtcaatgaattttactggaaattttacataaatgtcaaagtaattaattcaaaacattgaaattaaaaacattaataggaaaaaatattagttgtgcaaagctgtggtgtatatttttaccttaaatatacttacgttttaaatactgaatttaagtttttttaatatttcgtaatatgtaattataaattaaacttgagatcataattgctattttatttttaatcaaaagttattcgggctcaaaaattgcaatttttagatttttttttaagttgaaccgcgtgtatctcgaaaactatacattttacgaaaaaaactagtaaggacattttttgcttagcatgacccaaaagatacaaaaaaaaatgtttttttgcgaaaa

SEQ ID NO: 250 - DNA, 1199 bp, Diabrotica virgifera
gggaaggtccgataagtacttagcatctccgccgatggcgccactatcgcaaaagaaatctactatcgtgtaatgcatttccttatatgagtccttatattagtcatacaactaatgtcaaaattttgaacacggcccaaaatagcgacaattctaccttatcagttattcgcggtgtgcaagtacttggaaagggaaacgagaaacgaccgtgcgcgagtcgcggagaaatattgcaactatcttaaataattcatattgtcaattgaaattgtcaaattgacgtatatttcataccttctgtcattgacgcagaaaaattatatattgctccacaatattgatatgatatgcaattattatataaaggtaaatttaattaattgtattttgcttgcagtactgcattttaataactgattttatttactacatacaattgtttacgtttgctaaacataacctgcatcttattttttcttcttattatttttttggactatggtcttgacaattatccagcaaccaggactaatataattggccaatataattaaaagtgcgaataaaagtacagagcgtagaaatagaggtcgctttgccgaacttgcacggtcccaataaacctgaaatgatacttcattataacaaaacaaaaggagctgttgacgtagtagccaaatggcacaacaatacacaacacagcgcaaaacacgcaggtagttttttcactatttactttattatttcagccataaaggttttcaaaatttggaaaataaaaaatccaaattacgatgggaaacatttgtatgcaagacaaagttttttatgagacttagggtgggaattggtataagaaaatgttatctagtcatcaaaacacaaataatagcctcagttacgtcaaatgatgaaaattgcatattctatcctgaattagacgtttcagatgttcctcctggggctaacagagttgcgggaccatgtcgacaaggtcggtgctacttatgccagagaaaaaaaagactgaaagtcccggcattaccctattgtgtgtaaaaactttgtgttgctcactctgtaaaaaatgtcatgtgtttgtcttgcaacgataattaacttttttaagaagaaataagtattttgtttgtaaaatgttacttcatagtataataaacaagttctaattatctttc

SEQ ID NO: 251 - DNA, 1135 bp, Diabrotica virgifera
gggtggcaatagtgtaacgattgaccaaaataagagacacatcgatctgaccgttcaaaaattatgacgaatacaaatttctgtcaaaatttgaaactcggcctgtacatcactaaacaaggagggcagacacccttcaatggtcatttgtcattccccataggagcctttataagaggaaggagtatgtaccgttcctcataactcaccctgtatcttcttcgtacgttattggtattcgcggtgtgcaagtacttggaaagggaaacgagaaacgaccctgcgcgagtcgcggagaaatattgcaactatcttaaataattcatattgtcaattgaaattgtcaaattgacgtatatttcataccttctgtcaatgaagcagaaaaattacatattgctccacaatattgatatgatatgcaattattatataaaggtaaatttaattaattgtattttgcttgcagtactgcattttaataactaattttatttactacatacaattgtttacgttttataacataacctgcatcttattttttcttcttattatttttttggactatggccttgacaattatccagcaaccaggactaatataattggccaatataattaaaagtgcgaattttagtatagagcgtagaaataggggtcgctttgccgaacttgcacggtcccaatacgctgcgagttcgtacatagaggggatatttaaaagttcgtgagcgccagtagtgacaagtcaatgaattttactggaaattttacataaatgtcaaagtaattaattcaaaacattgaaattaaaaacattaataggaaaaaatattagttgtgcaaagctgtggtgtatatttttaccttaaatatacttacgttttaaatactgaatttaagtttttttaatatttcgtaatatgtaattataaattaaacttgagatcataattgctattttatttttaatcaaaagttattcgggctcaaaaattgcaatttttagatttttttttaagttgaaccgcgtgtatctcgaaaactatacattttacgaaaaaaactagtaaggacattttttgcttagcatgacccaaaagatacaaaaaaaaatgtttttttgcgaaaa

SEQ ID NO: 252 - DNA, 1147 bp, Diabrotica virgifera
taaaaatgtattgcttcaaaacttactttcagtggcatttcagtgggttttagccatcttatggagagtggtctaacacactttctaggtacagctgtggtttttaaaaggaaatataatgaatcgcttttgttttcgaaatttacattgggaatcccttagtgtccttatatttgccctacagagtttcatttaaactgaaattgggtaatttacatagacctaaagctttcacgtctatatagcctaattagaccacaaaattgacttgctttacgtgaaatgtatgaaccattcaaacatatttatatgacaacaatataatataatacaatataatataaataactgacaacatttaaaattagaatttttacccacaatttttctctgccatgtgtcatctagtacaagaagtatggcaatttagccctactcctcttattgtacatttcttgtaattcctcattttctttttcaattacttcgatcttttaaacttaattcaccaagtttatttgcaatattcttcttgaagtctatagtttgaattccttcaatatatttgtaatgttattcttcagtgtcaatccttgcattccatgaaagaacacgaaaaagatgcagcacgttatttgtccatattcctgctacatacttatttttcgattaacacattcactgccagcgtattcgcggtgtgcaagtacttggaaagggaaacgagaaacgaccctgcgcgagtcgcggagaaatattgcaactatcttaaataattcatattgtcaattgaaattgtcaaattgacgtatatttcataccttctgtcaatgaagcagaaaaattatatattgctccacaatattgatatgatatgcaattattatataaaggtaaatttaattaattgtattttgagtgcagtactgcattttaataactaattttatttactacatacaattgttcacgttttcataacataacctgaatcttattttttcttcttactattttttggactatggccttgacaattatccagtaaccaggactaatataattggccaatataattaaaagtgcgaataaaagtacagagcgtagaaataggggtcgctttgccgaactttcacggtcccaatac

SEQ ID NO: 253 - DNA, 2334 bp, Diabrotica virgifera
  SmartBlast Evalue=1E-47; Info=Vacuolar fusion protein MON1-like protein A n=2 Tax=Formicidae RepID=E2A1P7_9HYME
ttataactctatataccaaaaataaatcacctttaattaaactaacttatttttgtctattatattccaagatgtaactgtattctctaaagcgaataacgttctgtagagaaagttagaggaaaaccaaagagttgcatctgccatctctcggagactagtgtacttacacatgtaactattttttccatagtagaagtcattatttagaaggcattgatgcaataaaaaaaaacattttgagatggaaccctcttcttccaaatgaacgatatgttattcgcggtgtgcaagtacttggaagggatacgagaaacgatcgtgcgcgaatagcggagaaatattgcaactttcttaaataattcatattgtcaattgaaattgtcaaattgacgtatatttcataccttctgtcattgaagcagaaaaattatatattgctccacaatattgatatgatatgcaattattatataaaggtaaatttaattaattgtattttgcttgcagtactgcattttaataactaattttatttactacatacaattgtttacgttttataacataacctgcatcttattttttcttcttattatttttttggactatggccttgacaattatccagcaaccaggaccaatataattggccaatataattaaaagtgcgaaaaatgttgctgagctatgaaaccaggtgtcgctttgccggacttgcacggtcccaatagcatagataatttcaatgtaaagcgaataatctttaaattgtttttatttatttatatttgttagtagtcagtgttaccacccctagcccttatacaagctacaatatgcgtgggcatgcacctaatcaaattgtcaacattttgtggtaggttgctccactcttcaagagcagcttgtactagccgtgcggtgttttgtggattatcccggtgagctctaatgtttcttttaagcgtataccacaaatgctctatagggttaaggtcgggtgagtaagcaggccattccagaccagtgttatcatttttctttaagtatgtggagatgcattatcatacgtggaaattaaattttcctcttcagagcttaactccggttctagaacccaatcaacatacctgcgaactcctgtctccttagattcgatgctagcgtattcctctacggcctacggtcatgtttcttacttatccgaagactgtcaagtgtgtttgttacttctaacagtggaaagggatgtattttttactttgagtgaagcgaaacagaaaatcgtagaaaaattaagaagaaacaactgcttggaatccatcaacgaatcactggcagctccgggatatagttgtgcgagtgctggttttgtagagatacattatttgtataaatgtaagtccactgcccagttctatcaacctgttttaagccccccttatactcaagcgaagatctatctgactgaactttacaagggagctcatcaaagactgcataattctaccaaaccacttaaacttatgtttgaacggagttcgagggaggcgattcttgcctgggacactaaggggtttgaattgttcgttgtttttgagcctttgatcgatactcgttagcgattctcctggttggtaggcttttaaattggattaaaaaacaagaagataaactatttcacctaaatgcacctactttttaaatgaaggtacctgttctcacttattttaacctttgtcatgggcaaattataactcacacattaaacaaaagaatatttttatggacaccatcgaaatggtgagaatttgtgaattcttttgagtttgcctgtggattctatagtccacaatagatctctatcccatcattgtacaaaaagtggtgaattctttttagaattcgcccttataataatataacatagtacattttgggaacatagaaaatataataaaattgttttaaatgtatgtaaaatacaaatattgatattatttctagctttgaattaaagcgaatgtaaaaaactagcatacgaaatcaaacagtatttattttaaagcaatttaatcatcaatacataaaaattaaagaaaaccatgaaatcttgaaatcacaaattgaaactatttgtttaaagtcaattcgcggtgtgcaagtacttggagggggatacgagaaacgatcgagcgcgaatagcggagaaatattgcaactttcttaaataattcatattgtcaattgaaattgtcaaattgacatatgtttcatacctactgtcattgaagaagataaaatatatattgctccacaatattgatatga

SEQ ID NO: 254 - DNA, 1121 bp, Diabrotica virgifera
acaaaaaatatacaaattatatacaaaaaacttacaaatggtttgtttgttgaaatattagacataatgtcgggatcttttaaatacctaataacaatatttttctgtgatactccaacaaaaaagtttaatgaattgagacatcatatctatgatgcacagttagaattttttatattaatttttcaatataccgagaatttgagaatatctcaaaccaatattcgcggtgtgcaagtacttggaagggaaacgagaaacgaccgtgcgcgagtcgcggagaaatattgcaactatcttaaataattcatattgtcaattgaaattgtcaaattgacgtatatttcataccttctgtcattgacgcagaaaaattatatattgctccacaatattgatatgatatgcaattattatataaaggtaaatttaattaattgtattttgcttgcagtactgcattttaataactgattttatttactacatacaattgtttacgtttgctaaacataacctgcatcttattttttcttcttattatttttttggactatggtcttgacaattatccagcaaccaggactaatataattggccaatataattaaaagtgcgaattttagtatagagcgtagaaataggggtcgctttgccgaacttgcacggtcccaatacgctgcgagttcgtacatagaggggatatttaaaagttcgtgagcgccagtagtgacaagtcaatgaattttactggaaattttacataaatgtcaaagtaattaattcaaaacattgaaattaaaaacattaataggaaaaaatattagttgtgcaaagctgtggtgtatatttttaccttaaatatacttacgttttaaatactgaatttaagtttttttaatatttcgtaatatgtaattataaattaaacttgagatcataattgctattttatttttaatcaaaagttattcgggctcaaaaattgcaatttttagatttttttttaagttgaaccgcgtgtatctcgaaaactatacattttacgaaaaaaactagtaaggacattttttgcttagcatgacccaaaagatacaaaaaaaaatgtttttttgcgaaaa

SEQ ID NO: 255 - DNA, 1024 bp, Diabrotica virgifera
ttataactctatataccaaaaataaatcacctttaattaaactaacttatttttgtctattatattccaagatgtaactgtattctctaaagcgaataacgttctgtagagaaagttagaggaaaaccaaagagttgcatctgccatctctcggagactagtgtacttacacatgtaactattttttccatagtagaagtcattatttagaaggcattgatgcaataaaaaaaaacattttgagatggaaccctcttcttccaaatgaacgatatgttattcgcggtgtgcaagtacttggaagggatacgagaaacgatcgtgcgcgaatagcggagaaatattgcaactttcttaaataattcatattgtcaattgaaattgtcaaattgacgtatatttcataccttctgtcattgaagcagaaaaattatatattgctccacaatattgatatgatatgcaattattatataaaggtaaatttaattaattgtattttgcttgcagtactgcattttaataactaattttatttactacatacaattgtttacgttttataacataacctgcatcttattttttcttcttattatttttttggactatggccttgacaattatccagcaaccaggaccaatataattggccaatataattaaaagtgcgaaaaatgttgctgagctatgaaaccaggtgtcgcttttccgaacttgcacggtcccatgtaaacacaaggcttgtaaacaaaagatgaattgacagattgaaatgaaacttcagacacgttcatatgaagagtatatacagtcgaaaaaatgaaagaatacccatgaacgatcatatcaagcacatattttggatttgctgcctttttctataaataacaaacgagagagatagattattaagtgttgtctacaaagcaaaaacgttatccaagacatacgcagttacatatttataattgacagagtgagacggcgatacaatggttcaacggagttataataatttagt

SEQ ID NO: 256 - DNA, 1042 bp, Diabrotica virgifera
tatttctgaactttgtttttaagttattgcttatgcagtatttttcttattttccgttttgtgagcttatgttccgtttccttgtttatttcacataaactttttattattgtcaggagaatagcatatatcgatagttgttctacatttattatattacgatagttgatcacttaaatcgcaactaacacataattctatgatatagttgttccattttatctttgcccatgcagcacgtttcattttcaaacaattgagtcataacagaaagtgaaacgtatgtcgatgtgtatattcgctgtatgcaagtacttggaggggatacgagaaacgatcgtgcgcgaatagcggagaaatcttgcaactttcttaaataattcatattgtcaattgaaattgtcaaattgacgtatatttcataccttctgtcattgaagcagaaaaattatatattgctccacaatattgatatgatatgcaattattatataaaggtaaatttaattaattgtattttgcttgcagtactgcattttaataactaattttatttactacatacaattgtttacgttttataacataacctgcatcttattttttcttcttattatttttttggactatggccttgacaattatccagcaaccaggaccaatataattggccaatataattaaaagtgcgaaaaatgttgctgagctatgaaaccaggtgtcgcttttccgaacttgcacggtcccatgtaaacacaaggcttgtaaacaaaagatgaattgacagattgaaatgaaacttcagacacgttcatatgaagagtatatacagtcgaaaaaatgaaagaatacccatgaacgatcatatcaagcacatattttggatttgctgcctttttctataaataacaaacgagagagatagattattaagtgttgtctacaaagcaaaaacgttatccaagacatacgcagttacatatttataattgacagagtgagacggcgatacaatggttcaacggagttataataatttagt

SEQ ID NO: 257 - DNA, 1017 bp, Diabrotica virgifera
tccgtctcactcgtgctttctgttacaaatttttttatggataactcttatattttttttcgtcaatgttagcgttttgtagcatttttatcataatcaaggattgtgataagtaggtattcgcggtgtgcaagtacttggaagggaatacgagaaacgatcgtgcgcgaatagcggagaaatattgcaactttcttaaataattcatattgtcaattgaaattgtcaaattgacgtacatttcatacctactgtcattgaagaagaaaaattatatattgctccacaatattgatatgatatgcaattattatataaaggtaaatttaattaattgtattttgcttgcagtactgcattttaataactaattttatttactacatacaattgtttacgttttataacataacctgcatcttattttttcttcttattatttttttggactatggccttgacaattatccagcaaccaggactaatataattggccaatataattaaaagtgcgaattttagtatagagcgtagaaataggggtcgctttgccgaacttgcacggtcccaatacgctgcgagttcgtacatagaggggatatttaaaagttcgtgagcgccagtagtgacaagtcaatgaattttactggaaattttacataaatgtcaaagtaattaattcaaaacattgaaattaaaaacattaataggaaaaaatattagttgtgcaaagctgtggtgtatatttttaccttaaatatacttacgttttaaatactgaatttaagtttttttaatatttcgtaatatgtaattataaattaaacttgagatcataattgctattttatttttaatcaaaagttattcgggctcaaaaattgcaatttttagatttttttttaagttgaaccgcgtgtatctcgaaaactatacattttacgaaaaaaactagtaaggacattttttgcttagcatgacccaaaagatacaaaaaaaaatgtttttttgcgaaaa

SEQ ID NO: 258 - DNA, 1011 bp, Diabrotica virgifera
catacatattgttaaatttacttacatgcaaataaatccgtttatattcaatgttctacataatatgtattttcttttcgttaatttaaaaaataaatttactgtattttgccttttgaaataaagctttgagaattcaataaaacgacactacctatgaatcactaaacaaatactatacaggttgatgttttagtattcaaaacaacctcttccttttgacattctggaaattagctaaaagggttttattatttacaacgtattcgtggtgtgcaagtacttggaaggggaaacgagaaacgaccctgcgcgagtcgcggagaaatattgcaactatcttaaataattcatattgtcaattgaaattgtcaaattgacgtatatttcataccttctgtcaatgaagcagaaaaattatatattgctccacaatattgatatgatatgcaattattatataaaggtaaatttaattaattgtattttgcttgcagtactgcattttaataactaattttatttactacatacaattgtttacgttttataacataacctgcatcttattttttcttcttattatttttttggactatggccttgacaattatccagcaaccaggaccaatataattggccaatataattaaaagtgcgaaaaatgttgctgagctatgaaaccaggtgtcgcttttccgaacttgcacggtcccatgtaaacacaaggcttgtaaacaaaagatgaattgacagattgaaatgaaacttcagacacgttcatatgaagagtatatacagtcgaaaaaatgaaagaatacccatgaacgatcatatcaagcacatattttggatttgctgcctttttctataaataacaaacgagagagatagattattaagtgttgtctacaaagcaaaaacgttatccaagacatacgcagttacatatttataattgacagagtgagacggcgatacaatggttcaacggagttataataatttagt

SEQ ID NO: 259 - DNA, 1067 bp, Diabrotica virgifera
gggaaggtccgataagtacttagcatctccgccgatggcgccactatcgcaaaagaaatctactatcgtgtaatgcatttccttatatgagtccttatattagtcatacaactaatgtcaaaattttgaacacggcccaaaatagcgacaattctaccttatcagttattcgcggtgtgcaagtacttggaaagggaaacgagaaacgaccgtgcgcgagtcgcggagaaatattgcaactatcttaaataattcatattgtcaattgaaattgtcaaattgacgtatatttcataccttctgtcattgacgcagaaaaattatatattgctccacaatattgatatgatatgcaattattatataaaggtaaatttaattaattgtattttgcttgcagtactgcattttaataactgattttatttactacatacaattgtttacgtttgctaaacataacctgcatcttattttttcttcttattatttttttggactatggtcttgacaattatccagcaaccaggactaatataattggccaatataattaaaagtgcgaattttagtatagagcgtagaaataggggtcgctttgccgaacttgcacggtcccaatacgctgcgagttcgtacatagaggggatatttaaaagttcgtgagcgccagtagtgacaagtcaatgaattttactggaaattttacataaatgtcaaagtaattaattcaaaacattgaaattaaaaacattaataggaaaaaatattagttgtgcaaagctgtggtgtatatttttaccttaaatatacttacgttttaaatactgaatttaagtttttttaatatttcgtaatatgtaattataaattaaacttgagatcataattgctattttatttttaatcaaaagttattcgggctcaaaaattgcaatttttagatttttttttaagttgaaccgcgtgtatctcgaaaactatacattttacgaaaaaaactagtaaggacattttttgcttagcatgacccaaaagatacaaaaaaaaatgtttttttgcgaaaa

SEQ ID NO: 260 - DNA, 983 bp, Diabrotica virgifera
gggtggcaatagtgtaacgattgaccaaaataagagacacatcgatctgaccgttcaaaaattatgacgaatacaaatttctgtcaaaatttgaaactcggcctgtacatcactaaacaaggagggcagacacccttcaatggtcatttgtcattccccataggagcctttataagaggaaggagtatgtaccgttcctcataactcaccctgtatcttcttcgtacgttattggtattcgcggtgtgcaagtacttggaaagggaaacgagaaacgaccctgcgcgagtcgcggagaaatattgcaactatcttaaataattcatattgtcaattgaaattgtcaaattgacgtatatttcataccttctgtcaatgaagcagaaaaattacatattgctccacaatattgatatgatatgcaattattatataaaggtaaatttaattaattgtattttgcttgcagtactgcattttaataactaattttatttactacatacaattgtttacgttttataacataacctgcatcttattttttcttcttattatttttttggactatggccttgacaattatccagcaaccaggaccaatataattggccaatataattaaaagtgcgaaaaatgttgctgagctatgaaaccaggtgtcgcttttccgaacttgcacggtcccatgtaaacacaaggcttgtaaacaaaagatgaattgacagattgaaatgaaacttcagacacgttcatatgaagagtatatacagtcgaaaaaatgaaagaatacccatgaacgatcatatcaagcacatattttggatttgctgcctttttctataaataacaaacgagagagatagattattaagtgttgtctacaaagcaaaaacgttatccaagacatacgcagttacatatttataattgacagagtgagacggcgatacaatggttcaacggagttataataatttagt

SEQ ID NO: 261 - DNA, 958 bp, Diabrotica virgifera
ttataactctatataccaaaaataaatcacctttaattaaactaacttatttttgtctattatattccaagatgtaactgtattctctaaagcgaataacgttctgtagagaaagttagaggaaaaccaaagagttgcatctgccatctctcggagactagtgtacttacacatgtaactattttttccatagtagaagtcattatttagaaggcattgatgcaataaaaaaaaacattttgagatggaaccctcttcttccaaatgaacgatatgttattcgcggtgtgcaagtacttggaagggatacgagaaacgatcgtgcgcgaatagcggagaaatattgcaactttcttaaataattcatattgtcaattgaaattgtcaaattgacgtatatttcataccttctgtcattgaagcagaaaaattatatattgctccacaatattgatatgatatgcaattattatataaaggtaaatttaattaattgtattttgcttgcagtactgcattttaataactaattttatttactacatacaattgtttacgttttataacataacctgcatcttattttttcttcttattatttttttggactatggccttgacaattatccagcaaccaggactaatataattggccaatataattaaaagtgcgaataaaagtacagagcgtagaaatagaggtcgctttgccgaacttgcacggtcccatattcccatatataaaaactataaattattataacaaatttgtataagtagaactagtagaagtgtaagtagtattttaggcatagactacttggtgtacttaaataaaaataaaacaaccccagtaacattatagtactaagaccaaatgtatttatttggtaaggtagtttggaacaaaaaaaggtttaaagaagactcttcataacgaatcaactacaaaaaccaa

SEQ ID NO: 262 - DNA, 969 bp, Diabrotica virgifera
acaaaaaatatacaaattatatacaaaaaacttacaaatggtttgtttgttgaaatattagacataatgtcgggatcttttaaatacctaataacaatatttttctgtgatactccaacaaaaaagtttaatgaattgagacatcatatctatgatgcacagttagaattttttatattaatttttcaatataccgagaatttgagaatatctcaaaccaatattcgcggtgtgcaagtacttggaagggaaacgagaaacgaccgtgcgcgagtcgcggagaaatattgcaactatcttaaataattcatattgtcaattgaaattgtcaaattgacgtatatttcataccttctgtcattgacgcagaaaaattatatattgctccacaatattgatatgatatgcaattattatataaaggtaaatttaattaattgtattttgcttgcagtactgcattttaataactgattttatttactacatacaattgtttacgtttgctaaacataacctgcatcttattttttcttcttattatttttttggactatggtcttgacaattatccagcaaccaggaccaatataattggccaatataattaaaagtgcgaaaaatgttgctgagctatgaaaccaggtgtcgcttttccgaacttgcacggtcccatgtaaacacaaggcttgtaaacaaaagatgaattgacagattgaaatgaaacttcagacacgttcatatgaagagtatatacagtcgaaaaaatgaaagaatacccatgaacgatcatatcaagcacatattttggatttgctgcctttttctataaataacaaacgagagagatagattattaagtgttgtctacaaagcaaaaacgttatccaagacatacgcagttacatatttataattgacagagtgagacggcgatacaatggttcaacggagttataataatttagt

SEQ ID NO: 263 - DNA, 976 bp, Diabrotica virgifera
tatttctgaactttgtttttaagttattgcttatgcagtatttttcttattttccgttttgtgagcttatgttccgtttccttgtttatttcacataaactttttattattgtcaggagaatagcatatatcgatagttgttctacatttattatattacgatagttgatcacttaaatcgcaactaacacataattctatgatatagttgttccattttatctttgcccatgcagcacgtttcattttcaaacaattgagtcataacagaaagtgaaacgtatgtcgatgtgtatattcgctgtatgcaagtacttggaggggatacgagaaacgatcgtgcgcgaatagcggagaaatcttgcaactttcttaaataattcatattgtcaattgaaattgtcaaattgacgtatatttcataccttctgtcattgaagcagaaaaattatatattgctccacaatattgatatgatatgcaattattatataaaggtaaatttaattaattgtattttgcttgcagtactgcattttaataactaattttatttactacatacaattgtttacgttttataacataacctgcatcttattttttcttcttattatttttttggactatggccttgacaattatccagcaaccaggactaatataattggccaatataattaaaagtgcgaataaaagtacagagcgtagaaatagaggtcgctttgccgaacttgcacggtcccatattcccatatataaaaactataaattattataacaaatttgtataagtagaactagtagaagtgtaagtagtattttaggcatagactacttggtgtacttaaataaaaataaaacaaccccagtaacattatagtactaagaccaaatgtatttatttggtaaggtagtttggaacaaaaaaaggtttaaagaagactcttcataacgaatcaactacaaaaaccaa

SEQ ID NO: 264 - DNA, 2352 bp, Diabrotica virgifera
  SmartBlast Evalue=1E-47; Info=Vacuolar fusion protein MON1-like protein A n=2 Tax=Formicidae RepID=E2A1P7_9HYME
tatttctgaactttgtttttaagttattgcttatgcagtatttttcttattttccgttttgtgagcttatgttccgtttccttgtttatttcacataaactttttattattgtcaggagaatagcatatatcgatagttgttctacatttattatattacgatagttgatcacttaaatcgcaactaacacataattctatgatatagttgttccattttatctttgcccatgcagcacgtttcattttcaaacaattgagtcataacagaaagtgaaacgtatgtcgatgtgtatattcgctgtatgcaagtacttggaggggatacgagaaacgatcgtgcgcgaatagcggagaaatcttgcaactttcttaaataattcatattgtcaattgaaattgtcaaattgacgtatatttcataccttctgtcattgaagcagaaaaattatatattgctccacaatattgatatgatatgcaattattatataaaggtaaatttaattaattgtattttgcttgcagtactgcattttaataactaattttatttactacatacaattgtttacgttttataacataacctgcatcttattttttcttcttattatttttttggactatggccttgacaattatccagcaaccaggaccaatataattggccaatataattaaaagtgcgaaaaatgttgctgagctatgaaaccaggtgtcgctttgccggacttgcacggtcccaatagcatagataatttcaatgtaaagcgaataatctttaaattgtttttatttatttatatttgttagtagtcagtgttaccacccctagcccttatacaagctacaatatgcgtgggcatgcacctaatcaaattgtcaacattttgtggtaggttgctccactcttcaagagcagcttgtactagccgtgcggtgttttgtggattatcccggtgagctctaatgtttcttttaagcgtataccacaaatgctctatagggttaaggtcgggtgagtaagcaggccattccagaccagtgttatcatttttctttaagtatgtggagatgcattatcatacgtggaaattaaattttcctcttcagagcttaactccggttctagaacccaatcaacatacctgcgaactcctgtctccttagattcgatgctagcgtattcctctacggcctacggtcatgtttcttacttatccgaagactgtcaagtgtgtttgttacttctaacagtggaaagggatgtattttttactttgagtgaagcgaaacagaaaatcgtagaaaaattaagaagaaacaactgcttggaatccatcaacgaatcactggcagctccgggatatagttgtgcgagtgctggttttgtagagatacattatttgtataaatgtaagtccactgcccagttctatcaacctgttttaagccccccttatactcaagcgaagatctatctgactgaactttacaagggagctcatcaaagactgcataattctaccaaaccacttaaacttatgtttgaacggagttcgagggaggcgattcttgcctgggacactaaggggtttgaattgttcgttgtttttgagcctttgatcgatactcgttagcgattctcctggttggtaggcttttaaattggattaaaaaacaagaagataaactatttcacctaaatgcacctactttttaaatgaaggtacctgttctcacttattttaacctttgtcatgggcaaattataactcacacattaaacaaaagaatatttttatggacaccatcgaaatggtgagaatttgtgaattcttttgagtttgcctgtggattctatagtccacaatagatctctatcccatcattgtacaaaaagtggtgaattctttttagaattcgcccttataataatataacatagtacattttgggaacatagaaaatataataaaattgttttaaatgtatgtaaaatacaaatattgatattatttctagctttgaattaaagcgaatgtaaaaaactagcatacgaaatcaaacagtatttattttaaagcaatttaatcatcaatacataaaaattaaagaaaaccatgaaatcttgaaatcacaaattgaaactatttgtttaaagtcaattcgcggtgtgcaagtacttggagggggatacgagaaacgatcgagcgcgaatagcggagaaatattgcaactttcttaaataattcatattgtcaattgaaattgtcaaattgacatatgtttcatacctactgtcattgaagaagataaaatatatattgctccacaatattgatatga

SEQ ID NO: 265 - DNA, 945 bp, Diabrotica virgifera
catacatattgttaaatttacttacatgcaaataaatccgtttatattcaatgttctacataatatgtattttcttttcgttaatttaaaaaataaatttactgtattttgccttttgaaataaagctttgagaattcaataaaacgacactacctatgaatcactaaacaaatactatacaggttgatgttttagtattcaaaacaacctcttccttttgacattctggaaattagctaaaagggttttattatttacaacgtattcgtggtgtgcaagtacttggaaggggaaacgagaaacgaccctgcgcgagtcgcggagaaatattgcaactatcttaaataattcatattgtcaattgaaattgtcaaattgacgtatatttcataccttctgtcaatgaagcagaaaaattatatattgctccacaatattgatatgatatgcaattattatataaaggtaaatttaattaattgtattttgcttgcagtactgcattttaataactaattttatttactacatacaattgtttacgttttataacataacctgcatcttattttttcttcttattatttttttggactatggccttgacaattatccagcaaccaggactaatataattggccaatataattaaaagtgcgaataaaagtacagagcgtagaaatagaggtcgctttgccgaacttgcacggtcccatattcccatatataaaaactataaattattataacaaatttgtataagtagaactagtagaagtgtaagtagtattttaggcatagactacttggtgtacttaaataaaaataaaacaaccccagtaacattatagtactaagaccaaatgtatttatttggtaaggtagtttggaacaaaaaaaggtttaaagaagactcttcataacgaatcaactacaaaaaccaa

SEQ ID NO: 266 - DNA, 1010 bp, Diabrotica virgifera
ccattgttaatattcattttttgaattagactatgatttccaaaatcatgtttgtctgaattttcttcaagatttttaaacattggatttttgctaagcattccttgataaagtttgtttagcagggaatggttgacttcaattagtgcggtcgtaaatattattaaatttatctgacttggcccattgttaagaccggtccggagcgataagcaacgaggtagacagagttggtcttttgacaattaacactgactagactagacggtactcctataataaagcaaaggatccacaaaatttacaataattacgacgacaaaaacaaaaaacggatgtaaaaaccctcttatcagtacagtttcgtcaatataagccttatctgtattaatgaaattataatgagtttgaattgtacgcaattaaatcaacattaagaaatgaagattgacaaattttaccaggaaacatatttaaattttacctgaaaccgggccttttatactattatcggttaacccaggatgtttatagtctgtactaattgaagtcaaccatttactgctaaacaaactataatcttttctttgcatttaatacgcagattattgttggtatgtatcgccacatcaattagtgttgtttgtctcggttatttattaactaatatgagatctggtctattacgtgtcattgtttggtctgtgagcacagtgcggtcccagtataagttggtaggtgtcattctcaggaatgtattgataatataggagatggtgggtttggagaacttccagtttgatatatatctcttgatgaaagatgttttcaagtgaatcatgtgaatcttaattcaattgcagcaaatacctggcagccccggtaagatgttacatgatttcttagatttgacatccaaatcagcatttgtcgttttgaacctgaaggtctttgaggatatatttcaggtaatttggctcgtataacctcatcctgtttcaagaaccttc

SEQ ID NO: 267 - DNA, 865 bp, Diabrotica virgifera
tccgtctcactcgtgctttctgttacaaatttttttatggataactcttatattttttttcgtcaatgttagcgttttgtagcatttttatcataatcaaggattgtgataagtaggtattcgcggtgtgcaagtacttggaagggaatacgagaaacgatcgtgcgcgaatagcggagaaatattgcaactttcttaaataattcatattgtcaattgaaattgtcaaattgacgtacatttcatacctactgtcattgaagaagaaaaattatatattgctccacaatattgatatgatatgcaattattatataaaggtaaatttaattaattgtattttgcttgcagtactgcattttaataactaattttatttactacatacaattgtttacgttttataacataacctgcatcttattttttcttcttattatttttttggactatggccttgacaattatccagcaaccaggaccaatataattggccaatataattaaaagtgcgaaaaatgttgctgagctatgaaaccaggtgtcgcttttccgaacttgcacggtcccatgtaaacacaaggcttgtaaacaaaagatgaattgacagattgaaatgaaacttcagacacgttcatatgaagagtatatacagtcgaaaaaatgaaagaatacccatgaacgatcatatcaagcacatattttggatttgctgcctttttctataaataacaaacgagagagatagattattaagtgttgtctacaaagcaaaaacgttatccaagacatacgcagttacatatttataattgacagagtgagacggcgatacaatggttcaacggagttataataatttagt

SEQ ID NO: 268 - DNA, 990 bp, Diabrotica virgifera
ttgaaatttgaccttaaatatgtatttggtctacaccttattttttcgaatgctttcgatcattctggactattctattttactacagtaaagcttgtttaccagtaaatggttgacttcaattagtgcggtcgtaaatattattaaatttatctgacttggcccattgttaagaccggtccggagcgataagcaacgaggtagacagagttggtcttttgacaattaacactgactagactagacggtactcctataataaagcaaaggatccacaaaatttacaataattacgacgacaaaaacaaaaaacggatgtaaaaaccctcttatcagtacagtttcgtcaatataagccttatctgtattaatgaaattataatgagtttgaattgtacgcaattaaatcaacattaagaaatgaagattgacaaattttaccaggaaacatatttaaattttacctgaaaccgggccttttatactattatcggttaacccaggatgtttatagtctgtactaattgaagtcaaccatttactgctaaacaaactataatcttttctttgcatttaatacgcagattattgttggtatgtatcgccacatcaattagtgttgtttgtctcggttatttattaactaatatgagatctggtctattacgtgtcattgtttggtctgtgagcacagtgcggtcccagtataagttggtaggtgtcattctcaggaatgtattgataatataggagatggtgggtttggagaacttccagtttgatatatatctcttgatgaaagatgttttcaagtgaatcatgtgaatcttaattcaattgcagcaaatacctggcagccccggtaagatgttacatgatttcttagatttgacatccaaatcagcatttgtcgttttgaacctgaaggtctttgaggatatatttcaggtaatttggctcgtataacctcatcctgtttcaagaaccttc

SEQ ID NO: 269 - DNA, 915 bp, Diabrotica virgifera
gggaaggtccgataagtacttagcatctccgccgatggcgccactatcgcaaaagaaatctactatcgtgtaatgcatttccttatatgagtccttatattagtcatacaactaatgtcaaaattttgaacacggcccaaaatagcgacaattctaccttatcagttattcgcggtgtgcaagtacttggaaagggaaacgagaaacgaccgtgcgcgagtcgcggagaaatattgcaactatcttaaataattcatattgtcaattgaaattgtcaaattgacgtatatttcataccttctgtcattgacgcagaaaaattatatattgctccacaatattgatatgatatgcaattattatataaaggtaaatttaattaattgtattttgcttgcagtactgcattttaataactgattttatttactacatacaattgtttacgtttgctaaacataacctgcatcttattttttcttcttattatttttttggactatggtcttgacaattatccagcaaccaggaccaatataattggccaatataattaaaagtgcgaaaaatgttgctgagctatgaaaccaggtgtcgcttttccgaacttgcacggtcccatgtaaacacaaggcttgtaaacaaaagatgaattgacagattgaaatgaaacttcagacacgttcatatgaagagtatatacagtcgaaaaaatgaaagaatacccatgaacgatcatatcaagcacatattttggatttgctgcctttttctataaataacaaacgagagagatagattattaagtgttgtctacaaagcaaaaacgttatccaagacatacgcagttacatatttataattgacagagtgagacggcgatacaatggttcaacggagttataataatttagt

SEQ ID NO: 270 - DNA, 917 bp, Diabrotica virgifera
gggtggcaatagtgtaacgattgaccaaaataagagacacatcgatctgaccgttcaaaaattatgacgaatacaaatttctgtcaaaatttgaaactcggcctgtacatcactaaacaaggagggcagacacccttcaatggtcatttgtcattccccataggagcctttataagaggaaggagtatgtaccgttcctcataactcaccctgtatcttcttcgtacgttattggtattcgcggtgtgcaagtacttggaaagggaaacgagaaacgaccctgcgcgagtcgcggagaaatattgcaactatcttaaataattcatattgtcaattgaaattgtcaaattgacgtatatttcataccttctgtcaatgaagcagaaaaattacatattgctccacaatattgatatgatatgcaattattatataaaggtaaatttaattaattgtattttgcttgcagtactgcattttaataactaattttatttactacatacaattgtttacgttttataacataacctgcatcttattttttcttcttattatttttttggactatggccttgacaattatccagcaaccaggactaatataattggccaatataattaaaagtgcgaataaaagtacagagcgtagaaatagaggtcgctttgccgaacttgcacggtcccatattcccatatataaaaactataaattattataacaaatttgtataagtagaactagtagaagtgtaagtagtattttaggcatagactacttggtgtacttaaataaaaataaaacaaccccagtaacattatagtactaagaccaaatgtatttatttggtaaggtagtttggaacaaaaaaaggtttaaagaagactcttcataacgaatcaactacaaaaaccaa

SEQ ID NO: 271 - DNA, 903 bp, Diabrotica virgifera
acaaaaaatatacaaattatatacaaaaaacttacaaatggtttgtttgttgaaatattagacataatgtcgggatcttttaaatacctaataacaatatttttctgtgatactccaacaaaaaagtttaatgaattgagacatcatatctatgatgcacagttagaattttttatattaatttttcaatataccgagaatttgagaatatctcaaaccaatattcgcggtgtgcaagtacttggaagggaaacgagaaacgaccgtgcgcgagtcgcggagaaatattgcaactatcttaaataattcatattgtcaattgaaattgtcaaattgacgtatatttcataccttctgtcattgacgcagaaaaattatatattgctccacaatattgatatgatatgcaattattatataaaggtaaatttaattaattgtattttgcttgcagtactgcattttaataactgattttatttactacatacaattgtttacgtttgctaaacataacctgcatcttattttttcttcttattatttttttggactatggtcttgacaattatccagcaaccaggactaatataattggccaatataattaaaagtgcgaataaaagtacagagcgtagaaatagaggtcgctttgccgaacttgcacggtcccatattcccatatataaaaactataaattattataacaaatttgtataagtagaactagtagaagtgtaagtagtattttaggcatagactacttggtgtacttaaataaaaataaaacaaccccagtaacattatagtactaagaccaaatgtatttatttggtaaggtagtttggaacaaaaaaaggtttaaagaagactcttcataacgaatcaactacaaaaaccaa

SEQ ID NO: 272 - DNA, 863 bp, Diabrotica virgifera
ttataactctatataccaaaaataaatcacctttaattaaactaacttatttttgtctattatattccaagatgtaactgtattctctaaagcgaataacgttctgtagagaaagttagaggaaaaccaaagagttgcatctgccatctctcggagactagtgtacttacacatgtaactattttttccatagtagaagtcattatttagaaggcattgatgcaataaaaaaaaacattttgagatggaaccctcttcttccaaatgaacgatatgttattcgcggtgtgcaagtacttggaagggatacgagaaacgatcgtgcgcgaatagcggagaaatattgcaactttcttaaataattcatattgtcaattgaaattgtcaaattgacgtgtatttcatacctactgtcattgaagaagaaaaattatatgttgctccacaatattgatatgatatgcaattattatataaaagtaaatttaattaattgtattttgcttgtagtactgcattttaataattaattttatttactacacacaattgcttaccttttaatatcataacctcaatcttactttctcttcttataatttttttttggccaatataattaaaagtgctaaaaatgttgctgagctatgaaaccaggtgtcgcttttcgaacttgcacggtcccaatacattgtgtatactgtatactatacacatcgacgtacatttcactttgtgttttgatttgatttgtttgaaagtgaaccatgacgcatgggcaaggataaaatggaacaactttattaaacaattgaaaataaataatgcgcaataataaataatgcgcaataataaatagtggc

SEQ ID NO: 273 - DNA, 799 bp, Diabrotica virgifera
tccgtctcactcgtgctttctgttacaaatttttttatggataactcttatattttttttcgtcaatgttagcgttttgtagcatttttatcataatcaaggattgtgataagtaggtattcgcggtgtgcaagtacttggaagggaatacgagaaacgatcgtgcgcgaatagcggagaaatattgcaactttcttaaataattcatattgtcaattgaaattgtcaaattgacgtacatttcatacctactgtcattgaagaagaaaaattatatattgctccacaatattgatatgatatgcaattattatataaaggtaaatttaattaattgtattttgcttgcagtactgcattttaataactaattttatttactacatacaattgtttacgttttataacataacctgcatcttattttttcttcttattatttttttggactatggccttgacaattatccagcaaccaggactaatataattggccaatataattaaaagtgcgaataaaagtacagagcgtagaaatagaggtcgctttgccgaacttgcacggtcccatattcccatatataaaaactataaattattataacaaatttgtataagtagaactagtagaagtgtaagtagtattttaggcatagactacttggtgtacttaaataaaaataaaacaaccccagtaacattatagtactaagaccaaatgtatttatttggtaaggtagtttggaacaaaaaaaggtttaaagaagactcttcataacgaatcaactacaaaaaccaa

SEQ ID NO: 274 - DNA, 881 bp, Diabrotica virgifera
tatttctgaactttgtttttaagttattgcttatgcagtatttttcttattttccgttttgtgagcttatgttccgtttccttgtttatttcacataaactttttattattgtcaggagaatagcatatatcgatagttgttctacatttattatattacgatagttgatcacttaaatcgcaactaacacataattctatgatatagttgttccattttatctttgcccatgcagcacgtttcattttcaaacaattgagtcataacagaaagtgaaacgtatgtcgatgtgtatattcgctgtatgcaagtacttggaggggatacgagaaacgatcgtgcgcgaatagcggagaaatcttgcaactttcttaaataattcatattgtcaattgaaattgtcaaattgacgtgtatttcatacctactgtcattgaagaagaaaaattatatgttgctccacaatattgatatgatatgcaattattatataaaagtaaatttaattaattgtattttgcttgtagtactgcattttaataattaattttatttactacacacaattgcttaccttttaatatcataacctcaatcttactttctcttcttataatttttttttggccaatataattaaaagtgctaaaaatgttgctgagctatgaaaccaggtgtcgcttttcgaacttgcacggtcccaatacattgtgtatactgtatactatacacatcgacgtacatttcactttgtgttttgatttgatttgtttgaaagtgaaccatgacgcatgggcaaggataaaatggaacaactttattaaacaattgaaaataaataatgcgcaataataaataatgcgcaataataaatagtggc

SEQ ID NO: 275 - DNA, 2321 bp, Diabrotica virgifera
  SmartBlast Evalue=1E-47; Info=Vacuolar fusion protein MON1-like protein A n=2 Tax=Formicidae RepID=E2A1P7_9HYME
catacatattgttaaatttacttacatgcaaataaatccgtttatattcaatgttctacataatatgtattttcttttcgttaatttaaaaaataaatttactgtattttgccttttgaaataaagctttgagaattcaataaaacgacactacctatgaatcactaaacaaatactatacaggttgatgttttagtattcaaaacaacctcttccttttgacattctggaaattagctaaaagggttttattatttacaacgtattcgtggtgtgcaagtacttggaaggggaaacgagaaacgaccctgcgcgagtcgcggagaaatattgcaactatcttaaataattcatattgtcaattgaaattgtcaaattgacgtatatttcataccttctgtcaatgaagcagaaaaattatatattgctccacaatattgatatgatatgcaattattatataaaggtaaatttaattaattgtattttgcttgcagtactgcattttaataactaattttatttactacatacaattgtttacgttttataacataacctgcatcttattttttcttcttattatttttttggactatggccttgacaattatccagcaaccaggaccaatataattggccaatataattaaaagtgcgaaaaatgttgctgagctatgaaaccaggtgtcgctttgccggacttgcacggtcccaatagcatagataatttcaatgtaaagcgaataatctttaaattgtttttatttatttatatttgttagtagtcagtgttaccacccctagcccttatacaagctacaatatgcgtgggcatgcacctaatcaaattgtcaacattttgtggtaggttgctccactcttcaagagcagcttgtactagccgtgcggtgttttgtggattatcccggtgagctctaatgtttcttttaagcgtataccacaaatgctctatagggttaaggtcgggtgagtaagcaggccattccagaccagtgttatcatttttctttaagtatgtggagatgcattatcatacgtggaaattaaattttcctcttcagagcttaactccggttctagaacccaatcaacatacctgcgaactcctgtctccttagattcgatgctagcgtattcctctacggcctacggtcatgtttcttacttatccgaagactgtcaagtgtgtttgttacttctaacagtggaaagggatgtattttttactttgagtgaagcgaaacagaaaatcgtagaaaaattaagaagaaacaactgcttggaatccatcaacgaatcactggcagctccgggatatagttgtgcgagtgctggttttgtagagatacattatttgtataaatgtaagtccactgcccagttctatcaacctgttttaagccccccttatactcaagcgaagatctatctgactgaactttacaagggagctcatcaaagactgcataattctaccaaaccacttaaacttatgtttgaacggagttcgagggaggcgattcttgcctgggacactaaggggtttgaattgttcgttgtttttgagcctttgatcgatactcgttagcgattctcctggttggtaggcttttaaattggattaaaaaacaagaagataaactatttcacctaaatgcacctactttttaaatgaaggtacctgttctcacttattttaacctttgtcatgggcaaattataactcacacattaaacaaaagaatatttttatggacaccatcgaaatggtgagaatttgtgaattcttttgagtttgcctgtggattctatagtccacaatagatctctatcccatcattgtacaaaaagtggtgaattctttttagaattcgcccttataataatataacatagtacattttgggaacatagaaaatataataaaattgttttaaatgtatgtaaaatacaaatattgatattatttctagctttgaattaaagcgaatgtaaaaaactagcatacgaaatcaaacagtatttattttaaagcaatttaatcatcaatacataaaaattaaagaaaaccatgaaatcttgaaatcacaaattgaaactatttgtttaaagtcaattcgcggtgtgcaagtacttggagggggatacgagaaacgatcgagcgcgaatagcggagaaatattgcaactttcttaaataattcatattgtcaattgaaattgtcaaattgacatatgtttcatacctactgtcattgaagaagataaaatatatattgctccacaatattgatatga

SEQ ID NO: 276 - DNA, 849 bp, Diabrotica virgifera
gggaaggtccgataagtacttagcatctccgccgatggcgccactatcgcaaaagaaatctactatcgtgtaatgcatttccttatatgagtccttatattagtcatacaactaatgtcaaaattttgaacacggcccaaaatagcgacaattctaccttatcagttattcgcggtgtgcaagtacttggaaagggaaacgagaaacgaccgtgcgcgagtcgcggagaaatattgcaactatcttaaataattcatattgtcaattgaaattgtcaaattgacgtatatttcataccttctgtcattgacgcagaaaaattatatattgctccacaatattgatatgatatgcaattattatataaaggtaaatttaattaattgtattttgcttgcagtactgcattttaataactgattttatttactacatacaattgtttacgtttgctaaacataacctgcatcttattttttcttcttattatttttttggactatggtcttgacaattatccagcaaccaggactaatataattggccaatataattaaaagtgcgaataaaagtacagagcgtagaaatagaggtcgctttgccgaacttgcacggtcccatattcccatatataaaaactataaattattataacaaatttgtataagtagaactagtagaagtgtaagtagtattttaggcatagactacttggtgtacttaaataaaaataaaacaaccccagtaacattatagtactaagaccaaatgtatttatttggtaaggtagtttggaacaaaaaaaggtttaaagaagactcttcataacgaatcaactacaaaaaccaa

SEQ ID NO: 277 - DNA, 773 bp, Diabrotica virgifera
ccattgttaatattcattttttgaattagactatgatttccaaaatcatgtttgtctgaattttcttcaagatttttaaacattggatttttgctaagcattccttgataaagtttgtttagcagggaatggttgacttcaattagtgcggtcgtaaatattattaaatttatctgacttggcccattgttaagaccggtccggagcgataagcaacgaggtagacagagttggtcttttgacaattaacactaattaaacggtactcctataataaaacaaaggatccacaaaatttacaataatttcgacgacaaaaacaaaagaaaaaacggatgcaaaatatgctttgccttatatacccgaaattaatgttttcaaatgagttttaaaataaattaaatatattttaattgctaaggttatagaaaacgttctagaaaaacattcaaacatatttaaattttatctgcaaccgggccttttatactattatcggttaacccaggatgtttaagccggtactatttgaagtcaaccattcactgctaaacaaacttaaccacctctccggcaaaaccaaaggagtgatggctaccgagagtgtacttaagatgagaaaggagaatcataaaggcagttttttcggtgtagtgaacccggaagaactcaaacggtagagatgcaatggaattaactggaacctgccgaggtgcatgcgctctgtagtgaggaggtgttcccgccgggaaccgtaaccgcagcgagcggta

SEQ ID NO: 278 - DNA, 753 bp, Diabrotica virgifera
ttgaaatttgaccttaaatatgtatttggtctacaccttattttttcgaatgctttcgatcattctggactattctattttactacagtaaagcttgtttaccagtaaatggttgacttcaattagtgcggtcgtaaatattattaaatttatctgacttggcccattgttaagaccggtccggagcgataagcaacgaggtagacagagttggtcttttgacaattaacactaattaaacggtactcctataataaaacaaaggatccacaaaatttacaataatttcgacgacaaaaacaaaagaaaaaacggatgcaaaatatgctttgccttatatacccgaaattaatgttttcaaatgagttttaaaataaattaaatatattttaattgctaaggttatagaaaacgttctagaaaaacattcaaacatatttaaattttatctgcaaccgggccttttatactattatcggttaacccaggatgtttaagccggtactatttgaagtcaaccattcactgctaaacaaacttaaccacctctccggcaaaaccaaaggagtgatggctaccgagagtgtacttaagatgagaaaggagaatcataaaggcagttttttcggtgtagtgaacccggaagaactcaaacggtagagatgcaatggaattaactggaacctgccgaggtgcatgcgctctgtagtgaggaggtgttcccgccgggaaccgtaaccgcagcgagcggta

SEQ ID NO: 279 - DNA, 720 bp, Diabrotica virgifera
catacatattgttaaatttacttacatgcaaataaatccgtttatattcaatgttctacataatatgtattttcttttcgttaatttaaaaaataaatttactgtattttgccttttgaaataaagctttgagaattcaataaaacgacactacctatgaatcactaaacaaatactatacaggttgatgttttagtattcaaaacaacctcttccttttgacattctggaaattagctaaaagggttttattatttacaacgtattcgtggtgtgcaagtacttggaaggggaaacgagaaacgaccctgcgcgagtcgcggagaaatattgcaactatcttaaataattcatattgtcaattgaaattgtcaaattgacgtatatttcataccttctgtcaatgaagcagaaaaattatatattgctccacaatattgatatgatatgcaattattatataaaggtaaatttaattaattgtattttgagtgcagtactgcattttaataactaattttatttactacatacaattgttcacgttttcataacataacctgaatcttattttttcttcttactattttttggactatggccttgacaattatccagtaaccaggactaatataattggccaatataattaaaagtgcgaataaaagtacagagcgtagaaataggggtcgctttgccgaactttcacggtcccaatac

SEQ ID NO: 280 - DNA, 574 bp, Diabrotica virgifera
tccgtctcactcgtgctttctgttacaaatttttttatggataactcttatattttttttcgtcaatgttagcgttttgtagcatttttatcataatcaaggattgtgataagtaggtattcgcggtgtgcaagtacttggaagggaatacgagaaacgatcgtgcgcgaatagcggagaaatattgcaactttcttaaataattcatattgtcaattgaaattgtcaaattgacgtacatttcatacctactgtcattgaagaagaaaaattatatattgctccacaatattgatatgatatgcaattattatataaaggtaaatttaattaattgtattttgagtgcagtactgcattttaataactaattttatttactacatacaattgttcacgttttcataacataacctgaatcttattttttcttcttactattttttggactatggccttgacaattatccagtaaccaggactaatataattggccaatataattaaaagtgcgaataaaagtacagagcgtagaaataggggtcgctttgccgaactttcacggtcccaatac

SEQ ID NO: 281 - DNA, 312 bp, Diabrotica virgifera
catacatattgttaaatttacttacatgcaaataaatccgtttatattcaatgttctacataatatgtattttcttttcgttaatttaaaaaataaatttactgtattttgccttttgaaataaagctttgagaattcaataaaacgacactacctatgaatcactaaacaaatactatacagggcgatgtcctagtatgattcaagacaacctcttccttttgaaattctggaaattagccaaaagggtttcattatttacaacgtatagcacaagctgtggaagtattaataaatatgtataaattaaat

SEQ ID NO: 282 - DNA, 2293 bp, Diabrotica virgifera
  SmartBlast Evalue=1E-47; Info=Vacuolar fusion protein MON1-like protein A n=2 Tax=Formicidae RepID=E2A1P7_9HYME
gggtggcaatagtgtaacgattgaccaaaataagagacacatcgatctgaccgttcaaaaattatgacgaatacaaatttctgtcaaaatttgaaactcggcctgtacatcactaaacaaggagggcagacacccttcaatggtcatttgtcattccccataggagcctttataagaggaaggagtatgtaccgttcctcataactcaccctgtatcttcttcgtacgttattggtattcgcggtgtgcaagtacttggaaagggaaacgagaaacgaccctgcgcgagtcgcggagaaatattgcaactatcttaaataattcatattgtcaattgaaattgtcaaattgacgtatatttcataccttctgtcaatgaagcagaaaaattacatattgctccacaatattgatatgatatgcaattattatataaaggtaaatttaattaattgtattttgcttgcagtactgcattttaataactaattttatttactacatacaattgtttacgttttataacataacctgcatcttattttttcttcttattatttttttggactatggccttgacaattatccagcaaccaggaccaatataattggccaatataattaaaagtgcgaaaaatgttgctgagctatgaaaccaggtgtcgctttgccggacttgcacggtcccaatagcatagataatttcaatgtaaagcgaataatctttaaattgtttttatttatttatatttgttagtagtcagtgttaccacccctagcccttatacaagctacaatatgcgtgggcatgcacctaatcaaattgtcaacattttgtggtaggttgctccactcttcaagagcagcttgtactagccgtgcggtgttttgtggattatcccggtgagctctaatgtttcttttaagcgtataccacaaatgctctatagggttaaggtcgggtgagtaagcaggccattccagaccagtgttatcatttttctttaagtatgtggagatgcattatcatacgtggaaattaaattttcctcttcagagcttaactccggttctagaacccaatcaacatacctgcgaactcctgtctccttagattcgatgctagcgtattcctctacggcctacggtcatgtttcttacttatccgaagactgtcaagtgtgtttgttacttctaacagtggaaagggatgtattttttactttgagtgaagcgaaacagaaaatcgtagaaaaattaagaagaaacaactgcttggaatccatcaacgaatcactggcagctccgggatatagttgtgcgagtgctggttttgtagagatacattatttgtataaatgtaagtccactgcccagttctatcaacctgttttaagccccccttatactcaagcgaagatctatctgactgaactttacaagggagctcatcaaagactgcataattctaccaaaccacttaaacttatgtttgaacggagttcgagggaggcgattcttgcctgggacactaaggggtttgaattgttcgttgtttttgagcctttgatcgatactcgttagcgattctcctggttggtaggcttttaaattggattaaaaaacaagaagataaactatttcacctaaatgcacctactttttaaatgaaggtacctgttctcacttattttaacctttgtcatgggcaaattataactcacacattaaacaaaagaatatttttatggacaccatcgaaatggtgagaatttgtgaattcttttgagtttgcctgtggattctatagtccacaatagatctctatcccatcattgtacaaaaagtggtgaattctttttagaattcgcccttataataatataacatagtacattttgggaacatagaaaatataataaaattgttttaaatgtatgtaaaatacaaatattgatattatttctagctttgaattaaagcgaatgtaaaaaactagcatacgaaatcaaacagtatttattttaaagcaatttaatcatcaatacataaaaattaaagaaaaccatgaaatcttgaaatcacaaattgaaactatttgtttaaagtcaattcgcggtgtgcaagtacttggagggggatacgagaaacgatcgagcgcgaatagcggagaaatattgcaactttcttaaataattcatattgtcaattgaaattgtcaaattgacatatgtttcatacctactgtcattgaagaagataaaatatatattgctccacaatattgatatga

SEQ ID NO: 283 - DNA, 2279 bp, Diabrotica virgifera
  SmartBlast Evalue=1E-47; Info=Vacuolar fusion protein MON1-like protein A n=2 Tax=Formicidae RepID=E2A1P7_9HYME
acaaaaaatatacaaattatatacaaaaaacttacaaatggtttgtttgttgaaatattagacataatgtcgggatcttttaaatacctaataacaatatttttctgtgatactccaacaaaaaagtttaatgaattgagacatcatatctatgatgcacagttagaattttttatattaatttttcaatataccgagaatttgagaatatctcaaaccaatattcgcggtgtgcaagtacttggaagggaaacgagaaacgaccgtgcgcgagtcgcggagaaatattgcaactatcttaaataattcatattgtcaattgaaattgtcaaattgacgtatatttcataccttctgtcattgacgcagaaaaattatatattgctccacaatattgatatgatatgcaattattatataaaggtaaatttaattaattgtattttgcttgcagtactgcattttaataactgattttatttactacatacaattgtttacgtttgctaaacataacctgcatcttattttttcttcttattatttttttggactatggtcttgacaattatccagcaaccaggaccaatataattggccaatataattaaaagtgcgaaaaatgttgctgagctatgaaaccaggtgtcgctttgccggacttgcacggtcccaatagcatagataatttcaatgtaaagcgaataatctttaaattgtttttatttatttatatttgttagtagtcagtgttaccacccctagcccttatacaagctacaatatgcgtgggcatgcacctaatcaaattgtcaacattttgtggtaggttgctccactcttcaagagcagcttgtactagccgtgcggtgttttgtggattatcccggtgagctctaatgtttcttttaagcgtataccacaaatgctctatagggttaaggtcgggtgagtaagcaggccattccagaccagtgttatcatttttctttaagtatgtggagatgcattatcatacgtggaaattaaattttcctcttcagagcttaactccggttctagaacccaatcaacatacctgcgaactcctgtctccttagattcgatgctagcgtattcctctacggcctacggtcatgtttcttacttatccgaagactgtcaagtgtgtttgttacttctaacagtggaaagggatgtattttttactttgagtgaagcgaaacagaaaatcgtagaaaaattaagaagaaacaactgcttggaatccatcaacgaatcactggcagctccgggatatagttgtgcgagtgctggttttgtagagatacattatttgtataaatgtaagtccactgcccagttctatcaacctgttttaagccccccttatactcaagcgaagatctatctgactgaactttacaagggagctcatcaaagactgcataattctaccaaaccacttaaacttatgtttgaacggagttcgagggaggcgattcttgcctgggacactaaggggtttgaattgttcgttgtttttgagcctttgatcgatactcgttagcgattctcctggttggtaggcttttaaattggattaaaaaacaagaagataaactatttcacctaaatgcacctactttttaaatgaaggtacctgttctcacttattttaacctttgtcatgggcaaattataactcacacattaaacaaaagaatatttttatggacaccatcgaaatggtgagaatttgtgaattcttttgagtttgcctgtggattctatagtccacaatagatctctatcccatcattgtacaaaaagtggtgaattctttttagaattcgcccttataataatataacatagtacattttgggaacatagaaaatataataaaattgttttaaatgtatgtaaaatacaaatattgatattatttctagctttgaattaaagcgaatgtaaaaaactagcatacgaaatcaaacagtatttattttaaagcaatttaatcatcaatacataaaaattaaagaaaaccatgaaatcttgaaatcacaaattgaaactatttgtttaaagtcaattcgcggtgtgcaagtacttggagggggatacgagaaacgatcgagcgcgaatagcggagaaatattgcaactttcttaaataattcatattgtcaattgaaattgtcaaattgacatatgtttcatacctactgtcattgaagaagataaaatatatattgctccacaatattgatatga

SEQ ID NO: 284 - DNA, 2175 bp, Diabrotica virgifera
  SmartBlast Evalue=1E-47; Info=Vacuolar fusion protein MON1-like protein A n=2 Tax=Formicidae RepID=E2A1P7_9HYME
tccgtctcactcgtgctttctgttacaaatttttttatggataactcttatattttttttcgtcaatgttagcgttttgtagcatttttatcataatcaaggattgtgataagtaggtattcgcggtgtgcaagtacttggaagggaatacgagaaacgatcgtgcgcgaatagcggagaaatattgcaactttcttaaataattcatattgtcaattgaaattgtcaaattgacgtacatttcatacctactgtcattgaagaagaaaaattatatattgctccacaatattgatatgatatgcaattattatataaaggtaaatttaattaattgtattttgcttgcagtactgcattttaataactaattttatttactacatacaattgtttacgttttataacataacctgcatcttattttttcttcttattatttttttggactatggccttgacaattatccagcaaccaggaccaatataattggccaatataattaaaagtgcgaaaaatgttgctgagctatgaaaccaggtgtcgctttgccggacttgcacggtcccaatagcatagataatttcaatgtaaagcgaataatctttaaattgtttttatttatttatatttgttagtagtcagtgttaccacccctagcccttatacaagctacaatatgcgtgggcatgcacctaatcaaattgtcaacattttgtggtaggttgctccactcttcaagagcagcttgtactagccgtgcggtgttttgtggattatcccggtgagctctaatgtttcttttaagcgtataccacaaatgctctatagggttaaggtcgggtgagtaagcaggccattccagaccagtgttatcatttttctttaagtatgtggagatgcattatcatacgtggaaattaaattttcctcttcagagcttaactccggttctagaacccaatcaacatacctgcgaactcctgtctccttagattcgatgctagcgtattcctctacggcctacggtcatgtttcttacttatccgaagactgtcaagtgtgtttgttacttctaacagtggaaagggatgtattttttactttgagtgaagcgaaacagaaaatcgtagaaaaattaagaagaaacaactgcttggaatccatcaacgaatcactggcagctccgggatatagttgtgcgagtgctggttttgtagagatacattatttgtataaatgtaagtccactgcccagttctatcaacctgttttaagccccccttatactcaagcgaagatctatctgactgaactttacaagggagctcatcaaagactgcataattctaccaaaccacttaaacttatgtttgaacggagttcgagggaggcgattcttgcctgggacactaaggggtttgaattgttcgttgtttttgagcctttgatcgatactcgttagcgattctcctggttggtaggcttttaaattggattaaaaaacaagaagataaactatttcacctaaatgcacctactttttaaatgaaggtacctgttctcacttattttaacctttgtcatgggcaaattataactcacacattaaacaaaagaatatttttatggacaccatcgaaatggtgagaatttgtgaattcttttgagtttgcctgtggattctatagtccacaatagatctctatcccatcattgtacaaaaagtggtgaattctttttagaattcgcccttataataatataacatagtacattttgggaacatagaaaatataataaaattgttttaaatgtatgtaaaatacaaatattgatattatttctagctttgaattaaagcgaatgtaaaaaactagcatacgaaatcaaacagtatttattttaaagcaatttaatcatcaatacataaaaattaaagaaaaccatgaaatcttgaaatcacaaattgaaactatttgtttaaagtcaattcgcggtgtgcaagtacttggagggggatacgagaaacgatcgagcgcgaatagcggagaaatattgcaactttcttaaataattcatattgtcaattgaaattgtcaaattgacatatgtttcatacctactgtcattgaagaagataaaatatatattgctccacaatattgatatga

SEQ ID NO: 285 - DNA, 1353 bp, Diabrotica virgifera
  SmartBlast Evalue=1E-27; Info=Peritrophic matrix protein 5-B n= 1 Tax=Tribolium castaneum RepID=D1MAJ6_TRICA
cagcactgcaaaaactactactgaaaatgatattgatgaaaagactacatctgcaagcaatagtaccgaggaaagtagtaacacagacgttactactacagaagctatcggttcaagcacagataacacaaatgatgacgctaacaatactacaactcttgctccagaaaatggaacagccatatgtcttcaaaacaatgttgtttgccctgcaatcgatggaccagattcagtgttcgcgtctgtatctgattgtaccaaattttgtctatgttcaaatggagttccttatctttacaactgtccaggaggtctacacttcaatccttcactaaacgtatgtgattggcctgaaaatgctgcatgcacaaataataataacgatacaacttctacagaagcaacggtaacaacggagggtacaaatgcagatgaaactacaactgaaataagtaccactgaaagtaatgctgctgtaaatggaactgaaacttgtctcagaaataatgttgtctgcccagttgttgacggatacgattcagtctacgccgctttacctgactgctccaaattttgcctgtgcctgaacggtgtgccattcgaacatcaatgttcagatggtctgctctttaatccacgatcaaatacctgcgattggcctcagagaacgtcttgttctggtgacaataacgtaaccacttctgcagttcccgctgtttcaaccgaatatcttacagaagaagaaacaacagtacacagtagttcaacaagtaatggtgagaataatgtaacaggttctgtagttcccgctgtttctaccgaagatcttacagaagaagaaacaacagcacaaagtagttcaacaagtagtggtgagaataacgtaacaggttctgcagttcctgccgtttctactgaagatcttacagaagaagacacaacagtacaaagtagttcaacaagtgaagaaagccgcaacgaattaccagttggatcggaagagtgtttgcaaaataatgttgtttgcccagcagttcatggcaagttcccagtatatgcagcacttccagattgtaccaaattctgtcaatgttcgaatggagcaccatacctttacaactgtccaggaggtttacacttcaatccttcactaaatgtttgtgattggccagaagatgctggttgtgaaagatcaatatagtaccgtcaaattcttcaaatattttggtattataaattttgaataagagaaaatgctgacaaaaaactgtttactaatatactcatactagtatactgattttatattttgatccaaagagattataaaaataaattaatataagctaaaaa

SEQ ID NO: 286 - DNA, 1910 bp, Diabrotica virgifera
  SmartBlast Evalue=3E-76; Info=Peritrophic matrix protein 5-B n= 1 Tax=Tribolium castaneum RepID=D1MAJ6_TRICA
gtagaagaaaaatgtaagtaatagccatagtagataatattctataatgaataatatgactttggctttagtttttgcgattttatttatcggtggaatatctactgctacaaacaaagaaattgtccaacaattaaggcacaatgccctatgtcttcaggctggattttcttgccctgcagtagacagtcaaacatcggtttactttccattagcagattgcaccaagttctgtcaatgttccaacggagttccatatctacacaattgtccgccggggttacatttcaatccaagtcttaacgtttgtgattatcctgcgcaggctggatgtaccggtgaaggggttgtagtaagtacaacaactactactacaactactactaccactacgccggctccaactactaccactacgactaccacaacacctgctcctactactacttcggcaccgaccaccacctctacttcaactactgctcctacaacaacaactcccactaccactacttctgccccagtaaccaccactaggacgaccacaacacctgctccctccactacatcgggaccaattacttcaacaactgctgctacaactataaaagttgataatttatgtcttcagcaaaacatagcttgtccagcagttgatggaccagattccgtctatttctcacatagcaattgttctaaattttgccaatgttccaacggtgtgccatatgaacaaacttgtccagaaggtcttcattttaatgcaaaattgaatatttgtgattggccacagaatgcaggatgtagtggaacagatgtaactcaaccgactgttgaacctaccacaattacaactgccaatccttcgacagctacaaacagtacaactgaaagttcaactacagtttcgtctactacgaccacgcaagaaactcctcaagacactacaactcttagtgataatatttgcattcgtgaaaatataatttgtcctgttgttgacggaccaaattcagtgtacgcagctgtatcagattgtaccaaattttgccaatgctcaaatggttacccataccagcagaactgtccagtaggtttacactttaatccaaaactgaacgtctgcgactggcctgaagatgctggttgtactggaggtaccaccgcagtcactagaactgctcaaagtactacttccacaacaactgtaagtagcacaagcgaaaccacaataactacagaggaagttacaactcagagagttaataacggaactgaaatttgccttgaaaataatatagtatgtcctgttatcgatggtcctgactcagtatatgcagctttaccagattgtaccagattctgccaatgttcaaacggcctaccatatttgcacagttgtccacatggtttacattttaatccaaatctaaacgtatgcgactggcctgaagatgcaggatgtaccggtggtactaccaccacagaaataaatattacgcaaaatgaaacgactgaaaaaacaaccacaatcattgtaacaagcactaacgcagaagctagtaccactcaagatacttctgatggaccacaaaatacaacaaaaatatgtttacagcatggtatccaatgtcccaagatagatggtcctaattccatctatggagcattacctgattgcaccaaattttgtcagtgttcaaacggaataccatatctgcatagatgtccagttggattacattttaaccctactctgaatgtgtgtgactggcctgaagacgcaggatgtgttggtgaggtcacaacagaaaagacaactgaaaatattaccagtgacgcaaccactgaaaatatatcaactgtaccatcaaatactaccacttctggcacagattcatctgaagcaa

SEQ ID NO: 287 - DNA, 700 bp, Diabrotica virgifera
  SmartBlast Evalue=1E-28; Info=Peritrophic matrix protein 5-B n= 1 Tax=Tribolium castaneum RepID=D1MAJ6_TRICA
atcttcaacattgtccagctggcctacactttaatcctacactaaatgtgtgcgattggccagaagatgcaggctgcacaagcggtaataatagtacttctatcagcgctgaaggtacaactgctagcactcaaactgaaaataatagcacagaaaaaagcacctctgctagtaatagtaccgaaggaaatacaaccgaaaataataacgcacaaaataataccaccgaaataactactacacaagccagtattacaagtgacactagcgtagatgtaacacaagccaattctaacagcagtacgactccacaagatgggttagaactatgtattaaacacgacgttgtttgccctgaagtcgacggaccagtttcagtttatgcccgcttaccagactgtaccaaattctgtcaatgttctaatggggtaccgtatctgcatcattgtccagtaggtctacatttcaatccttcactaaatgtttgtgattggccagaagatgcaggttgtaataatgtaatagatgtaactgaaagtacttcaaaagaaggcagcacttctactgccacaacagaatataatgaggtcactactaaaaataatactaccaaggaaagtaccgattccacagatgtccccaatactacggagagtcaaaccaaaactactactggcgaaaatgtaactgacaatgttac

SEQ ID NO: 288 - DNA, 2779 bp, Diabrotica virgifera
catttgcggacatatgtttgtggagcaagggtcattgttttttcatgtagaattgccccgtaaatgttgtcgcatttatttggaaacaccctgtattgatgaagaagcattgctagttgttgaagtgcctaacttttttattatccacataggtgaattagtcaaaaagcgtaatgttaagaaagcctaaagccatggtttgttaggaacagtgagcgacgcacggcatacgggtacagcagaatctgttgtactcgacgcacggcagatttgagtaagtcggtttgttagcatattattctgtcttctgtcgatctcaaaatagtttgagtttgacgtttattctcacggagggtgtacgtagaaaaacaaattctgacacaatcaaggcaataattttattactcctagaaaaggaggaggaagaagagataataatattaaatttaaataaaagaaataaaaatgtaaactaaatgttttcatgtcgtaatacagaaggtgcatttatattaatagtcaaaagaaaattgtttcagaacgagaaaaaatttcgagaatattttagaatttccagatatttatttgaaaatgtattaccatttataagggataatattactaaaaaaccctacaacagaagacaacatccgatttctggagaagaaaaattaagcataactttgaattaggttttttttttatttagagaaaaaataaaaatatgtgtttaagtaaaaaacagaaaacttcttaaaaatgtaaagtatattataattgtatcttacatttctacattgttattaattgattctggcgaaaattcaaacaaatgagatcctacatttatttccaaagaatttcacaagaattatttgttgtaataggaaccaattcatgtacctaattcatttgcagccagctcaatttcatatcgccaaacaatatgcattacttcagcttttattcttgccttttcaatcgtaggaaatctcgatactgtggaagcaacactttaaaaaaacatgtggatcacctgatttttgagccaatgtcgattatgtttccgactttttaacaagtttttcaatcaaagcggttcgttcctctcgtcccatttttaattcgctcgttaatgagaaatttctgtttttgacatttactttttttttcggtgctcacaatatagtattataaaagtgtaaaaagagtaataaatcgtctaatacaatagtaatagaaattagatgttgggttcctgtgaggcacatggtgtctttgaaacgcactactgaaagggaaaggtttatagtgggtactttttgttaaatgcaagctgcttttctctttgaatatttccccaaataattgacctgaaaacaggtcaattgacagagaactacgtacatatttaaaaatacgcgaatagaataataaaaaatgagatattcaaagcatactttaaaatagggatcagggataatggcaagacaaaattgtgccatttgttgaataataacgatacactttattttgtacaaacgtagttttattataatgcatgcttcagtttaataaataatagaaataataccaattaatctaaatagcaattaaatactaataatatcaatttaatacaagtgactttttcatttactttgtgcaattaaaaatatgtcaaatcatgcaaacttatttttgtttgaataaaattagtttacatcaccacgttgtacactgtgagttcagctgaacgtttgcgtccaaatcaaatcgcagttgattccagcgcacaccgtcgacgtatgtacactgctgtcggtcttcagagcgcgcagctaagcagaacctaacaatccgttaacatacagaagccattcctttgatttggactgacgtgcgcggcgttcgactgactgtgagttgtgcgtcgctcactgttctaacaaaccgtggcttaaggctacagttgggttttaattttaatattttatgtgtgctggagttttccacagggtgttccaaactttgaggaggagacacgctatcatttttacgcccggtgtacaatgacacttgcctttttggtaatgaattattacattgatattcttgaagaatagagctgtagtatactgggaaaatcactcaaatcggacagcagatttgggaaatacgaggcatcggaaatgtctcatttttgaggtggtgcgttaattttgattgaatttggtgcgaatatttaagaattgataaaaaaacatatttgaatttgcttgatttagtcacacctataattatcaaacaaaatacacagctatatgacatgccaactagcaactacacagttttagtttgaatgtacaattttaactgaacagttttatctaatgaaatttcaattcatttgtcaattgaactgtacagtcttcagttttgcctacacacataagttttaactgaatagttcgattgtttagttgaaactgtgcagttcaaactaaaggtgtgtagcggcctttagcggaactgaattgaaaattatttcgcacattacaggatgtaacaaaaatacaggtcatagatttaatcacatattctgggacccaaaatggtttgattgaacctaacttaccttatgtgtgcacataagtacaaatgtgcacataagagggttacagccctttgaggttacagaaagaaatcgattttttccaatatatcgggggctgttggagatcttttgttgaaagtggacatgtggcattcttatgat

SEQ ID NO: 289 - DNA, 2766 bp, Diabrotica virgifera
catttgcggacatatgtttgtggagcaagggtcattgttttttcatgtagaattgccccgtaaatgttgtcgcatttatttggaaacaccctgtattgatgaagaagcattgctagttgttgaagtgcctaacttttttattatccacataggtgaattagtcaaaaagcgtaatgttaagaaagcctaaagccatggtttgttaggaacagtgagcgacgcacggcatacgggtacagcagaatctgttgtactcgacgcacggcagatttgagtaagtcggtttgttagcatattattctgtcttctgtcgatctcaaaatagtttgagtttgacgtttattctcacggagggtgtacgtagaaaaacaaattctgacacaatcaaggcaataattttattactcctagaaaaggaggaggaagaagagataataatattaaatttaaataaaagaaataaaaatgtaaactaaatgttttcatgtcgtaatacagaaggtgcatttatattaatagtcaaaagaaaattgtttcagaacgagaaaaaatttcgagaatattttagaatttccagatatttatttgaaaatgtattaccatttataagggataatattactaaaaaaccctacaacagaagacaacatccgatttctggagaagaaaaattaagcataactttgaattaggttttttttttatttagagaaaaaataaaaatatgtgtttaagtaaaaaacagaaaacttcttaaaaatgtaaagtatattataattgtatcttacatttctacattgttattaattgattctggcgaaaattcaaacaaatgagatcctacatttatttccaaagaatttcacaagaattatttgttgtaataggaaccaattcatgtacctaattcatttgcagccagctcaatttcatatcgccaaacaatatgcattacttcagcttttattcttgccttttcaatcgtaggaaatctcgatactgtggaagcaacactttaaaaaaacatgtggatcacctgatttttgagccaatgtcgattatgtttccgactttttaacaagtttttcaatcaaagcggttcgttcctctcgtcccatttttaattcgctcgttaatgagaaatttctgtttttgacatttactttttttttcggtgctcacaatatagtattataaaagtgtaaaaagagtaataaatcgtctaatacaatagtaatagaaattagatgttgggttcctgtgaggcacatggtgtctttgaaacgcactactgaaagggaaaggtttatagtgggtactttttgttaaatgcaagctgcttttctctttgaatatttccccaaataattgacctgaaaacaggtcaattgacagagaactacgtacatatttaaaaatacgcgaatagaataataaaaaatgagatattcaaagcatactttaaaatagggatcagggataatggcaagacaaaattgtgccatttgttgaataataacgatacactttattttgtacaaacgtagttttattataatgcatgcttcagtttaataaataatagaaataataccaattaatctaaatagcaattaaatactaataatatcaatttaatacaagtgactttttcatttactttgtgcaattaaaaatatgtcaaatcatgcaaacttatttttgtttgaataaaattagtttacatcaccacgttgtacactgtgagttcagctgaacgtttgcgtccaaatcaaatcgcagttgattccagcgcacaccgtcgacgtatgtacactgctgtcggtcttcagagcgcgcagctaagcagaacctaacaatccgttaacatacagaagccattcctttgatttggactgacgtgcgcggcgttcgactgactgtgagttgtgcgtcgctcactgttctaacaaaccgtggcttaaggctacagttgggttttaattttaatattttatgtgtgctggagttttccacagggtgttccaaactttgaggaggagacacgctatcatttttacgcccggtgtacaatgacacttgcctttttggtaatgaattattacattgatattcttgaagaatagagctgtagtatactgggaaaatcactcaaatcggacagcagatttgggaaatacgaggcatcggaaatgtctcatttttgaggtggtgcgttaattttgattgaatttggtgcgaatatttaagaattgataaaaaaacatatttgaatttgcttgatttagtcacacctataattatcaaacaaaatacacagctatatgacatgccaactagcaactacacagttttagtttgaatgtacaattttaactgaacagttttatctaatgaaatttcaattcatttgtcaattgaactgtacagtcttcagttttgcctacacacataagttttaactgaatagttcgattgtttagttgaaactgtgcagttcaaactaaaggtgtgtagcggcctttagcggaactgaattgaaaattatttcgcacattacaggatgtaacaaaaatacaggtcatagatttaatcacatattctgggacccaaaatggtttgattgaacctaacttaccttatgtgtgcacataagtacaaatgtgcacataagagggttacagccctttgaggttacaaagaaatcgattttttccaatatatcgggggctgttggagatcttttgttgaaagtggacatgtggc

SEQ ID NO: 290 - DNA, 2611 bp, Diabrotica virgifera
catttgcggacatatgtttgtggagcaagggtcattgttttttcatgtagaattgccccgtaaatgttgtcgcatttatttggaaacaccctgtattgatgaagaagcattgctagttgttgaagtgcctaacttttttattatccacataggtgaattagtcaaaaagcgtaatgttaagaaagcctaaagccatggtttgttaggaacagtgagcgacgcacggcatacgggtacagcagaatctgttgtactcgacgcacggcagatttgagtaagtcggtttgttagcatattattctgtcttctgtcgatctcaaaatagtttgagtttgacgtttattctcacggagggtgtacgtagaaaaacaaattctgacacaatcaaggcaataattttattactcctagaaaaggaggaggaagaagagataataatattaaatttaaataaaagaaataaaaatgtaaactaaatgttttcatgtcgtaatacagaaggtgcatttatattaatagtcaaaagaaaattgtttcagaacgagaaaaaatttcgagaatattttagaatttccagatatttatttgaaaatgtattaccatttataagggataatattactaaaaaaccctacaacagaagacaacatccgatttctggagaagaaaaattaagcataactttgaattaggttttttttttatttagagaaaaaataaaaatatgtgtttaagtaaaaaacagaaaacttcttaaaaatgtaaagtatattataattgtatcttacatttctacattgttattaattgattctggcgaaaattcaaacaaatgagatcctacatttatttccaaagaatttcacaagaattatttgttgtaataggaaccaattcatgtacctaattcatttgcagccagctcaatttcatatcgccaaacaatatgcattacttcagcttttattcttgccttttcaatcgtaggaaatctcgatactgtggaagcaacactttaaaaaaacatgtggatcacctgatttttgagccaatgtcgattatgtttccgactttttaacaagtttttcaatcaaagcggttcgttcctctcgtcccatttttaattcgctcgttaatgagaaatttctgtttttgacatttactttttttttcggtgctcacaatatagtattataaaagtgtaaaaagagtaataaatcgtctaatacaatagtaatagaaattagatgttgggttcctgtgaggcacatggtgtctttgaaacgcactactgaaagggaaaggtttatagtgggtactttttgttaaatgcaagctgcttttctctttgaatatttccccaaataattgacctgaaaacaggtcaattgacagagaactacgtacatatttaaaaatacgcgaatagaataataaaaaatgagatattcaaagcatactttaaaatagggatcagggataatggcaagacaaaattgtgccatttgttgaataataacgatacactttattttgtacaaacgtagttttattataatgcatgcttcagtttaataaataatagaaataataccaattaatctaaatagcaattaaatactaataatatcaatttaatacaagtgactttttcatttactttgtgcaattaaaaatatgtcaaatcatgcaaacttatttttgtttgaataaaattagtttacatcaccacgttgtacactgtgagttcagctgaacgtttgcgtccaaatcaaatcgcagttgattccagcgcacaccgtcgacgtatgtacactgctgtcggtcttcagagcgcgcagctaagcagaacctaacaatccgttaacatacagaagccattcctttgatttggactgacgtgcgcggcgttcgactgactgtgagttgtgcgtcgctcactgttctaacaaaccgtggcttaaggctacagttgggttttaattttaatattttatgtgtgctggagttttccacagggtgttccaaactttgaggaggagacacgctatcatttttacgcccggtgtacaatgacacttgcctttttggtaatgaattattacattgatattcttgaagaatagagctgtagtatactgggaaaatcactcaaatcggacagcagatttgggaaatacgaggcatcggaaatgtctcatttttgaggtggtgcgttaattttgattgaatttggtgcgaatatttaagaattgataaaaaaacatatttgaatttgcttgatttagtcacacctataattatcaaacaaaatacacagctatatgacatgccaactagcaactacacagttttagtttgaatgtacaattttaactgaacagttttatctaatgaaatttcaattcatttgtcaattgaactgtacagtcttcagttttgcctacacacataagttttaactgaatagttcgattgtttagttgaaactgtgcagttcaaactaaaggtgtgtagcggcctttagcggaactgaattgaaaattatttcgcacattacaggatgtaacaaaaatacaggtcataaatttgatcacatgttctgggaccc

SEQ ID NO: 291 - DNA, 2418 bp, Diabrotica virgifera
cgccaatgtgaatataaaattcttaattgtatgcaaatttcatttgcgtgtctcggccggtttggagcaatgaatgaatcgtcagtttgtgggagggaattcgggatcccgtatctcggaagcagggcatttgcggacatgtgtttgtaggagcaaagggtcattattttttcatgtagaattgccccgtaaatgttgtcgcacttatttggaaacaccctgtattgatgaaaaacattgctagttgttgagtgcctaacttttttattatccaacataagcgaattagtcaaaaggcataatgttggggaagcctagggctgcagttgggttttaattttaatattttatatatgctggagttttccacagggtgttccaaactttgaggaggggacacgctatcatttttgcacccggtatacaatgacacttgcctttttggtaataatattgttgcgttgatattcttgaagaatagagctgtaatatactagaaaatcactcaaatcggacaacagatttaggaaatacgaaacatcagaaatgtctcatttttgggatggtgcgttaattttgattgaatttggtgcgaatatttaagaattgataaaaaaacatatttgaatttgcttgatttagtcacacctataattatcaaacaaaatacacagctatatgacatgccaactagcaactacacagttttagtttgaatgtacaattttaactgaacagttttatctaatgaaatttcaattcatttgtcaattgaactgtacagtcttcagttttgcctacacacataagttttaactgaatagttcgattgtttagttgaaactgtgcagttcaaactaaaggtgtgaagcggcctttagcggaactgaattgaaaattatttcgcacattacagggtgtaacaaaaatgcaggtcataaatttgatcacatgttctgggacccaaagtggtttgattgagcctaacttgccttagtacaaatgtgcacataaggggagttgcggccctttgaagttgcaggaaaatcgattttttccaatatatcgaggactattggagatcttttgttgaaagtggacatgtggcattcttatggtagtagtatcttgtgaaagattatagtgaagtttgggcaccccatagacatttttgagggttttgttcttttatacccccccaaacttttgtgtacgttccaatttaattgttgttgtggtaccattagctaaatacaatattttaaaagcttttttgcctcttagtactttttccaaacgtcagtttttatcgagatattttgaatatttgtcaaatccaccacatatttgtatatggctaagtacgattatggagacttggtaataatatgaaaatttatttatgatttacatttttaggtatatttgaaccatattaaagaagaagtaatatctcgataaaaagtgccttctcgagaaaatacaaagaggcaaaaaagttttaaaaacactgtatttaactaatggtaccgcagtaaaagtttaattggaacgtacacaaacatttggggggtttaaaggaacaaaacccccataaaatgtttatgtaaacatattaaaaaagaagccgcaactcgataaaactgccttatcgaaaaaatactaagaggcaaaaaagttatagaaatattgaattgaactaatggtaccacaataataatttaattggagcgtgcacaggggtttgggggtgtttaagggaacaaaatccccataaaatttttgtggaatgcacaaatttcactgtaattcttttttaagatgttcctgccatgggagtgccacatgtccattttcaatgggggatctccaatagttttcgatatattcgagggaatcgatttttattttgtaacttcggggggctgtaactttttttatgtgcatatttgtactaaggtaaattgggttcattcgaactatttttggtcttaaaatgtgtgatctaatttatgacctgtattttcgttacaccctatctgaagcattatttggttaaaacatctcgtttctgttgatacaaaaaaatattaatttttctggactaaattacggttctgtttatgtcctagaagacttggtattcacgcaatgttgccaaactgaattttgttatatttgctttacattttctagccgatttccgagcgtactataactctatcgaccgattagtcgggactgtcagaaaaaggttttaaaatatttattacttttatgaataattattgttcatttgtttaaagtcatacatcaaagtttttatttttttatggtaaacatcgtgcatttttatatgtgattgatattaatcttgttatatatctgagacaaaaataaatgatgagatagaaatgc

SEQ ID NO: 292 - DNA, 2423 bp, Diabrotica virgifera
cgccaatgtgaatataaaattcttaattgtatgcaaatttcatttgcgtgtctcggccggtttggagcaatgaatgaatcgtcagtttgtgggagggaattcgggatcccgtatctcggaagcagggcatttgcggacatgtgtttgtaggagcaaagggtcattattttttcatgtagaattgccccgtaaatgttgtcgcacttatttggaaacaccctgtattgatgaaaaacattgctagttgttgagtgcctaacttttttattatccaacataagcgaattagtcaaaaggcataatgttggggaagcctagggctgcagttgggttttaattttaatattttatatatgctggagttttccacagggtgttccaaactttgaggaggggacacgctatcatttttgcacccggtatacaatgacacttgcctttttggtaataatattgttgcgttgatattcttgaagaatagagctgtaatatactagaaaatcactcaaatcggacaacagatttaggaaatacgaaacatcagaaatgtctcatttttgggatggtgcgttaattttgattgaatttggtgcgaatatttaagaattgataaaaaaacatatttgaatttgcttgatttagtcacacctataattatcaaacaaaatacacagctatatgacatgccaactagcaactacacagttttagtttgaatgtacaattttaactgaacagttttatctaatgaaatttcaattcatttgtcaattgaactgtacagtcttcagttttgcctacacacataagttttaactgaatagttcgattgtttagttgaaactgtgcagttcaaactaaaggtgtgaagcggcctttagcggaactgaattgaaaattatttcgcacattacagggtgtaacaaaaatgcaggtcataaatttgatcacatgttctgggacccaaagtggtttgattgagcctaacttgccttagtacaaatgtgcacataaggggagttgcggccctttgaagttgcaggaaaatcgattttttccaatatatcgaggactattggagatcttttgttgaaagtggacatgtggcattcttatggtagtagtatcttgtgaaagattatagtgaagtttggacaccccataaacattttgtgagggttttgttcttttataccccccccccaaaggcttttgtgtacgttccagtttaattgttgttgtggtaccattggctaaatacaatattttaaaaacttttttgcctcttagtactttttccaaaagtcagtttttatcgagatattttgaatatttgtcaaatccaccacatatttgtatatggctaagtacgattatggagacttggtaatattatgaaaatttatttatgatttacatttttaggtatattttgaaccatattaaaaaagaagtaatatcttgataaaaagtgccttctcgaaaaaatacaaaaaggcaaaaaagttataaaaacactgtgtttaactgatggtaccgcagtaaaagcttaattggaacatacacaaacatttggggggtttaaaggaacaaaacccccataaaatttttatgtaaacattaaaaaagaagccgcaactcgataaaagctgccttatcgaaaaagtactaagaggcaaaaaagttatagaaatattgaattgaactaatggtaccacaatagtaatttaattggagcgtacacgggagtttgggggtgtttaagggaacggaacccccataaaatttttgtggaatgcacaaatttcactgtggttcttttttaagatgttcctgccatagaatgccacatgtccgttttcagtggaaggtctccaatagttttcgatatattcgagggaatcgatttttattttgtaacttcggggggctgtaactttttttatgtgcatatttgtactaaggtaaattgggttcattcgaactatttttggtcttaaaatgtgtgatctaatttatgacctgtattttcgttacaccctatctgaagcattatttggttaaaacatctcgtttctgttgatacaaaaaaatattaatttttctggactaaattacggttctgtttatgtcctagaagacttggtattcacgcaatgttgccaaactgaattttgttatatttgctttacattttctagccgatttccgagcgtactataactctatcgaccgattagtcgggactgtcagaaaaaggttttaaaatatttattacttttatgaataattattgttcatttgtttaaagtcatacatcaaagtttttatttttttatggtaaacatcgtgcatttttatatgtgattgatattaatcttgttatatatctgagacaaaaataaatgatgagatagaaatgc

SEQ ID NO: 293 - DNA, 2423 bp, Diabrotica virgifera
cgccaatgtgaatataaaattcttaattgtatgcaaatttcatttgcgtgtctcggccggtttggagcaatgaatgaatcgtcagtttgtgggagggaattcgggatcccgtatctcggaagcagggcatttgcggacatgtgtttgtaggagcaaagggtcattattttttcatgtagaattgccccgtaaatgttgtcgcacttatttggaaacaccctgtattgatgaaaaacattgctagttgttgagtgcctaacttttttattatccaacataagcgaattagtcaaaaggcataatgttggggaagcctagggctgcagttgggttttaattttaatattttatatatgctggagttttccacagggtgttccaaactttgaggaggggacacgctatcatttttgcacccggtatacaatgacacttgcctttttggtaataatattgttgcgttgatattcttgaagaatagagctgtaatatactagaaaatcactcaaatcggacaacagatttaggaaatacgaaacatcagaaatgtctcatttttgggatggtgcgttaattttgattgaatttggtgcgaatatttaagaattgataaaaaaacatatttgaatttgcttgatttagtcacacctataattatcaaacaaaatacacagctatatgacatgccaactagcaactacacagttttagtttgaatgtacaattttaactgaacagttttatctaatgaaatttcaattcatttgtcaattgaactgtacagtcttcagttttgcctacacacataagttttaactgaatagttcgattgtttagttgaaactgtgcagttcaaactaaaggtgtgtagcggcctttagcggaactgaattgaaaattatttcgcacattacaggatgtaacaaaaatacaggtcataaatttgatcacatgttctgggacccaggagtagttcgattgaacctaacttgccttagtacaggtgtgcacatggaaggggttgcagccctttgaagttgcagaggaaaagtcgattttttccaatatatcgaaaactattggagatcttttgttgagagtggacatgtggcattcttatggtagtggtatcttgtgaaggggttatagtgaagtttggacaccccataaacattttatgagggttttgttcttttatacccccccaaacttttgtgtacgttccaatttaattattattgtagtaccattagctaaatacaatatattaaaaacttttttgcctcttagtactttttccaaaagtcagtttttatcgagatattttgaatatttgtcaaatccaccacatatttgtatatggctaagtacgattatggagacttggtaatattatgaaaatttatttatgatttacatttttaggtatattttgaaccatattaaaaaagaagtaatatcttgataaaaagtgccttctcgaaaaaatacaaaaaggcaaaaaagttataaaaacactgtgtttaactgatggtaccgcagtaaaagcttaattggaacatacacaaacatttggggggtttaaaggaacaaaacccccataaaatttttatgtaaacattaaaaaagaagccgcaactcgataaaagctgccttatcgaaaaagtactaagaggcaaaaaagttatagaaatattgaattgaactaatggtaccacaatagtaatttaattggagcgtacacgggagtttgggggtgtttaagggaacggaacccccataaaatttttgtggaatgcacaaatttcactgtggttcttttttaagatgttcctgccatagaatgccacatgtccgttttcagtggaaggtctccaatagttttcgatatattcgagggaatcgatttttattttgtaacttcggggggctgtaactttttttatgtgcatatttgtactaaggtaaattgggttcattcgaactatttttggtcttaaaatgtgtgatctaatttatgacctgtattttcgttacaccctatctgaagcattatttggttaaaacatctcgtttctgttgatacaaaaaaatattaatttttctggactaaattacggttctgtttatgtcctagaagacttggtattcacgcaatgttgccaaactgaattttgttatatttgctttacattttctagccgatttccgagcgtactataactctatcgaccgattagtcgggactgtcagaaaaaggttttaaaatatttattacttttatgaataattattgttcatttgtttaaagtcatacatcaaagtttttatttttttatggtaaacatcgtgcatttttatatgtgattgatattaatcttgttatatatctgagacaaaaataaatgatgagatagaaatgc

SEQ ID NO: 294 - DNA, 1984 bp, Diabrotica virgifera
cgccaatgtgaatataaaattcttaattgtatgcaaatttcatttgcgtgtctcggccggtttggagcaatgaatgaatcgtcagtttgtgggagggaattcgggatcccgtatctcggaagcagggcatttgcggacatgtgtttgtaggagcaaagggtcattattttttcatgtagaattgccccgtaaatgttgtcgcacttatttggaaacaccctgtattgatgaaaaacattgctagttgttgagtgcctaacttttttattatccaacataagcgaattagtcaaaaggcataatgttggggaagcctagggctgcagttgggttttaattttaatattttatatatgctggagttttccacagggtgttccaaactttgaggaggggacacgctatcatttttgcacccggtatacaatgacacttgcctttttggtaataatattgttgcgttgatattcttgaagaatagagctgtaatatactagaaaatcactcaaatcggacaacagatttaggaaatacgaaacatcagaaatgtctcatttttgggatggtgcgttaattttgattgaatttggtgcgaatatttaagaattgataaaaaaacatatttgaatttgcttgatttagtcacacctataattatcaaacaaaatacacagctatatgacatgccaactagcaactacacagttttagtttgaatgtacaattttaactgaacagttttatctaatgaaatttcaattcatttgtcaattgaactgtacagtcttcagttttgcctacacacataagttttaactgaatagttcgattgtttagttgaaactgtgcagttcaaactaaaggtgtgaagcggcctttagcggaactgaattgaaaattatttcgcacattacagggtgtaacaaaaatgcaggtcataaatttgatcacatgttctgggacccaaagtggtttgattgagcctaacttgccttagtacaaatgtgcacataaggggagttgcggccctttgaagttgcaggaaaatcgattttttccaatatatcgaggactattggagatcttttgttgaaagtggacatgtggcattcttatggtagtagtatcttgtgaaagattatagtgaagtttgggcaccccatagacatttttgagggttttgttcttttatacccccccaaacttttgtgtacgttccaatttaattgttgttgtggtaccattagctaaatacaatattttaaaagcttttttgcctcttagtactttttccaaacgtcagtttttatcgagatattttgaatatttgtcaaatccaccacatatttgtatatggctaagtacgattatggagacttggtaataatatgaaaatttatttatgatttacatttttaggtatatttgaaccatattaaagaagaagtaatatctcgataaaaagtgccttctcgagaaaatacaaagaggcaaaaaagttttaaaaacactgtatttaactaatggtaccgcagtaaaagtttaattggaacgtacacaaacatttggggggtttaaaggaacaaaacccccataaaatgtttatgtaaacatattaaaaaagaagccgcaactcgataaaactgccttatcgaaaaaatactaagaggcaaaaaagttatagaaatattgaattgaactaatggtaccacaataataatttaattggagcgtacacaggggtttgggggtgtttaagggaacagaatccccataaaatttttgtggaatgcacaaatttcactgtaattcttttttaagatgttcctgccatgggagtgccacatgtccgttttcagtggaaggtctccaatagttttcgatatattcgaaaaatcgattttttattttgtaacttcggggggctgtaactttttttatgtgcatatttgtactggtgagttaggttcattcgaactgtttt

SEQ ID NO: 295 - DNA, 2017 bp, Diabrotica virgifera
tatcgtttttacacccggtatacagtgacacttgcctttttagtaatggaattattacgttgatgttcttgaagaataaagctgtaatatactggaaaatcactcaaatcggacagcggatttaggaaatgcgaaacatcagaggatgtctcatttttgggatggtgcgttaattttgattgaatttggtgcgaatatttaagaattgataaaaaaacatatttgaatttgcttgatttagtcacacctataattatcaaacaaaatacacagctatatgacatgccaactagcaactacacagttttagtttgaatgtacaattttaactgaacagttttatctaatgaaatttcaattcatttgtcaattgaactgtacagtcttcagttttgcctacacacataagttttaactgaatagttcgattgtttagttgaaactgtgcagttcaaactaaaggtgtgaagcggcctttagcggaactgaattgaaaattatttcgcacattacagggtgtaacaaaaatgcaggtcataaatttgatcacatgttctgggacccaaagtggtttgattgagcctaacttgccttagtacaaatgtgcacataaggggagttgcggccctttgaagttgcaggaaaatcgattttttccaatatatcgaggactattggagatcttttgttgaaagtggacatgtggcattcttatggtagtagtatcttgtgaaagattatagtgaagtttgggcaccccatagacatttttgagggttttgttcttttatacccccccaaacttttgtgtacgttccaatttaattgttgttgtggtaccattagctaaatacaatattttaaaagcttttttgcctcttagtactttttccaaacgtcagtttttatcgagatattttgaatatttgtcaaatccaccacatatttgtatatggctaagtacgattatggagacttggtaataatatgaaaatttatttatgatttacatttttaggtatatttgaaccatattaaagaagaagtaatatctcgataaaaagtgccttctcgagaaaatacaaagaggcaaaaaagttttaaaaacactgtatttaactaatggtaccgcagtaaaagtttaattggaacgtacacaaacatttggggggtttaaaggaacaaaacccccataaaatgtttatgtaaacatattaaaaaagaagccgcaactcgataaaactgccttatcgaaaaaatactaagaggcaaaaaagttatagaaatattgaattgaactaatggtaccacaataataatttaattggagcgtgcacaggggtttgggggtgtttaagggaacaaaatccccataaaatttttgtggaatgcacaaatttcactgtaattcttttttaagatgttcctgccatgggagtgccacatgtccattttcaatgggggatctccaatagttttcgatatattcgagggaatcgatttttattttgtaacttcggggggctgtaactttttttatgtgcatatttgtactaaggtaaattgggttcattcgaactatttttggtcttaaaatgtgtgatctaatttatgacctgtattttcgttacaccctatctgaagcattatttggttaaaacatctcgtttctgttgatacaaaaaaatattaatttttctggactaaattacggttctgtttatgtcctagaagacttggtattcacgcaatgttgccaaactgaattttgttatatttgctttacattttctagccgatttccgagcgtactataactctatcgaccgattagtcgggactgtcagaaaaaggttttaaaatatttattacttttatgaataattattgttcatttgtttaaagtcatacatcaaagtttttatttttttatggtaaacatcgtgcatttttatatgtgattgatattaatcttgttatatatctgagacaaaaataaatgatgagatagaaatgc

SEQ ID NO: 296 - DNA, 2022 bp, Diabrotica virgifera
tatcgtttttacacccggtatacagtgacacttgcctttttagtaatggaattattacgttgatgttcttgaagaataaagctgtaatatactggaaaatcactcaaatcggacagcggatttaggaaatgcgaaacatcagaggatgtctcatttttgggatggtgcgttaattttgattgaatttggtgcgaatatttaagaattgataaaaaaacatatttgaatttgcttgatttagtcacacctataattatcaaacaaaatacacagctatatgacatgccaactagcaactacacagttttagtttgaatgtacaattttaactgaacagttttatctaatgaaatttcaattcatttgtcaattgaactgtacagtcttcagttttgcctacacacataagttttaactgaatagttcgattgtttagttgaaactgtgcagttcaaactaaaggtgtgaagcggcctttagcggaactgaattgaaaattatttcgcacattacagggtgtaacaaaaatgcaggtcataaatttgatcacatgttctgggacccaaagtggtttgattgagcctaacttgccttagtacaaatgtgcacataaggggagttgcggccctttgaagttgcaggaaaatcgattttttccaatatatcgaggactattggagatcttttgttgaaagtggacatgtggcattcttatggtagtagtatcttgtgaaagattatagtgaagtttggacaccccataaacattttgtgagggttttgttcttttataccccccccccaaaggcttttgtgtacgttccagtttaattgttgttgtggtaccattggctaaatacaatattttaaaaacttttttgcctcttagtactttttccaaaagtcagtttttatcgagatattttgaatatttgtcaaatccaccacatatttgtatatggctaagtacgattatggagacttggtaatattatgaaaatttatttatgatttacatttttaggtatattttgaaccatattaaaaaagaagtaatatcttgataaaaagtgccttctcgaaaaaatacaaaaaggcaaaaaagttataaaaacactgtgtttaactgatggtaccgcagtaaaagcttaattggaacatacacaaacatttggggggtttaaaggaacaaaacccccataaaatttttatgtaaacattaaaaaagaagccgcaactcgataaaagctgccttatcgaaaaagtactaagaggcaaaaaagttatagaaatattgaattgaactaatggtaccacaatagtaatttaattggagcgtacacgggagtttgggggtgtttaagggaacggaacccccataaaatttttgtggaatgcacaaatttcactgtggttcttttttaagatgttcctgccatagaatgccacatgtccgttttcagtggaaggtctccaatagttttcgatatattcgagggaatcgatttttattttgtaacttcggggggctgtaactttttttatgtgcatatttgtactaaggtaaattgggttcattcgaactatttttggtcttaaaatgtgtgatctaatttatgacctgtattttcgttacaccctatctgaagcattatttggttaaaacatctcgtttctgttgatacaaaaaaatattaatttttctggactaaattacggttctgtttatgtcctagaagacttggtattcacgcaatgttgccaaactgaattttgttatatttgctttacattttctagccgatttccgagcgtactataactctatcgaccgattagtcgggactgtcagaaaaaggttttaaaatatttattacttttatgaataattattgttcatttgtttaaagtcatacatcaaagtttttatttttttatggtaaacatcgtgcatttttatatgtgattgatattaatcttgttatatatctgagacaaaaataaatgatgagatagaaatgc

SEQ ID NO: 297 - DNA, 2022 bp, Diabrotica virgifera
tatcgtttttacacccggtatacagtgacacttgcctttttagtaatggaattattacgttgatgttcttgaagaataaagctgtaatatactggaaaatcactcaaatcggacagcggatttaggaaatgcgaaacatcagaggatgtctcatttttgggatggtgcgttaattttgattgaatttggtgcgaatatttaagaattgataaaaaaacatatttgaatttgcttgatttagtcacacctataattatcaaacaaaatacacagctatatgacatgccaactagcaactacacagttttagtttgaatgtacaattttaactgaacagttttatctaatgaaatttcaattcatttgtcaattgaactgtacagtcttcagttttgcctacacacataagttttaactgaatagttcgattgtttagttgaaactgtgcagttcaaactaaaggtgtgtagcggcctttagcggaactgaattgaaaattatttcgcacattacaggatgtaacaaaaatacaggtcataaatttgatcacatgttctgggacccaggagtagttcgattgaacctaacttgccttagtacaggtgtgcacatggaaggggttgcagccctttgaagttgcagaggaaaagtcgattttttccaatatatcgaaaactattggagatcttttgttgagagtggacatgtggcattcttatggtagtggtatcttgtgaaggggttatagtgaagtttggacaccccataaacattttatgagggttttgttcttttatacccccccaaacttttgtgtacgttccaatttaattattattgtagtaccattagctaaatacaatatattaaaaacttttttgcctcttagtactttttccaaaagtcagtttttatcgagatattttgaatatttgtcaaatccaccacatatttgtatatggctaagtacgattatggagacttggtaatattatgaaaatttatttatgatttacatttttaggtatattttgaaccatattaaaaaagaagtaatatcttgataaaaagtgccttctcgaaaaaatacaaaaaggcaaaaaagttataaaaacactgtgtttaactgatggtaccgcagtaaaagcttaattggaacatacacaaacatttggggggtttaaaggaacaaaacccccataaaatttttatgtaaacattaaaaaagaagccgcaactcgataaaagctgccttatcgaaaaagtactaagaggcaaaaaagttatagaaatattgaattgaactaatggtaccacaatagtaatttaattggagcgtacacgggagtttgggggtgtttaagggaacggaacccccataaaatttttgtggaatgcacaaatttcactgtggttcttttttaagatgttcctgccatagaatgccacatgtccgttttcagtggaaggtctccaatagttttcgatatattcgagggaatcgatttttattttgtaacttcggggggctgtaactttttttatgtgcatatttgtactaaggtaaattgggttcattcgaactatttttggtcttaaaatgtgtgatctaatttatgacctgtattttcgttacaccctatctgaagcattatttggttaaaacatctcgtttctgttgatacaaaaaaatattaatttttctggactaaattacggttctgtttatgtcctagaagacttggtattcacgcaatgttgccaaactgaattttgttatatttgctttacattttctagccgatttccgagcgtactataactctatcgaccgattagtcgggactgtcagaaaaaggttttaaaatatttattacttttatgaataattattgttcatttgtttaaagtcatacatcaaagtttttatttttttatggtaaacatcgtgcatttttatatgtgattgatattaatcttgttatatatctgagacaaaaataaatgatgagatagaaatgc

SEQ ID NO: 298 - DNA, 4064 bp, Diabrotica virgifera
catttgcggacatatgtttgtggagcaagggtcattgttttttcatgtagaattgccccgtaaatgttgtcgcatttatttggaaacaccctgtattgatgaagaagcattgctagttgttgaagtgcctaacttttttattatccacataggtgaattagtcaaaaagcgtaatgttaagaaagcctaaagccatggtttgttaggaacagtgagcgacgcacggcatacgggtacagcagaatctgttgtactcgacgcacggcagatttgagtaagtcggtttgttagcatattattctgtcttctgtcgatctcaaaatagtttgagtttgacgtttattctcacggagggtgtacgtagaaaaacaaattctgacacaatcaaggcaataattttattactcctagaaaaggaggaggaagaagagataataatattaaatttaaataaaagaaataaaaatgtaaactaaatgttttcatgtcgtaatacagaaggtgcatttatattaatagtcaaaagaaaattgtttcagaacgagaaaaaatttcgagaatattttagaatttccagatatttatttgaaaatgtattaccatttataagggataatattactaaaaaaccctacaacagaagacaacatccgatttctggagaagaaaaattaagcataactttgaattaggttttttttttatttagagaaaaaataaaaatatgtgtttaagtaaaaaacagaaaacttcttaaaaatgtaaagtatattataattgtatcttacatttctacattgttattaattgattctggcgaaaattcaaacaaatgagatcctacatttatttccaaagaatttcacaagaattatttgttgtaataggaaccaattcatgtacctaattcatttgcagccagctcaatttcatatcgccaaacaatatgcattacttcagcttttattcttgccttttcaatcgtaggaaatctcgatactgtggaagcaacactttaaaaaaacatgtggatcacctgatttttgagccaatgtcgattatgtttccgactttttaacaagtttttcaatcaaagcggttcgttcctctcgtcccatttttaattcgctcgttaatgagaaatttctgtttttgacatttactttttttttcggtgctcacaatatagtattataaaagtgtaaaaagagtaataaatcgtctaatacaatagtaatagaaattagatgttgggttcctgtgaggcacatggtgtctttgaaacgcactactgaaagggaaaggtttatagtgggtactttttgttaaatgcaagctgcttttctctttgaatatttccccaaataattgacctgaaaacaggtcaattgacagagaactacgtacatatttaaaaatacgcgaatagaataataaaaaatgagatattcaaagcatactttaaaatagggatcagggataatggcaagacaaaattgtgccatttgttgaataataacgatacactttattttgtacaaacgtagttttattataatgcatgcttcagtttaataaataatagaaataataccaattaatctaaatagcaattaaatactaataatatcaatttaatacaagtgactttttcatttactttgtgcaattaaaaatatgtcaaatcatgcaaacttatttttgtttgaataaaattagtttacatcaccacgttgtacactgtgagttcagctgaacgtttgcgtccaaatcaaatcgcagttgattccagcgcacaccgtcgacgtatgtacactgctgtcggtcttcagagcgcgcagctaagcagaacctaacaatccgttaacatacagaagccattcctttgatttggactgacgtgcgcggcgttcgactgactgtgagttgtgcgtcgctcactgttctaacaaaccgtggcttaaggctacagttgggttttaattttaatattttatgtgtgctggagttttccacagggtgttccaaactttgaggaggagacacgctatcatttttacgcccggtgtacaatgacacttgcctttttggtaatgaattattacattgatattcttgaagaatagagctgtagtatactgggaaaatcactcaaatcggacagcagatttgggaaatacgaggcatcggaaatgtctcatttttgaggtggtgcgttaattttgattgaatttggtgcgaatatttaagaattgataaaaaaacatatttgaatttgcttgatttagtcacacctataattatcaaacaaaatacacagctatatgacatgccaactagcaactacacagttttagtttgaatgtacaattttaactgaacagttttatctaatgaaatttcaattcatttgtcaattgaactgtacagtcttcagttttgcctacacacataagttttaactgaatagttcgattgtttagttgaaactgtgcagttcaaactaaaggtgtgaagcggcctttagcggaactgaattgaaaattatttcgcacattacagggtgtaacaaaaatgcaggtcataaatttgatcacatgttctgggacccaaagtggtttgattgagcctaacttgccttagtacaaatgtgcacataaggggagttgcggccctttgaagttgcaggaaaatcgattttttccaatatatcgaggactattggagatcttttgttgaaagtggacatgtggcattcttatggtagtagtatcttgtgaaagattatagtgaagtttgggcaccccatagacatttttgagggttttgttcttttatacccccccaaacttttgtgtacgttccaatttaattgttgttgtggtaccattagctaaatacaatattttaaaagcttttttgcctcttagtactttttccaaacgtcagtttttatcgagatattttgaatatttgtcaaatccaccacatatttgtatatggctaagtacgattatggagacttggtaataatatgaaaatttatttatgatttacatttttaggtatatttgaaccatattaaagaagaagtaatatctcgataaaaagtgccttctcgagaaaatacaaagaggcaaaaaagttttaaaaacactgtatttaactaatggtaccgcagtaaaagtttaattggaacgtacacaaacatttggggggtttaaaggaacaaaacccccataaaatgtttatgtaaacatattaaaaaagaagccgcaactcgataaaactgccttatcgaaaaaatactaagaggcaaaaaagttatagaaatattgaattgaactaatggtaccacaataataatttaattggagcgtgcacaggggtttgggggtgtttaagggaacaaaatccccataaaatttttgtggaatgcacaaatttcactgtaattcttttttaagatgttcctgccatgggagtgccacatgtccattttcaatgggggatctccaatagttttcgatatattcgagggaatcgatttttattttgtaacttcggggggctgtaactttttttatgtgcatatttgtactaaggtaaattgggttcattcgaactatttttggtcttaaaatgtgtgatctaatttatgacctgtattttcgttacaccctatctgaagcattatttggttaaaacatctcgtttctgttgatacaaaaaaatattaatttttctggactaaattacggttctgtttatgtcctagaagacttggtattcacgcaatgttgccaaactgaattttgttatatttgctttacattttctagccgatttccgagcgtactataactctatcgaccgattagtcgggactgtcagaaaaaggttttaaaatatttattacttttatgaataattattgttcatttgtttaaagtcatacatcaaagtttttatttttttatggtaaacatcgtgcatttttatatgtgattgatattaatcttgttatatatctgagacaaaaataaatgatgagatagaaatgc

SEQ ID NO: 299 - DNA, 1822 bp, Diabrotica virgifera
cgccaatgtgaatataaaattcttaattgtatgcaaatttcatttgcgtgtctcggccggtttggagcaatgaatgaatcgtcagtttgtgggagggaattcgggatcccgtatctcggaagcagggcatttgcggacatgtgtttgtaggagcaaagggtcattattttttcatgtagaattgccccgtaaatgttgtcgcacttatttggaaacaccctgtattgatgaaaaacattgctagttgttgagtgcctaacttttttattatccaacataagcgaattagtcaaaaggcataatgttggggaagcctagggctgcagttgggttttaattttaatattttatatatgctggagttttccacagggtgttccaaactttgaggaggggacacgctatcatttttgcacccggtatacaatgacacttgcctttttggtaataatattgttgcgttgatattcttgaagaatagagctgtaatatactagaaaatcactcaaatcggacaacagatttaggaaatacgaaacatcagaaatgtctcatttttgggatggtgcgttaattttgattgaatttggtgcgaatatttaagaattgataaaaaaacatatttgaatttgcttgatttagtcacacctataattatcaaacaaaatacacagctatatgacatgccaactagcaactacacagttttagtttgaatgtacaattttaactgaacagttttatctaatgaaatttcaattcatttgtcaattgaactgtacagtcttcagttttgcctacacacataagttttaactgaatagttcgattgtttagttgaaactgtgcagttcaaactaaaggtgtgaagcggcctttagcggaactgaattgaaaattatttcgcacattacagggtgtaacaaaaatgcaggtcataaatttgatcacatgttctgggacccaaagtggtttgattgagcctaacttgccttagtacaaatgtgcacataaggggagttgcggccctttgaagttgcaggaaaatcgattttttccaatatatcgaggactattggagatcttttgttgaaagtggacatgtggcattcttatggtagtagtatcttgtgaaagattatagtgaagtttggacaccccataaacattttgtgagggttttgttcttttataccccccccccaaaggcttttgtgtacgttccagtttaattgttgttgtggtaccattggctaaatacaatattttaaaaacttttttgcctcttagtactttttccaaaagtcagtttttatcgagatattttgaatatttgtcaaatccaccacatatttgtatatggctaagtacgattatggagacttggtaatattatgaaaatttatttatgatttacatttttaggtatattttgaaccatattaaaaaagaagccacatctcgataaaagtgcttatcgaaaaaatacaaagaggcaaaaaagttttaaaaacactgtgtttaactaatggtaccgcagtaatagtttaattggaacatacaacatttggggggtttaaaggaacaaaacccccataaatttttacgtggacatgttaaaaaagaagtcgcaactcgataaaaactgccttatctgaaaaatactaagaaacaaaaatattgaatttaactaatggtaccacaataataaaattgaattggaacgtacacaaaagtttgggaggatttaagggatcaaaacccccataaaatttttatggggtgcacaaatttcaccatagtttttctttaagatattcct

SEQ ID NO: 300 - DNA, 1822 bp, Diabrotica virgifera
cgccaatgtgaatataaaattcttaattgtatgcaaatttcatttgcgtgtctcggccggtttggagcaatgaatgaatcgtcagtttgtgggagggaattcgggatcccgtatctcggaagcagggcatttgcggacatgtgtttgtaggagcaaagggtcattattttttcatgtagaattgccccgtaaatgttgtcgcacttatttggaaacaccctgtattgatgaaaaacattgctagttgttgagtgcctaacttttttattatccaacataagcgaattagtcaaaaggcataatgttggggaagcctagggctgcagttgggttttaattttaatattttatatatgctggagttttccacagggtgttccaaactttgaggaggggacacgctatcatttttgcacccggtatacaatgacacttgcctttttggtaataatattgttgcgttgatattcttgaagaatagagctgtaatatactagaaaatcactcaaatcggacaacagatttaggaaatacgaaacatcagaaatgtctcatttttgggatggtgcgttaattttgattgaatttggtgcgaatatttaagaattgataaaaaaacatatttgaatttgcttgatttagtcacacctataattatcaaacaaaatacacagctatatgacatgccaactagcaactacacagttttagtttgaatgtacaattttaactgaacagttttatctaatgaaatttcaattcatttgtcaattgaactgtacagtcttcagttttgcctacacacataagttttaactgaatagttcgattgtttagttgaaactgtgcagttcaaactaaaggtgtgtagcggcctttagcggaactgaattgaaaattatttcgcacattacaggatgtaacaaaaatacaggtcataaatttgatcacatgttctgggacccaggagtagttcgattgaacctaacttgccttagtacaggtgtgcacatggaaggggttgcagccctttgaagttgcagaggaaaagtcgattttttccaatatatcgaaaactattggagatcttttgttgagagtggacatgtggcattcttatggtagtggtatcttgtgaaggggttatagtgaagtttggacaccccataaacattttatgagggttttgttcttttatacccccccaaacttttgtgtacgttccaatttaattattattgtagtaccattagctaaatacaatatattaaaaacttttttgcctcttagtactttttccaaaagtcagtttttatcgagatattttgaatatttgtcaaatccaccacatatttgtatatggctaagtacgattatggagacttggtaatattatgaaaatttatttatgatttacatttttaggtatattttgaaccatattaaaaaagaagccacatctcgataaaagtgcttatcgaaaaaatacaaagaggcaaaaaagttttaaaaacactgtgtttaactaatggtaccgcagtaatagtttaattggaacatacaacatttggggggtttaaaggaacaaaacccccataaatttttacgtggacatgttaaaaaagaagtcgcaactcgataaaaactgccttatctgaaaaatactaagaaacaaaaatattgaatttaactaatggtaccacaataataaaattgaattggaacgtacacaaaagtttgggaggatttaagggatcaaaacccccataaaatttttatggggtgcacaaatttcaccatagtttttctttaagatattcct

SEQ ID NO: 301 - DNA, 1635 bp, Diabrotica virgifera
cgccaatgtgaatataaaattcttaattgtatgcaaatttcatttgcgtgtctcggccggtttggagcaatgaatgaatcgtcagtttgtgggagggaattcgggatcccgtatctcggaagcagggcatttgcggacatgtgtttgtaggagcaaagggtcattattttttcatgtagaattgccccgtaaatgttgtcgcacttatttggaaacaccctgtattgatgaaaaacattgctagttgttgagtgcctaacttttttattatccaacataagcgaattagtcaaaaggcataatgttggggaagcctagggctgcagttgggttttaattttaatattttatatatgctggagttttccacagggtgttccaaactttgaggaggggacacgctatcatttttgcacccggtatacaatgacacttgcctttttggtaataatattgttgcgttgatattcttgaagaatagagctgtaatatactagaaaatcactcaaatcggacaacagatttaggaaatacgaaacatcagaaatgtctcatttttgggatggtgcgttaattttgattgaatttggtgcgaatatttaagaattgataaaaaaacatatttgaatttgcttgatttagtcacacctataattatcaaacaaaatacacagctatatgacatgccaactagcaactacacagttttagtttgaatgtacaattttaactgaacagttttatctaatgaaatttcaattcatttgtcaattgaactgtacagtcttcagttttgcctacacacataagttttaactgaatagttcgattgtttagttgaaactgtgcagttcaaactaaaggtgtgaagcggcctttagcggaactgaattgaaaattatttcgcacattacagggtgtaacaaaaatgcaggtcataaatttgatcacatgttctgggacccaaagtggtttgattgagcctaacttgccttagtacaaatgtgcacataaggggagttgcggccctttgaagttgcaggaaaatcgattttttccaatatatcgaggactattggagatcttttgttgaaagtggacatgtggcattcttatggtagtagtatcttgtgaaagattatagtgaagtttggacaccccataaacattttgtgagggttttgttcttttataccccccccccaaaggcttttgtgtacgttccagtttaattgttgttgtggtaccattggctaaatacaatattttaaaaacttttttgcctcttagtactttttccaaaagtcagtttttatcgagatattttgaatatttgtcaaatccaccacatatttgtatatggctaagtacgattatggagacttggtaatattatgaaaatttatttatgatttacatttttaggtatattttgaaccatattaaaaaagaagccacatctcgataaaagtgcttatcgaaaaaatacaaagaggcaaaaaagttttaaaaacactgtgtttaactaatggtaccgcagtaatagtttaattggaacgtacacaaacatttggggggtttaaaggaacaaaaccccataaaatttttatgtaaacatattaaaaaagaagccgc

SEQ ID NO: 302 - DNA, 1635 bp, Diabrotica virgifera
cgccaatgtgaatataaaattcttaattgtatgcaaatttcatttgcgtgtctcggccggtttggagcaatgaatgaatcgtcagtttgtgggagggaattcgggatcccgtatctcggaagcagggcatttgcggacatgtgtttgtaggagcaaagggtcattattttttcatgtagaattgccccgtaaatgttgtcgcacttatttggaaacaccctgtattgatgaaaaacattgctagttgttgagtgcctaacttttttattatccaacataagcgaattagtcaaaaggcataatgttggggaagcctagggctgcagttgggttttaattttaatattttatatatgctggagttttccacagggtgttccaaactttgaggaggggacacgctatcatttttgcacccggtatacaatgacacttgcctttttggtaataatattgttgcgttgatattcttgaagaatagagctgtaatatactagaaaatcactcaaatcggacaacagatttaggaaatacgaaacatcagaaatgtctcatttttgggatggtgcgttaattttgattgaatttggtgcgaatatttaagaattgataaaaaaacatatttgaatttgcttgatttagtcacacctataattatcaaacaaaatacacagctatatgacatgccaactagcaactacacagttttagtttgaatgtacaattttaactgaacagttttatctaatgaaatttcaattcatttgtcaattgaactgtacagtcttcagttttgcctacacacataagttttaactgaatagttcgattgtttagttgaaactgtgcagttcaaactaaaggtgtgtagcggcctttagcggaactgaattgaaaattatttcgcacattacaggatgtaacaaaaatacaggtcataaatttgatcacatgttctgggacccaggagtagttcgattgaacctaacttgccttagtacaggtgtgcacatggaaggggttgcagccctttgaagttgcagaggaaaagtcgattttttccaatatatcgaaaactattggagatcttttgttgagagtggacatgtggcattcttatggtagtggtatcttgtgaaggggttatagtgaagtttggacaccccataaacattttatgagggttttgttcttttatacccccccaaacttttgtgtacgttccaatttaattattattgtagtaccattagctaaatacaatatattaaaaacttttttgcctcttagtactttttccaaaagtcagtttttatcgagatattttgaatatttgtcaaatccaccacatatttgtatatggctaagtacgattatggagacttggtaatattatgaaaatttatttatgatttacatttttaggtatattttgaaccatattaaaaaagaagccacatctcgataaaagtgcttatcgaaaaaatacaaagaggcaaaaaagttttaaaaacactgtgtttaactaatggtaccgcagtaatagtttaattggaacgtacacaaacatttggggggtttaaaggaacaaaaccccataaaatttttatgtaaacatattaaaaaagaagccgc

SEQ ID NO: 303 - DNA, 1583 bp, Diabrotica virgifera
tatcgtttttacacccggtatacagtgacacttgcctttttagtaatggaattattacgttgatgttcttgaagaataaagctgtaatatactggaaaatcactcaaatcggacagcggatttaggaaatgcgaaacatcagaggatgtctcatttttgggatggtgcgttaattttgattgaatttggtgcgaatatttaagaattgataaaaaaacatatttgaatttgcttgatttagtcacacctataattatcaaacaaaatacacagctatatgacatgccaactagcaactacacagttttagtttgaatgtacaattttaactgaacagttttatctaatgaaatttcaattcatttgtcaattgaactgtacagtcttcagttttgcctacacacataagttttaactgaatagttcgattgtttagttgaaactgtgcagttcaaactaaaggtgtgaagcggcctttagcggaactgaattgaaaattatttcgcacattacagggtgtaacaaaaatgcaggtcataaatttgatcacatgttctgggacccaaagtggtttgattgagcctaacttgccttagtacaaatgtgcacataaggggagttgcggccctttgaagttgcaggaaaatcgattttttccaatatatcgaggactattggagatcttttgttgaaagtggacatgtggcattcttatggtagtagtatcttgtgaaagattatagtgaagtttgggcaccccatagacatttttgagggttttgttcttttatacccccccaaacttttgtgtacgttccaatttaattgttgttgtggtaccattagctaaatacaatattttaaaagcttttttgcctcttagtactttttccaaacgtcagtttttatcgagatattttgaatatttgtcaaatccaccacatatttgtatatggctaagtacgattatggagacttggtaataatatgaaaatttatttatgatttacatttttaggtatatttgaaccatattaaagaagaagtaatatctcgataaaaagtgccttctcgagaaaatacaaagaggcaaaaaagttttaaaaacactgtatttaactaatggtaccgcagtaaaagtttaattggaacgtacacaaacatttggggggtttaaaggaacaaaacccccataaaatgtttatgtaaacatattaaaaaagaagccgcaactcgataaaactgccttatcgaaaaaatactaagaggcaaaaaagttatagaaatattgaattgaactaatggtaccacaataataatttaattggagcgtacacaggggtttgggggtgtttaagggaacagaatccccataaaatttttgtggaatgcacaaatttcactgtaattcttttttaagatgttcctgccatgggagtgccacatgtccgttttcagtggaaggtctccaatagttttcgatatattcgaaaaatcgattttttattttgtaacttcggggggctgtaactttttttatgtgcatatttgtactggtgagttaggttcattcgaactgtttt

SEQ ID NO: 304 - DNA, 1629 bp, Diabrotica virgifera
cgccaatgtgaatataaaattcttaattgtatgcaaatttcatttgcgtgtctcggccggtttggagcaatgaatgaatcgtcagtttgtgggagggaattcgggatcccgtatctcggaagcagggcatttgcggacatgtgtttgtaggagcaaagggtcattattttttcatgtagaattgccccgtaaatgttgtcgcacttatttggaaacaccctgtattgatgaaaaacattgctagttgttgagtgcctaacttttttattatccaacataagcgaattagtcaaaaggcataatgttggggaagcctagggctgcagttgggttttaattttaatattttatatatgctggagttttccacagggtgttccaaactttgaggaggggacacgctatcatttttgcacccggtatacaatgacacttgcctttttggtaataatattgttgcgttgatattcttgaagaatagagctgtaatatactagaaaatcactcaaatcggacaacagatttaggaaatacgaaacatcagaaatgtctcatttttgggatggtgcgttaattttgattgaatttggtgcgaatatttaagaattgataaaaaaacatatttgaatttgcttgatttagtcacacctataattatcaaacaaaatacacagctatatgacatgccaactagcaactacacagttttagtttgaatgtacaattttaactgaacagttttatctaatgaaatttcaattcatttgtcaattgaactgtacagtcttcagttttgcctacacacataagttttaactgaatagttcgattgtttagttgaaactgtgcagttcaaactaaaggtgtgaagcggcctttagcggaactgaattgaaaattatttcgcacattacagggtgtaacaaaaatgcaggtcataaatttgatcacatgttctgggacccaaagtggtttgattgagcctaacttgccttagtacaaatgtgcacataaggggagttgcggccctttgaagttgcaggaaaatcgattttttccaatatatcgaggactattggagatcttttgttgaaagtggacatgtggcattcttatggtagtagtatcttgtgaaagattatagtgaagtttgggcaccccatagacatttttgagggttttgttcttttatacccccccaaacttttgtgtacgttccaatttaattgttgttgtggtaccattagctaaatacaatattttaaaagcttttttgcctcttagtactttttccaaacgtcagtttttatcgagatattttgaatatttgtcaaatccaccacatatttgtatatggctaagtacgattatggagacttggtaataatatgaaaatttatttatgatttacatttttaggtatattttgaaccatattataaaagaagtaatatcttgataaaaagtgccttctcgaaaaaatacaaaaaggcaaaaaagttataaaacactgtgtttaactgatggtaccgcagtaaaagcttaattggagcgtacacagacatttggggggtttaagggaacaaaacccccataaaaattttatgtaaacatattaaaaaagaagcc

SEQ ID NO: 305 - DNA, 1490 bp, Diabrotica virgifera
atttgatcacatgttctgggacccaaagtagtttgattgaacctaacttaccttatgtgtgcacataagtacaaatgtgcacataaagaaggttacagccctttgaagttgcaggaaaatcgattttttccaatatatcgaagactattggagatcttttgttgaaagtggacatgtggcattcttatggtagtagtatcttgtgaaagattatagtgaagtttgggcaccccatagacatttttgagggttttgttcttttatacccccccaaacttttgtgtacgttccaatttaattgttgttgtggtaccattagctaaatacaatattttaaaagcttttttgcctcttagtactttttccaaacgtcagtttttatcgagatattttgaatatttgtcaaatccaccacatatttgtatatggctaagtacgattatggagacttggtaataatatgaaaatttatttatgatttacatttttaggtatatttgaaccatattaaagaagaagtaatatctcgataaaaagtgccttctcgagaaaatacaaagaggcaaaaaagttttaaaaacactgtatttaactaatggtaccgcagtaaaagtttaattggaacgtacacaaacatttggggggtttaaaggaacaaaacccccataaaatgtttatgtaaacatattaaaaaagaagccgcaactcgataaaactgccttatcgaaaaaatactaagaggcaaaaaagttatagaaatattgaattgaactaatggtaccacaataataatttaattggagcgtgcacaggggtttgggggtgtttaagggaacaaaatccccataaaatttttgtggaatgcacaaatttcactgtaattcttttttaagatgttcctgccatgggagtgccacatgtccattttcaatgggggatctccaatagttttcgatatattcgagggaatcgatttttattttgtaacttcggggggctgtaactttttttatgtgcatatttgtactaaggtaaattgggttcattcgaactatttttggtcttaaaatgtgtgatctaatttatgacctgtattttcgttacaccctatctgaagcattatttggttaaaacatctcgtttctgttgatacaaaaaaatattaatttttctggactaaattacggttctgtttatgtcctagaagacttggtattcacgcaatgttgccaaactgaattttgttatatttgctttacattttctagccgatttccgagcgtactataactctatcgaccgattagtcgggactgtcagaaaaaggttttaaaatatttattacttttatgaataattattgttcatttgtttaaagtcatacatcaaagtttttatttttttatggtaaacatcgtgcatttttatatgtgattgatattaatcttgttatatatctgagacaaaaataaatgatgagatagaaatgc

SEQ ID NO: 306 - DNA, 1465 bp, Diabrotica virgifera
ttctgggatcaaaaatggttcgattgaacctaacttgccttggtgcaagtgtgcacatggggggagttgcagccctttgaagttgcaaagcgaaatcgattttttccaatatatcgagaatattaaagatgttttattgaaggtggacatgtgatattcttttggtagtagtatcttgggaaggaattatagtgaagtttgggcaccccataggggttttatgggggttttgttctttaaacccccccaaacttttgtgtacgttccaatttaattattgttgttgtaccattagttaaacacaatgttttgaaacttttttgcctctcagtactttttcgaaaagttagtttttatcgagatattttgaatatttgtcaaatccaccacatatttgtatatggctaagtacgattatggagacttggtaataatatgaaaatttatttatgatttacatttttaggtatatttgaaccatattaaagaagaagtaatatctcgataaaaagtgccttctcgagaaaatacaaagaggcaaaaaagttttaaaaacactgtatttaactaatggtaccgcagtaaaagtttaattggaacgtacacaaacatttggggggtttaaaggaacaaaacccccataaaatgtttatgtaaacatattaaaaaagaagccgcaactcgataaaactgccttatcgaaaaaatactaagaggcaaaaaagttatagaaatattgaattgaactaatggtaccacaataataatttaattggagcgtgcacaggggtttgggggtgtttaagggaacaaaatccccataaaatttttgtggaatgcacaaatttcactgtaattcttttttaagatgttcctgccatgggagtgccacatgtccattttcaatgggggatctccaatagttttcgatatattcgagggaatcgatttttattttgtaacttcggggggctgtaactttttttatgtgcatatttgtactaaggtaaattgggttcattcgaactatttttggtcttaaaatgtgtgatctaatttatgacctgtattttcgttacaccctatctgaagcattatttggttaaaacatctcgtttctgttgatacaaaaaaatattaatttttctggactaaattacggttctgtttatgtcctagaagacttggtattcacgcaatgttgccaaactgaattttgttatatttgctttacattttctagccgatttccgagcgtactataactctatcgaccgattagtcgggactgtcagaaaaaggttttaaaatatttattacttttatgaataattattgttcatttgtttaaagtcatacatcaaagtttttatttttttatggtaaacatcgtgcatttttatatgtgattgatattaatcttgttatatatctgagacaaaaataaatgatgagatagaaatgc

SEQ ID NO: 307 - DNA, 1465 bp, Diabrotica virgifera
ttctgggatcaaaaatggttcgattgaacctaacttgccttggtgcaagtgtgcacatggggggagttgcagccctttgaagttgcaaagcgaaatcgattttttccaatatatcgagaatattaaagatgttttattgaaggtggacatgtgatattcttttggtagtagtatcttgggaaggaattatagtgaagtttgggcaccccataggggttttatgggggttttgttctttaaacccccccaaacttttgtgtacgttccaatttaattattgttgttgtaccattggttgaacacaatattttaaaacttttttgcctctcagtactttttcgaaaagttagtttttatcgagatattttgaatatttgtcaaatccaccacatatttgtatatggctaagtacgattatggagacttggtaataatatgaaaatttatttatgatttacatttttaggtatatttgaaccatattaaagaagaagtaatatctcgataaaaagtgccttctcgagaaaatacaaagaggcaaaaaagttttaaaaacactgtatttaactaatggtaccgcagtaaaagtttaattggaacgtacacaaacatttggggggtttaaaggaacaaaacccccataaaatgtttatgtaaacatattaaaaaagaagccgcaactcgataaaactgccttatcgaaaaaatactaagaggcaaaaaagttatagaaatattgaattgaactaatggtaccacaataataatttaattggagcgtgcacaggggtttgggggtgtttaagggaacaaaatccccataaaatttttgtggaatgcacaaatttcactgtaattcttttttaagatgttcctgccatgggagtgccacatgtccattttcaatgggggatctccaatagttttcgatatattcgagggaatcgatttttattttgtaacttcggggggctgtaactttttttatgtgcatatttgtactaaggtaaattgggttcattcgaactatttttggtcttaaaatgtgtgatctaatttatgacctgtattttcgttacaccctatctgaagcattatttggttaaaacatctcgtttctgttgatacaaaaaaatattaatttttctggactaaattacggttctgtttatgtcctagaagacttggtattcacgcaatgttgccaaactgaattttgttatatttgctttacattttctagccgatttccgagcgtactataactctatcgaccgattagtcgggactgtcagaaaaaggttttaaaatatttattacttttatgaataattattgttcatttgtttaaagtcatacatcaaagtttttatttttttatggtaaacatcgtgcatttttatatgtgattgatattaatcttgttatatatctgagacaaaaataaatgatgagatagaaatgc

SEQ ID NO: 308 - DNA, 1495 bp, Diabrotica virgifera
atttgatcacatgttctgggacccaaagtagtttgattgaacctaacttaccttatgtgtgcacataagtacaaatgtgcacataaagaaggttacagccctttgaagttgcaggaaaatcgattttttccaatatatcgaagactattggagatcttttgttgaaagtggacatgtggcattcttatggtagtagtatcttgtgaaagattatagtgaagtttggacaccccataaacattttgtgagggttttgttcttttataccccccccccaaaggcttttgtgtacgttccagtttaattgttgttgtggtaccattggctaaatacaatattttaaaaacttttttgcctcttagtactttttccaaaagtcagtttttatcgagatattttgaatatttgtcaaatccaccacatatttgtatatggctaagtacgattatggagacttggtaatattatgaaaatttatttatgatttacatttttaggtatattttgaaccatattaaaaaagaagtaatatcttgataaaaagtgccttctcgaaaaaatacaaaaaggcaaaaaagttataaaaacactgtgtttaactgatggtaccgcagtaaaagcttaattggaacatacacaaacatttggggggtttaaaggaacaaaacccccataaaatttttatgtaaacattaaaaaagaagccgcaactcgataaaagctgccttatcgaaaaagtactaagaggcaaaaaagttatagaaatattgaattgaactaatggtaccacaatagtaatttaattggagcgtacacgggagtttgggggtgtttaagggaacggaacccccataaaatttttgtggaatgcacaaatttcactgtggttcttttttaagatgttcctgccatagaatgccacatgtccgttttcagtggaaggtctccaatagttttcgatatattcgagggaatcgatttttattttgtaacttcggggggctgtaactttttttatgtgcatatttgtactaaggtaaattgggttcattcgaactatttttggtcttaaaatgtgtgatctaatttatgacctgtattttcgttacaccctatctgaagcattatttggttaaaacatctcgtttctgttgatacaaaaaaatattaatttttctggactaaattacggttctgtttatgtcctagaagacttggtattcacgcaatgttgccaaactgaattttgttatatttgctttacattttctagccgatttccgagcgtactataactctatcgaccgattagtcgggactgtcagaaaaaggttttaaaatatttattacttttatgaataattattgttcatttgtttaaagtcatacatcaaagtttttatttttttatggtaaacatcgtgcatttttatatgtgattgatattaatcttgttatatatctgagacaaaaataaatgatgagatagaaatgc

SEQ ID NO: 309 - DNA, 4069 bp, Diabrotica virgifera
catttgcggacatatgtttgtggagcaagggtcattgttttttcatgtagaattgccccgtaaatgttgtcgcatttatttggaaacaccctgtattgatgaagaagcattgctagttgttgaagtgcctaacttttttattatccacataggtgaattagtcaaaaagcgtaatgttaagaaagcctaaagccatggtttgttaggaacagtgagcgacgcacggcatacgggtacagcagaatctgttgtactcgacgcacggcagatttgagtaagtcggtttgttagcatattattctgtcttctgtcgatctcaaaatagtttgagtttgacgtttattctcacggagggtgtacgtagaaaaacaaattctgacacaatcaaggcaataattttattactcctagaaaaggaggaggaagaagagataataatattaaatttaaataaaagaaataaaaatgtaaactaaatgttttcatgtcgtaatacagaaggtgcatttatattaatagtcaaaagaaaattgtttcagaacgagaaaaaatttcgagaatattttagaatttccagatatttatttgaaaatgtattaccatttataagggataatattactaaaaaaccctacaacagaagacaacatccgatttctggagaagaaaaattaagcataactttgaattaggttttttttttatttagagaaaaaataaaaatatgtgtttaagtaaaaaacagaaaacttcttaaaaatgtaaagtatattataattgtatcttacatttctacattgttattaattgattctggcgaaaattcaaacaaatgagatcctacatttatttccaaagaatttcacaagaattatttgttgtaataggaaccaattcatgtacctaattcatttgcagccagctcaatttcatatcgccaaacaatatgcattacttcagcttttattcttgccttttcaatcgtaggaaatctcgatactgtggaagcaacactttaaaaaaacatgtggatcacctgatttttgagccaatgtcgattatgtttccgactttttaacaagtttttcaatcaaagcggttcgttcctctcgtcccatttttaattcgctcgttaatgagaaatttctgtttttgacatttactttttttttcggtgctcacaatatagtattataaaagtgtaaaaagagtaataaatcgtctaatacaatagtaatagaaattagatgttgggttcctgtgaggcacatggtgtctttgaaacgcactactgaaagggaaaggtttatagtgggtactttttgttaaatgcaagctgcttttctctttgaatatttccccaaataattgacctgaaaacaggtcaattgacagagaactacgtacatatttaaaaatacgcgaatagaataataaaaaatgagatattcaaagcatactttaaaatagggatcagggataatggcaagacaaaattgtgccatttgttgaataataacgatacactttattttgtacaaacgtagttttattataatgcatgcttcagtttaataaataatagaaataataccaattaatctaaatagcaattaaatactaataatatcaatttaatacaagtgactttttcatttactttgtgcaattaaaaatatgtcaaatcatgcaaacttatttttgtttgaataaaattagtttacatcaccacgttgtacactgtgagttcagctgaacgtttgcgtccaaatcaaatcgcagttgattccagcgcacaccgtcgacgtatgtacactgctgtcggtcttcagagcgcgcagctaagcagaacctaacaatccgttaacatacagaagccattcctttgatttggactgacgtgcgcggcgttcgactgactgtgagttgtgcgtcgctcactgttctaacaaaccgtggcttaaggctacagttgggttttaattttaatattttatgtgtgctggagttttccacagggtgttccaaactttgaggaggagacacgctatcatttttacgcccggtgtacaatgacacttgcctttttggtaatgaattattacattgatattcttgaagaatagagctgtagtatactgggaaaatcactcaaatcggacagcagatttgggaaatacgaggcatcggaaatgtctcatttttgaggtggtgcgttaattttgattgaatttggtgcgaatatttaagaattgataaaaaaacatatttgaatttgcttgatttagtcacacctataattatcaaacaaaatacacagctatatgacatgccaactagcaactacacagttttagtttgaatgtacaattttaactgaacagttttatctaatgaaatttcaattcatttgtcaattgaactgtacagtcttcagttttgcctacacacataagttttaactgaatagttcgattgtttagttgaaactgtgcagttcaaactaaaggtgtgaagcggcctttagcggaactgaattgaaaattatttcgcacattacagggtgtaacaaaaatgcaggtcataaatttgatcacatgttctgggacccaaagtggtttgattgagcctaacttgccttagtacaaatgtgcacataaggggagttgcggccctttgaagttgcaggaaaatcgattttttccaatatatcgaggactattggagatcttttgttgaaagtggacatgtggcattcttatggtagtagtatcttgtgaaagattatagtgaagtttggacaccccataaacattttgtgagggttttgttcttttataccccccccccaaaggcttttgtgtacgttccagtttaattgttgttgtggtaccattggctaaatacaatattttaaaaacttttttgcctcttagtactttttccaaaagtcagtttttatcgagatattttgaatatttgtcaaatccaccacatatttgtatatggctaagtacgattatggagacttggtaatattatgaaaatttatttatgatttacatttttaggtatattttgaaccatattaaaaaagaagtaatatcttgataaaaagtgccttctcgaaaaaatacaaaaaggcaaaaaagttataaaaacactgtgtttaactgatggtaccgcagtaaaagcttaattggaacatacacaaacatttggggggtttaaaggaacaaaacccccataaaatttttatgtaaacattaaaaaagaagccgcaactcgataaaagctgccttatcgaaaaagtactaagaggcaaaaaagttatagaaatattgaattgaactaatggtaccacaatagtaatttaattggagcgtacacgggagtttgggggtgtttaagggaacggaacccccataaaatttttgtggaatgcacaaatttcactgtggttcttttttaagatgttcctgccatagaatgccacatgtccgttttcagtggaaggtctccaatagttttcgatatattcgagggaatcgatttttattttgtaacttcggggggctgtaactttttttatgtgcatatttgtactaaggtaaattgggttcattcgaactatttttggtcttaaaatgtgtgatctaatttatgacctgtattttcgttacaccctatctgaagcattatttggttaaaacatctcgtttctgttgatacaaaaaaatattaatttttctggactaaattacggttctgtttatgtcctagaagacttggtattcacgcaatgttgccaaactgaattttgttatatttgctttacattttctagccgatttccgagcgtactataactctatcgaccgattagtcgggactgtcagaaaaaggttttaaaatatttattacttttatgaataattattgttcatttgtttaaagtcatacatcaaagtttttatttttttatggtaaacatcgtgcatttttatatgtgattgatattaatcttgttatatatctgagacaaaaataaatgatgagatagaaatgc

SEQ ID NO: 310 - DNA, 1421 bp, Diabrotica virgifera
tatcgtttttacacccggtatacagtgacacttgcctttttagtaatggaattattacgttgatgttcttgaagaataaagctgtaatatactggaaaatcactcaaatcggacagcggatttaggaaatgcgaaacatcagaggatgtctcatttttgggatggtgcgttaattttgattgaatttggtgcgaatatttaagaattgataaaaaaacatatttgaatttgcttgatttagtcacacctataattatcaaacaaaatacacagctatatgacatgccaactagcaactacacagttttagtttgaatgtacaattttaactgaacagttttatctaatgaaatttcaattcatttgtcaattgaactgtacagtcttcagttttgcctacacacataagttttaactgaatagttcgattgtttagttgaaactgtgcagttcaaactaaaggtgtgaagcggcctttagcggaactgaattgaaaattatttcgcacattacagggtgtaacaaaaatgcaggtcataaatttgatcacatgttctgggacccaaagtggtttgattgagcctaacttgccttagtacaaatgtgcacataaggggagttgcggccctttgaagttgcaggaaaatcgattttttccaatatatcgaggactattggagatcttttgttgaaagtggacatgtggcattcttatggtagtagtatcttgtgaaagattatagtgaagtttggacaccccataaacattttgtgagggttttgttcttttataccccccccccaaaggcttttgtgtacgttccagtttaattgttgttgtggtaccattggctaaatacaatattttaaaaacttttttgcctcttagtactttttccaaaagtcagtttttatcgagatattttgaatatttgtcaaatccaccacatatttgtatatggctaagtacgattatggagacttggtaatattatgaaaatttatttatgatttacatttttaggtatattttgaaccatattaaaaaagaagccacatctcgataaaagtgcttatcgaaaaaatacaaagaggcaaaaaagttttaaaaacactgtgtttaactaatggtaccgcagtaatagtttaattggaacatacaacatttggggggtttaaaggaacaaaacccccataaatttttacgtggacatgttaaaaaagaagtcgcaactcgataaaaactgccttatctgaaaaatactaagaaacaaaaatattgaatttaactaatggtaccacaataataaaattgaattggaacgtacacaaaagtttgggaggatttaagggatcaaaacccccataaaatttttatggggtgcacaaatttcaccatagtttttctttaagatattcct

SEQ ID NO: 311 - DNA, 1421 bp, Diabrotica virgifera
tatcgtttttacacccggtatacagtgacacttgcctttttagtaatggaattattacgttgatgttcttgaagaataaagctgtaatatactggaaaatcactcaaatcggacagcggatttaggaaatgcgaaacatcagaggatgtctcatttttgggatggtgcgttaattttgattgaatttggtgcgaatatttaagaattgataaaaaaacatatttgaatttgcttgatttagtcacacctataattatcaaacaaaatacacagctatatgacatgccaactagcaactacacagttttagtttgaatgtacaattttaactgaacagttttatctaatgaaatttcaattcatttgtcaattgaactgtacagtcttcagttttgcctacacacataagttttaactgaatagttcgattgtttagttgaaactgtgcagttcaaactaaaggtgtgtagcggcctttagcggaactgaattgaaaattatttcgcacattacaggatgtaacaaaaatacaggtcataaatttgatcacatgttctgggacccaggagtagttcgattgaacctaacttgccttagtacaggtgtgcacatggaaggggttgcagccctttgaagttgcagaggaaaagtcgattttttccaatatatcgaaaactattggagatcttttgttgagagtggacatgtggcattcttatggtagtggtatcttgtgaaggggttatagtgaagtttggacaccccataaacattttatgagggttttgttcttttatacccccccaaacttttgtgtacgttccaatttaattattattgtagtaccattagctaaatacaatatattaaaaacttttttgcctcttagtactttttccaaaagtcagtttttatcgagatattttgaatatttgtcaaatccaccacatatttgtatatggctaagtacgattatggagacttggtaatattatgaaaatttatttatgatttacatttttaggtatattttgaaccatattaaaaaagaagccacatctcgataaaagtgcttatcgaaaaaatacaaagaggcaaaaaagttttaaaaacactgtgtttaactaatggtaccgcagtaatagtttaattggaacatacaacatttggggggtttaaaggaacaaaacccccataaatttttacgtggacatgttaaaaaagaagtcgcaactcgataaaaactgccttatctgaaaaatactaagaaacaaaaatattgaatttaactaatggtaccacaataataaaattgaattggaacgtacacaaaagtttgggaggatttaagggatcaaaacccccataaaatttttatggggtgcacaaatttcaccatagtttttctttaagatattcct

SEQ ID NO: 312 - DNA, 1351 bp, Diabrotica virgifera
ggactattggagatcttttgttgaaagtggacatgtggcattcttgtggtagtagtatcttgatgaaggaattatagtgaaatttggacaccccataaacattttatgggggttttgttcttttatacccccccaaacttttgtgtacgttccaatttaattattattgtagtaccattagctaaatacaatatattaaaaacttttttgcctcttagtactttttccaaaagtcagtttttatcgagatattttgaatatttgtcaaatccaccacatatttgtatatggctaagtacgattatggagacttggtaatattatgaaaatttatttatgatttacatttttaggtatattttgaaccatattaaaaaagaagtaatatcttgataaaaagtgccttctcgaaaaaatacaaaaaggcaaaaaagttataaaaacactgtgtttaactgatggtaccgcagtaaaagcttaattggaacatacacaaacatttggggggtttaaaggaacaaaacccccataaaatttttatgtaaacattaaaaaagaagccgcaactcgataaaagctgccttatcgaaaaagtactaagaggcaaaaaagttatagaaatattgaattgaactaatggtaccacaatagtaatttaattggagcgtacacgggagtttgggggtgtttaagggaacggaacccccataaaatttttgtggaatgcacaaatttcactgtggttcttttttaagatgttcctgccatagaatgccacatgtccgttttcagtggaaggtctccaatagttttcgatatattcgagggaatcgatttttattttgtaacttcggggggctgtaactttttttatgtgcatatttgtactaaggtaaattgggttcattcgaactatttttggtcttaaaatgtgtgatctaatttatgacctgtattttcgttacaccctatctgaagcattatttggttaaaacatctcgtttctgttgatacaaaaaaatattaatttttctggactaaattacggttctgtttatgtcctagaagacttggtattcacgcaatgttgccaaactgaattttgttatatttgctttacattttctagccgatttccgagcgtactataactctatcgaccgattagtcgggactgtcagaaaaaggttttaaaatatttattacttttatgaataattattgttcatttgtttaaagtcatacatcaaagtttttatttttttatggtaaacatcgtgcatttttatatgtgattgatattaatcttgttatatatctgagacaaaaataaatgatgagatagaaatgc

SEQ ID NO: 313 - DNA, 1329 bp, Diabrotica virgifera
ttgaaagtggacatgtggcattcttgtggtagtagtatcttgtgaaagagttatagtgtttggacaccccataaacattttattgggggttttgttcttttatacccccccaaacttttgtgtacgttccaatttaattgttgttgtggtaccattagctaaatacaatattttaaaagcttttttgcctcttagtactttttccaaacgtcagtttttatcgagatattttgaatatttgtcaaatccaccacatatttgtatatggctaagtacgattatggagacttggtaataatatgaaaatttatttatgatttacatttttaggtatatttgaaccatattaaagaagaagtaatatctcgataaaaagtgccttctcgagaaaatacaaagaggcaaaaaagttttaaaaacactgtatttaactaatggtaccgcagtaaaagtttaattggaacgtacacaaacatttggggggtttaaaggaacaaaacccccataaaatgtttatgtaaacatattaaaaaagaagccgcaactcgataaaactgccttatcgaaaaaatactaagaggcaaaaaagttatagaaatattgaattgaactaatggtaccacaataataatttaattggagcgtgcacaggggtttgggggtgtttaagggaacaaaatccccataaaatttttgtggaatgcacaaatttcactgtaattcttttttaagatgttcctgccatgggagtgccacatgtccattttcaatgggggatctccaatagttttcgatatattcgagggaatcgatttttattttgtaacttcggggggctgtaactttttttatgtgcatatttgtactaaggtaaattgggttcattcgaactatttttggtcttaaaatgtgtgatctaatttatgacctgtattttcgttacaccctatctgaagcattatttggttaaaacatctcgtttctgttgatacaaaaaaatattaatttttctggactaaattacggttctgtttatgtcctagaagacttggtattcacgcaatgttgccaaactgaattttgttatatttgctttacattttctagccgatttccgagcgtactataactctatcgaccgattagtcgggactgtcagaaaaaggttttaaaatatttattacttttatgaataattattgttcatttgtttaaagtcatacatcaaagtttttatttttttatggtaaacatcgtgcatttttatatgtgattgatattaatcttgttatatatctgagacaaaaataaatgatgagatagaaatgc

SEQ ID NO: 314 - DNA, 1234 bp, Diabrotica virgifera
tatcgtttttacacccggtatacagtgacacttgcctttttagtaatggaattattacgttgatgttcttgaagaataaagctgtaatatactggaaaatcactcaaatcggacagcggatttaggaaatgcgaaacatcagaggatgtctcatttttgggatggtgcgttaattttgattgaatttggtgcgaatatttaagaattgataaaaaaacatatttgaatttgcttgatttagtcacacctataattatcaaacaaaatacacagctatatgacatgccaactagcaactacacagttttagtttgaatgtacaattttaactgaacagttttatctaatgaaatttcaattcatttgtcaattgaactgtacagtcttcagttttgcctacacacataagttttaactgaatagttcgattgtttagttgaaactgtgcagttcaaactaaaggtgtgaagcggcctttagcggaactgaattgaaaattatttcgcacattacagggtgtaacaaaaatgcaggtcataaatttgatcacatgttctgggacccaaagtggtttgattgagcctaacttgccttagtacaaatgtgcacataaggggagttgcggccctttgaagttgcaggaaaatcgattttttccaatatatcgaggactattggagatcttttgttgaaagtggacatgtggcattcttatggtagtagtatcttgtgaaagattatagtgaagtttggacaccccataaacattttgtgagggttttgttcttttataccccccccccaaaggcttttgtgtacgttccagtttaattgttgttgtggtaccattggctaaatacaatattttaaaaacttttttgcctcttagtactttttccaaaagtcagtttttatcgagatattttgaatatttgtcaaatccaccacatatttgtatatggctaagtacgattatggagacttggtaatattatgaaaatttatttatgatttacatttttaggtatattttgaaccatattaaaaaagaagccacatctcgataaaagtgcttatcgaaaaaatacaaagaggcaaaaaagttttaaaaacactgtgtttaactaatggtaccgcagtaatagtttaattggaacgtacacaaacatttggggggtttaaaggaacaaaaccccataaaatttttatgtaaacatattaaaaaagaagccgc

SEQ ID NO: 315 - DNA, 1234 bp, Diabrotica virgifera
tatcgtttttacacccggtatacagtgacacttgcctttttagtaatggaattattacgttgatgttcttgaagaataaagctgtaatatactggaaaatcactcaaatcggacagcggatttaggaaatgcgaaacatcagaggatgtctcatttttgggatggtgcgttaattttgattgaatttggtgcgaatatttaagaattgataaaaaaacatatttgaatttgcttgatttagtcacacctataattatcaaacaaaatacacagctatatgacatgccaactagcaactacacagttttagtttgaatgtacaattttaactgaacagttttatctaatgaaatttcaattcatttgtcaattgaactgtacagtcttcagttttgcctacacacataagttttaactgaatagttcgattgtttagttgaaactgtgcagttcaaactaaaggtgtgtagcggcctttagcggaactgaattgaaaattatttcgcacattacaggatgtaacaaaaatacaggtcataaatttgatcacatgttctgggacccaggagtagttcgattgaacctaacttgccttagtacaggtgtgcacatggaaggggttgcagccctttgaagttgcagaggaaaagtcgattttttccaatatatcgaaaactattggagatcttttgttgagagtggacatgtggcattcttatggtagtggtatcttgtgaaggggttatagtgaagtttggacaccccataaacattttatgagggttttgttcttttatacccccccaaacttttgtgtacgttccaatttaattattattgtagtaccattagctaaatacaatatattaaaaacttttttgcctcttagtactttttccaaaagtcagtttttatcgagatattttgaatatttgtcaaatccaccacatatttgtatatggctaagtacgattatggagacttggtaatattatgaaaatttatttatgatttacatttttaggtatattttgaaccatattaaaaaagaagccacatctcgataaaagtgcttatcgaaaaaatacaaagaggcaaaaaagttttaaaaacactgtgtttaactaatggtaccgcagtaatagtttaattggaacgtacacaaacatttggggggtttaaaggaacaaaaccccataaaatttttatgtaaacatattaaaaaagaagccgc

SEQ ID NO: 316 - DNA, 1331 bp, Diabrotica virgifera
atgaccagattgtttttttatgtttggcaaaaggggacttgagtcagaatgcacattgataatgttttgatgatttctggaccagaaaaaaactgttgtagatgtaaactgtatgtacagtagaatctactacagtactgtagaaatcatcaagaacattatcgatgtgcaattctgacttaagccctttttcccaaacatcagagaattgtaatgtacaataattctcctatctgctttttcatgaattttgtaggagacgaaaaaccatttttaggatcatctgctttcacatgtaaattttgacatgtcttgtagtaaatagatagttgaatttactacaaaacatgtcaaaaaatatatgaaaacaggaggtaaccataaaaaagtttttagtctctcttacaaaactcatgaaaaaacaaatcggaggtatgtcacatcagtgactatatccagggaatgtctaaaaaatatactttgatgtcccaagaaccaaatataacctttatatatatatacagggtgtaacaagggtacaggtcataaatttaatcacatatcctgggaccaaaaatagtttgattggacctaacttaccttagtacaaatgtgcacaaaagaaaagttacagccctttgaagttatatattaatagcaccaagggccttagaggcccatggcttgaaaagtttgttttttcttcattttcacgtttctttatgtactgagatcttctctggcttgatatgtgatttttctccattccttcctcttattcatttttcttttctgaccctgtagcaccattctttccaaatctttttcgacctcttgcttccatctattttcggccttcctcttctctttcttgaagctgtagtgtagtttagtaccatttttggagtcctcgtgtttggcatcctttcaatgtgacctcgccatctaagtctctgtgcctttatcactcatttgaagttacaagatgaagtgattttttccaatatatcgaggactattggagattttttgttgaaaatggacatgtggcattattgtggcagcagtatcttacgaaaaactatggtaaaatttggacaccccataaatttttatgtagacatgttaaaaaagaagtcgcaactcgataaaaactgccttatctgaaaaatactaagaaacaaaaatattgaatttaactaatggtaccacaataataaaattgaattggaacgtacacaaaagtttgggaggatttaagggatcaaaacccccataaaatttttatggggtgcacaaatttcaccatagtttttctttaagatattcct

SEQ ID NO: 317 - DNA, 1262 bp, Diabrotica virgifera
atagacattttgtgagggttttgttcttttataccccccccccccaaacttttgtgtacgttccggtttaattattgttgtggtaccattggctaaatacaatattttaaaaacttttttgcctcttagtactttttccaaaagtcagtttttatcgagatattttgaatatttgtcaaatccaccacatatttgtatatggctaagtacgattatggagacttggtaatattatgaaaatttatttatgatttacatttttaggtatattttgaaccatattaaaaaagaagtaatatcttgataaaaagtgccttctcgaaaaaatacaaaaaggcaaaaaagttataaaaacactgtgtttaactgatggtaccgcagtaaaagcttaattggaacatacacaaacatttggggggtttaaaggaacaaaacccccataaaatttttatgtaaacattaaaaaagaagccgcaactcgataaaagctgccttatcgaaaaagtactaagaggcaaaaaagttatagaaatattgaattgaactaatggtaccacaatagtaatttaattggagcgtacacgggagtttgggggtgtttaagggaacggaacccccataaaatttttgtggaatgcacaaatttcactgtggttcttttttaagatgttcctgccatagaatgccacatgtccgttttcagtggaaggtctccaatagttttcgatatattcgagggaatcgatttttattttgtaacttcggggggctgtaactttttttatgtgcatatttgtactaaggtaaattgggttcattcgaactatttttggtcttaaaatgtgtgatctaatttatgacctgtattttcgttacaccctatctgaagcattatttggttaaaacatctcgtttctgttgatacaaaaaaatattaatttttctggactaaattacggttctgtttatgtcctagaagacttggtattcacgcaatgttgccaaactgaattttgttatatttgctttacattttctagccgatttccgagcgtactataactctatcgaccgattagtcgggactgtcagaaaaaggttttaaaatatttattacttttatgaataattattgttcatttgtttaaagtcatacatcaaagtttttatttttttatggtaaacatcgtgcatttttatatgtgattgatattaatcttgttatatatctgagacaaaaataaatgatgagatagaaatgc

SEQ ID NO: 318 - DNA, 1228 bp, Diabrotica virgifera
tatcgtttttacacccggtatacagtgacacttgcctttttagtaatggaattattacgttgatgttcttgaagaataaagctgtaatatactggaaaatcactcaaatcggacagcggatttaggaaatgcgaaacatcagaggatgtctcatttttgggatggtgcgttaattttgattgaatttggtgcgaatatttaagaattgataaaaaaacatatttgaatttgcttgatttagtcacacctataattatcaaacaaaatacacagctatatgacatgccaactagcaactacacagttttagtttgaatgtacaattttaactgaacagttttatctaatgaaatttcaattcatttgtcaattgaactgtacagtcttcagttttgcctacacacataagttttaactgaatagttcgattgtttagttgaaactgtgcagttcaaactaaaggtgtgaagcggcctttagcggaactgaattgaaaattatttcgcacattacagggtgtaacaaaaatgcaggtcataaatttgatcacatgttctgggacccaaagtggtttgattgagcctaacttgccttagtacaaatgtgcacataaggggagttgcggccctttgaagttgcaggaaaatcgattttttccaatatatcgaggactattggagatcttttgttgaaagtggacatgtggcattcttatggtagtagtatcttgtgaaagattatagtgaagtttgggcaccccatagacatttttgagggttttgttcttttatacccccccaaacttttgtgtacgttccaatttaattgttgttgtggtaccattagctaaatacaatattttaaaagcttttttgcctcttagtactttttccaaacgtcagtttttatcgagatattttgaatatttgtcaaatccaccacatatttgtatatggctaagtacgattatggagacttggtaataatatgaaaatttatttatgatttacatttttaggtatattttgaaccatattataaaagaagtaatatcttgataaaaagtgccttctcgaaaaaatacaaaaaggcaaaaaagttataaaacactgtgtttaactgatggtaccgcagtaaaagcttaattggagcgtacacagacatttggggggtttaagggaacaaaacccccataaaaattttatgtaaacatattaaaaaagaagcc

SEQ ID NO: 319 - DNA, 1133 bp, Diabrotica virgifera
cgccaatgtgaatataaaattcttaattgtatgcaaatttcatttgcgtgtctcggccggtttggagcaatgaatgaatcgtcagtttgtgggagggaattcgggatcccgtatctcggaagcagggcatttgcggacatgtgtttgtaggagcaaagggtcattattttttcatgtagaattgccccgtaaatgttgtcgcacttatttggaaacaccctgtattgatgaaaaacattgctagttgttgagtgcctaacttttttattatccaacataagcgaattagtcaaaaggcataatgttggggaagcctagggctgcagttgggttttaattttaatattttatatatgctggagttttccacagggtgttccaaactttgaggaggggacacgctatcatttttgcacccggtatacaatgacacttgcctttttggtaataatattgttgcgttgatattcttgaagaatagagctgtaatatactagaaaatcactcaaatcggacaacagatttaggaaatacgaaacatcagaaatgtctcatttttgggatggtgcgttaattttgattgaatttggtgcgaatatttaagaattgataaaaaaacatatttgaatttgcttgatttagtcacacctataattatcaaacaaaatacacagctatatgacatgccaactagcaactacacagttttagtttgaatgtacaattttaactgaacagttttatctaatgaaatttcaattcatttgtcaattgaactgtacagtcttcagttttgcctacacacataagttttaactgaatagttcgattgtttagttgaaactgtgcagttcaaactaaaggtgtgtagcggcctttagcggaactgaattgaaaattatttcgcacattacaggatgtaacaaaaatacaggtcatagatttaatcacatattctgggacccaaaatggtttgattgaacctaacttaccttatgtgtgcacataagtacaaatgtgcacataagagggttacagccctttgaggttacagaaagaaatcgattttttccaatatatcgggggctgttggagatcttttgttgaaagtggacatgtggcattcttatgat

SEQ ID NO: 320 - DNA, 4069 bp, Diabrotica virgifera
catttgcggacatatgtttgtggagcaagggtcattgttttttcatgtagaattgccccgtaaatgttgtcgcatttatttggaaacaccctgtattgatgaagaagcattgctagttgttgaagtgcctaacttttttattatccacataggtgaattagtcaaaaagcgtaatgttaagaaagcctaaagccatggtttgttaggaacagtgagcgacgcacggcatacgggtacagcagaatctgttgtactcgacgcacggcagatttgagtaagtcggtttgttagcatattattctgtcttctgtcgatctcaaaatagtttgagtttgacgtttattctcacggagggtgtacgtagaaaaacaaattctgacacaatcaaggcaataattttattactcctagaaaaggaggaggaagaagagataataatattaaatttaaataaaagaaataaaaatgtaaactaaatgttttcatgtcgtaatacagaaggtgcatttatattaatagtcaaaagaaaattgtttcagaacgagaaaaaatttcgagaatattttagaatttccagatatttatttgaaaatgtattaccatttataagggataatattactaaaaaaccctacaacagaagacaacatccgatttctggagaagaaaaattaagcataactttgaattaggttttttttttatttagagaaaaaataaaaatatgtgtttaagtaaaaaacagaaaacttcttaaaaatgtaaagtatattataattgtatcttacatttctacattgttattaattgattctggcgaaaattcaaacaaatgagatcctacatttatttccaaagaatttcacaagaattatttgttgtaataggaaccaattcatgtacctaattcatttgcagccagctcaatttcatatcgccaaacaatatgcattacttcagcttttattcttgccttttcaatcgtaggaaatctcgatactgtggaagcaacactttaaaaaaacatgtggatcacctgatttttgagccaatgtcgattatgtttccgactttttaacaagtttttcaatcaaagcggttcgttcctctcgtcccatttttaattcgctcgttaatgagaaatttctgtttttgacatttactttttttttcggtgctcacaatatagtattataaaagtgtaaaaagagtaataaatcgtctaatacaatagtaatagaaattagatgttgggttcctgtgaggcacatggtgtctttgaaacgcactactgaaagggaaaggtttatagtgggtactttttgttaaatgcaagctgcttttctctttgaatatttccccaaataattgacctgaaaacaggtcaattgacagagaactacgtacatatttaaaaatacgcgaatagaataataaaaaatgagatattcaaagcatactttaaaatagggatcagggataatggcaagacaaaattgtgccatttgttgaataataacgatacactttattttgtacaaacgtagttttattataatgcatgcttcagtttaataaataatagaaataataccaattaatctaaatagcaattaaatactaataatatcaatttaatacaagtgactttttcatttactttgtgcaattaaaaatatgtcaaatcatgcaaacttatttttgtttgaataaaattagtttacatcaccacgttgtacactgtgagttcagctgaacgtttgcgtccaaatcaaatcgcagttgattccagcgcacaccgtcgacgtatgtacactgctgtcggtcttcagagcgcgcagctaagcagaacctaacaatccgttaacatacagaagccattcctttgatttggactgacgtgcgcggcgttcgactgactgtgagttgtgcgtcgctcactgttctaacaaaccgtggcttaaggctacagttgggttttaattttaatattttatgtgtgctggagttttccacagggtgttccaaactttgaggaggagacacgctatcatttttacgcccggtgtacaatgacacttgcctttttggtaatgaattattacattgatattcttgaagaatagagctgtagtatactgggaaaatcactcaaatcggacagcagatttgggaaatacgaggcatcggaaatgtctcatttttgaggtggtgcgttaattttgattgaatttggtgcgaatatttaagaattgataaaaaaacatatttgaatttgcttgatttagtcacacctataattatcaaacaaaatacacagctatatgacatgccaactagcaactacacagttttagtttgaatgtacaattttaactgaacagttttatctaatgaaatttcaattcatttgtcaattgaactgtacagtcttcagttttgcctacacacataagttttaactgaatagttcgattgtttagttgaaactgtgcagttcaaactaaaggtgtgtagcggcctttagcggaactgaattgaaaattatttcgcacattacaggatgtaacaaaaatacaggtcataaatttgatcacatgttctgggacccaggagtagttcgattgaacctaacttgccttagtacaggtgtgcacatggaaggggttgcagccctttgaagttgcagaggaaaagtcgattttttccaatatatcgaaaactattggagatcttttgttgagagtggacatgtggcattcttatggtagtggtatcttgtgaaggggttatagtgaagtttggacaccccataaacattttatgagggttttgttcttttatacccccccaaacttttgtgtacgttccaatttaattattattgtagtaccattagctaaatacaatatattaaaaacttttttgcctcttagtactttttccaaaagtcagtttttatcgagatattttgaatatttgtcaaatccaccacatatttgtatatggctaagtacgattatggagacttggtaatattatgaaaatttatttatgatttacatttttaggtatattttgaaccatattaaaaaagaagtaatatcttgataaaaagtgccttctcgaaaaaatacaaaaaggcaaaaaagttataaaaacactgtgtttaactgatggtaccgcagtaaaagcttaattggaacatacacaaacatttggggggtttaaaggaacaaaacccccataaaatttttatgtaaacattaaaaaagaagccgcaactcgataaaagctgccttatcgaaaaagtactaagaggcaaaaaagttatagaaatattgaattgaactaatggtaccacaatagtaatttaattggagcgtacacgggagtttgggggtgtttaagggaacggaacccccataaaatttttgtggaatgcacaaatttcactgtggttcttttttaagatgttcctgccatagaatgccacatgtccgttttcagtggaaggtctccaatagttttcgatatattcgagggaatcgatttttattttgtaacttcggggggctgtaactttttttatgtgcatatttgtactaaggtaaattgggttcattcgaactatttttggtcttaaaatgtgtgatctaatttatgacctgtattttcgttacaccctatctgaagcattatttggttaaaacatctcgtttctgttgatacaaaaaaatattaatttttctggactaaattacggttctgtttatgtcctagaagacttggtattcacgcaatgttgccaaactgaattttgttatatttgctttacattttctagccgatttccgagcgtactataactctatcgaccgattagtcgggactgtcagaaaaaggttttaaaatatttattacttttatgaataattattgttcatttgtttaaagtcatacatcaaagtttttatttttttatggtaaacatcgtgcatttttatatgtgattgatattaatcttgttatatatctgagacaaaaataaatgatgagatagaaatgc

SEQ ID NO: 321 - DNA, 1120 bp, Diabrotica virgifera
cgccaatgtgaatataaaattcttaattgtatgcaaatttcatttgcgtgtctcggccggtttggagcaatgaatgaatcgtcagtttgtgggagggaattcgggatcccgtatctcggaagcagggcatttgcggacatgtgtttgtaggagcaaagggtcattattttttcatgtagaattgccccgtaaatgttgtcgcacttatttggaaacaccctgtattgatgaaaaacattgctagttgttgagtgcctaacttttttattatccaacataagcgaattagtcaaaaggcataatgttggggaagcctagggctgcagttgggttttaattttaatattttatatatgctggagttttccacagggtgttccaaactttgaggaggggacacgctatcatttttgcacccggtatacaatgacacttgcctttttggtaataatattgttgcgttgatattcttgaagaatagagctgtaatatactagaaaatcactcaaatcggacaacagatttaggaaatacgaaacatcagaaatgtctcatttttgggatggtgcgttaattttgattgaatttggtgcgaatatttaagaattgataaaaaaacatatttgaatttgcttgatttagtcacacctataattatcaaacaaaatacacagctatatgacatgccaactagcaactacacagttttagtttgaatgtacaattttaactgaacagttttatctaatgaaatttcaattcatttgtcaattgaactgtacagtcttcagttttgcctacacacataagttttaactgaatagttcgattgtttagttgaaactgtgcagttcaaactaaaggtgtgtagcggcctttagcggaactgaattgaaaattatttcgcacattacaggatgtaacaaaaatacaggtcatagatttaatcacatattctgggacccaaaatggtttgattgaacctaacttaccttatgtgtgcacataagtacaaatgtgcacataagagggttacagccctttgaggttacaaagaaatcgattttttccaatatatcgggggctgttggagatcttttgttgaaagtggacatgtggc

SEQ ID NO: 322 - DNA, 1056 bp, Diabrotica virgifera
atttgatcacatgttctgggacccaaagtagtttgattgaacctaacttaccttatgtgtgcacataagtacaaatgtgcacataaagaaggttacagccctttgaagttgcaggaaaatcgattttttccaatatatcgaagactattggagatcttttgttgaaagtggacatgtggcattcttatggtagtagtatcttgtgaaagattatagtgaagtttgggcaccccatagacatttttgagggttttgttcttttatacccccccaaacttttgtgtacgttccaatttaattgttgttgtggtaccattagctaaatacaatattttaaaagcttttttgcctcttagtactttttccaaacgtcagtttttatcgagatattttgaatatttgtcaaatccaccacatatttgtatatggctaagtacgattatggagacttggtaataatatgaaaatttatttatgatttacatttttaggtatatttgaaccatattaaagaagaagtaatatctcgataaaaagtgccttctcgagaaaatacaaagaggcaaaaaagttttaaaaacactgtatttaactaatggtaccgcagtaaaagtttaattggaacgtacacaaacatttggggggtttaaaggaacaaaacccccataaaatgtttatgtaaacatattaaaaaagaagccgcaactcgataaaactgccttatcgaaaaaatactaagaggcaaaaaagttatagaaatattgaattgaactaatggtaccacaataataatttaattggagcgtacacaggggtttgggggtgtttaagggaacagaatccccataaaatttttgtggaatgcacaaatttcactgtaattcttttttaagatgttcctgccatgggagtgccacatgtccgttttcagtggaaggtctccaatagttttcgatatattcgaaaaatcgattttttattttgtaacttcggggggctgtaactttttttatgtgcatatttgtactggtgagttaggttcattcgaactgtttt

SEQ ID NO: 323 - DNA, 1031 bp, Diabrotica virgifera
ttctgggatcaaaaatggttcgattgaacctaacttgccttggtgcaagtgtgcacatggggggagttgcagccctttgaagttgcaaagcgaaatcgattttttccaatatatcgagaatattaaagatgttttattgaaggtggacatgtgatattcttttggtagtagtatcttgggaaggaattatagtgaagtttgggcaccccataggggttttatgggggttttgttctttaaacccccccaaacttttgtgtacgttccaatttaattattgttgttgtaccattagttaaacacaatgttttgaaacttttttgcctctcagtactttttcgaaaagttagtttttatcgagatattttgaatatttgtcaaatccaccacatatttgtatatggctaagtacgattatggagacttggtaataatatgaaaatttatttatgatttacatttttaggtatatttgaaccatattaaagaagaagtaatatctcgataaaaagtgccttctcgagaaaatacaaagaggcaaaaaagttttaaaaacactgtatttaactaatggtaccgcagtaaaagtttaattggaacgtacacaaacatttggggggtttaaaggaacaaaacccccataaaatgtttatgtaaacatattaaaaaagaagccgcaactcgataaaactgccttatcgaaaaaatactaagaggcaaaaaagttatagaaatattgaattgaactaatggtaccacaataataatttaattggagcgtacacaggggtttgggggtgtttaagggaacagaatccccataaaatttttgtggaatgcacaaatttcactgtaattcttttttaagatgttcctgccatgggagtgccacatgtccgttttcagtggaaggtctccaatagttttcgatatattcgaaaaatcgattttttattttgtaacttcggggggctgtaactttttttatgtgcatatttgtactggtgagttaggttcattcgaactgtttt

SEQ ID NO: 324 - DNA, 1031 bp, Diabrotica virgifera
ttctgggatcaaaaatggttcgattgaacctaacttgccttggtgcaagtgtgcacatggggggagttgcagccctttgaagttgcaaagcgaaatcgattttttccaatatatcgagaatattaaagatgttttattgaaggtggacatgtgatattcttttggtagtagtatcttgggaaggaattatagtgaagtttgggcaccccataggggttttatgggggttttgttctttaaacccccccaaacttttgtgtacgttccaatttaattattgttgttgtaccattggttgaacacaatattttaaaacttttttgcctctcagtactttttcgaaaagttagtttttatcgagatattttgaatatttgtcaaatccaccacatatttgtatatggctaagtacgattatggagacttggtaataatatgaaaatttatttatgatttacatttttaggtatatttgaaccatattaaagaagaagtaatatctcgataaaaagtgccttctcgagaaaatacaaagaggcaaaaaagttttaaaaacactgtatttaactaatggtaccgcagtaaaagtttaattggaacgtacacaaacatttggggggtttaaaggaacaaaacccccataaaatgtttatgtaaacatattaaaaaagaagccgcaactcgataaaactgccttatcgaaaaaatactaagaggcaaaaaagttatagaaatattgaattgaactaatggtaccacaataataatttaattggagcgtacacaggggtttgggggtgtttaagggaacagaatccccataaaatttttgtggaatgcacaaatttcactgtaattcttttttaagatgttcctgccatgggagtgccacatgtccgttttcagtggaaggtctccaatagttttcgatatattcgaaaaatcgattttttattttgtaacttcggggggctgtaactttttttatgtgcatatttgtactggtgagttaggttcattcgaactgtttt

SEQ ID NO: 325 - DNA, 965 bp, Diabrotica virgifera
cgccaatgtgaatataaaattcttaattgtatgcaaatttcatttgcgtgtctcggccggtttggagcaatgaatgaatcgtcagtttgtgggagggaattcgggatcccgtatctcggaagcagggcatttgcggacatgtgtttgtaggagcaaagggtcattattttttcatgtagaattgccccgtaaatgttgtcgcacttatttggaaacaccctgtattgatgaaaaacattgctagttgttgagtgcctaacttttttattatccaacataagcgaattagtcaaaaggcataatgttggggaagcctagggctgcagttgggttttaattttaatattttatatatgctggagttttccacagggtgttccaaactttgaggaggggacacgctatcatttttgcacccggtatacaatgacacttgcctttttggtaataatattgttgcgttgatattcttgaagaatagagctgtaatatactagaaaatcactcaaatcggacaacagatttaggaaatacgaaacatcagaaatgtctcatttttgggatggtgcgttaattttgattgaatttggtgcgaatatttaagaattgataaaaaaacatatttgaatttgcttgatttagtcacacctataattatcaaacaaaatacacagctatatgacatgccaactagcaactacacagttttagtttgaatgtacaattttaactgaacagttttatctaatgaaatttcaattcatttgtcaattgaactgtacagtcttcagttttgcctacacacataagttttaactgaatagttcgattgtttagttgaaactgtgcagttcaaactaaaggtgtgtagcggcctttagcggaactgaattgaaaattatttcgcacattacaggatgtaacaaaaatacaggtcataaatttgatcacatgttctgggaccc

SEQ ID NO: 326 - DNA, 895 bp, Diabrotica virgifera
ttgaaagtggacatgtggcattcttgtggtagtagtatcttgtgaaagagttatagtgtttggacaccccataaacattttattgggggttttgttcttttatacccccccaaacttttgtgtacgttccaatttaattgttgttgtggtaccattagctaaatacaatattttaaaagcttttttgcctcttagtactttttccaaacgtcagtttttatcgagatattttgaatatttgtcaaatccaccacatatttgtatatggctaagtacgattatggagacttggtaataatatgaaaatttatttatgatttacatttttaggtatatttgaaccatattaaagaagaagtaatatctcgataaaaagtgccttctcgagaaaatacaaagaggcaaaaaagttttaaaaacactgtatttaactaatggtaccgcagtaaaagtttaattggaacgtacacaaacatttggggggtttaaaggaacaaaacccccataaaatgtttatgtaaacatattaaaaaagaagccgcaactcgataaaactgccttatcgaaaaaatactaagaggcaaaaaagttatagaaatattgaattgaactaatggtaccacaataataatttaattggagcgtacacaggggtttgggggtgtttaagggaacagaatccccataaaatttttgtggaatgcacaaatttcactgtaattcttttttaagatgttcctgccatgggagtgccacatgtccgttttcagtggaaggtctccaatagttttcgatatattcgaaaaatcgattttttattttgtaacttcggggggctgtaactttttttatgtgcatatttgtactggtgagttaggttcattcgaactgtttt

SEQ ID NO: 327 - DNA, 894 bp, Diabrotica virgifera
atttgatcacatgttctgggacccaaagtagtttgattgaacctaacttaccttatgtgtgcacataagtacaaatgtgcacataaagaaggttacagccctttgaagttgcaggaaaatcgattttttccaatatatcgaagactattggagatcttttgttgaaagtggacatgtggcattcttatggtagtagtatcttgtgaaagattatagtgaagtttggacaccccataaacattttgtgagggttttgttcttttataccccccccccaaaggcttttgtgtacgttccagtttaattgttgttgtggtaccattggctaaatacaatattttaaaaacttttttgcctcttagtactttttccaaaagtcagtttttatcgagatattttgaatatttgtcaaatccaccacatatttgtatatggctaagtacgattatggagacttggtaatattatgaaaatttatttatgatttacatttttaggtatattttgaaccatattaaaaaagaagccacatctcgataaaagtgcttatcgaaaaaatacaaagaggcaaaaaagttttaaaaacactgtgtttaactaatggtaccgcagtaatagtttaattggaacatacaacatttggggggtttaaaggaacaaaacccccataaatttttacgtggacatgttaaaaaagaagtcgcaactcgataaaaactgccttatctgaaaaatactaagaaacaaaaatattgaatttaactaatggtaccacaataataaaattgaattggaacgtacacaaaagtttgggaggatttaagggatcaaaacccccataaaatttttatggggtgcacaaatttcaccatagtttttctttaagatattcct

SEQ ID NO: 328 - DNA, 750 bp, Diabrotica virgifera
ggactattggagatcttttgttgaaagtggacatgtggcattcttgtggtagtagtatcttgatgaaggaattatagtgaaatttggacaccccataaacattttatgggggttttgttcttttatacccccccaaacttttgtgtacgttccaatttaattattattgtagtaccattagctaaatacaatatattaaaaacttttttgcctcttagtactttttccaaaagtcagtttttatcgagatattttgaatatttgtcaaatccaccacatatttgtatatggctaagtacgattatggagacttggtaatattatgaaaatttatttatgatttacatttttaggtatattttgaaccatattaaaaaagaagccacatctcgataaaagtgcttatcgaaaaaatacaaagaggcaaaaaagttttaaaaacactgtgtttaactaatggtaccgcagtaatagtttaattggaacatacaacatttggggggtttaaaggaacaaaacccccataaatttttacgtggacatgttaaaaaagaagtcgcaactcgataaaaactgccttatctgaaaaatactaagaaacaaaaatattgaatttaactaatggtaccacaataataaaattgaattggaacgtacacaaaagtttgggaggatttaagggatcaaaacccccataaaatttttatggggtgcacaaatttcaccatagtttttctttaagatattcct

SEQ ID NO: 329 - DNA, 707 bp, Diabrotica virgifera
atttgatcacatgttctgggacccaaagtagtttgattgaacctaacttaccttatgtgtgcacataagtacaaatgtgcacataaagaaggttacagccctttgaagttgcaggaaaatcgattttttccaatatatcgaagactattggagatcttttgttgaaagtggacatgtggcattcttatggtagtagtatcttgtgaaagattatagtgaagtttggacaccccataaacattttgtgagggttttgttcttttataccccccccccaaaggcttttgtgtacgttccagtttaattgttgttgtggtaccattggctaaatacaatattttaaaaacttttttgcctcttagtactttttccaaaagtcagtttttatcgagatattttgaatatttgtcaaatccaccacatatttgtatatggctaagtacgattatggagacttggtaatattatgaaaatttatttatgatttacatttttaggtatattttgaaccatattaaaaaagaagccacatctcgataaaagtgcttatcgaaaaaatacaaagaggcaaaaaagttttaaaaacactgtgtttaactaatggtaccgcagtaatagtttaattggaacgtacacaaacatttggggggtttaaaggaacaaaaccccataaaatttttatgtaaacatattaaaaaagaagccgc

SEQ ID NO: 330 - DNA, 732 bp, Diabrotica virgifera
tatcgtttttacacccggtatacagtgacacttgcctttttagtaatggaattattacgttgatgttcttgaagaataaagctgtaatatactggaaaatcactcaaatcggacagcggatttaggaaatgcgaaacatcagaggatgtctcatttttgggatggtgcgttaattttgattgaatttggtgcgaatatttaagaattgataaaaaaacatatttgaatttgcttgatttagtcacacctataattatcaaacaaaatacacagctatatgacatgccaactagcaactacacagttttagtttgaatgtacaattttaactgaacagttttatctaatgaaatttcaattcatttgtcaattgaactgtacagtcttcagttttgcctacacacataagttttaactgaatagttcgattgtttagttgaaactgtgcagttcaaactaaaggtgtgtagcggcctttagcggaactgaattgaaaattatttcgcacattacaggatgtaacaaaaatacaggtcatagatttaatcacatattctgggacccaaaatggtttgattgaacctaacttaccttatgtgtgcacataagtacaaatgtgcacataagagggttacagccctttgaggttacagaaagaaatcgattttttccaatatatcgggggctgttggagatcttttgttgaaagtggacatgtggcattcttatgat

SEQ ID NO: 331 - DNA, 3630 bp, Diabrotica virgifera
catttgcggacatatgtttgtggagcaagggtcattgttttttcatgtagaattgccccgtaaatgttgtcgcatttatttggaaacaccctgtattgatgaagaagcattgctagttgttgaagtgcctaacttttttattatccacataggtgaattagtcaaaaagcgtaatgttaagaaagcctaaagccatggtttgttaggaacagtgagcgacgcacggcatacgggtacagcagaatctgttgtactcgacgcacggcagatttgagtaagtcggtttgttagcatattattctgtcttctgtcgatctcaaaatagtttgagtttgacgtttattctcacggagggtgtacgtagaaaaacaaattctgacacaatcaaggcaataattttattactcctagaaaaggaggaggaagaagagataataatattaaatttaaataaaagaaataaaaatgtaaactaaatgttttcatgtcgtaatacagaaggtgcatttatattaatagtcaaaagaaaattgtttcagaacgagaaaaaatttcgagaatattttagaatttccagatatttatttgaaaatgtattaccatttataagggataatattactaaaaaaccctacaacagaagacaacatccgatttctggagaagaaaaattaagcataactttgaattaggttttttttttatttagagaaaaaataaaaatatgtgtttaagtaaaaaacagaaaacttcttaaaaatgtaaagtatattataattgtatcttacatttctacattgttattaattgattctggcgaaaattcaaacaaatgagatcctacatttatttccaaagaatttcacaagaattatttgttgtaataggaaccaattcatgtacctaattcatttgcagccagctcaatttcatatcgccaaacaatatgcattacttcagcttttattcttgccttttcaatcgtaggaaatctcgatactgtggaagcaacactttaaaaaaacatgtggatcacctgatttttgagccaatgtcgattatgtttccgactttttaacaagtttttcaatcaaagcggttcgttcctctcgtcccatttttaattcgctcgttaatgagaaatttctgtttttgacatttactttttttttcggtgctcacaatatagtattataaaagtgtaaaaagagtaataaatcgtctaatacaatagtaatagaaattagatgttgggttcctgtgaggcacatggtgtctttgaaacgcactactgaaagggaaaggtttatagtgggtactttttgttaaatgcaagctgcttttctctttgaatatttccccaaataattgacctgaaaacaggtcaattgacagagaactacgtacatatttaaaaatacgcgaatagaataataaaaaatgagatattcaaagcatactttaaaatagggatcagggataatggcaagacaaaattgtgccatttgttgaataataacgatacactttattttgtacaaacgtagttttattataatgcatgcttcagtttaataaataatagaaataataccaattaatctaaatagcaattaaatactaataatatcaatttaatacaagtgactttttcatttactttgtgcaattaaaaatatgtcaaatcatgcaaacttatttttgtttgaataaaattagtttacatcaccacgttgtacactgtgagttcagctgaacgtttgcgtccaaatcaaatcgcagttgattccagcgcacaccgtcgacgtatgtacactgctgtcggtcttcagagcgcgcagctaagcagaacctaacaatccgttaacatacagaagccattcctttgatttggactgacgtgcgcggcgttcgactgactgtgagttgtgcgtcgctcactgttctaacaaaccgtggcttaaggctacagttgggttttaattttaatattttatgtgtgctggagttttccacagggtgttccaaactttgaggaggagacacgctatcatttttacgcccggtgtacaatgacacttgcctttttggtaatgaattattacattgatattcttgaagaatagagctgtagtatactgggaaaatcactcaaatcggacagcagatttgggaaatacgaggcatcggaaatgtctcatttttgaggtggtgcgttaattttgattgaatttggtgcgaatatttaagaattgataaaaaaacatatttgaatttgcttgatttagtcacacctataattatcaaacaaaatacacagctatatgacatgccaactagcaactacacagttttagtttgaatgtacaattttaactgaacagttttatctaatgaaatttcaattcatttgtcaattgaactgtacagtcttcagttttgcctacacacataagttttaactgaatagttcgattgtttagttgaaactgtgcagttcaaactaaaggtgtgaagcggcctttagcggaactgaattgaaaattatttcgcacattacagggtgtaacaaaaatgcaggtcataaatttgatcacatgttctgggacccaaagtggtttgattgagcctaacttgccttagtacaaatgtgcacataaggggagttgcggccctttgaagttgcaggaaaatcgattttttccaatatatcgaggactattggagatcttttgttgaaagtggacatgtggcattcttatggtagtagtatcttgtgaaagattatagtgaagtttgggcaccccatagacatttttgagggttttgttcttttatacccccccaaacttttgtgtacgttccaatttaattgttgttgtggtaccattagctaaatacaatattttaaaagcttttttgcctcttagtactttttccaaacgtcagtttttatcgagatattttgaatatttgtcaaatccaccacatatttgtatatggctaagtacgattatggagacttggtaataatatgaaaatttatttatgatttacatttttaggtatatttgaaccatattaaagaagaagtaatatctcgataaaaagtgccttctcgagaaaatacaaagaggcaaaaaagttttaaaaacactgtatttaactaatggtaccgcagtaaaagtttaattggaacgtacacaaacatttggggggtttaaaggaacaaaacccccataaaatgtttatgtaaacatattaaaaaagaagccgcaactcgataaaactgccttatcgaaaaaatactaagaggcaaaaaagttatagaaatattgaattgaactaatggtaccacaataataatttaattggagcgtacacaggggtttgggggtgtttaagggaacagaatccccataaaatttttgtggaatgcacaaatttcactgtaattcttttttaagatgttcctgccatgggagtgccacatgtccgttttcagtggaaggtctccaatagttttcgatatattcgaaaaatcgattttttattttgtaacttcggggggctgtaactttttttatgtgcatatttgtactggtgagttaggttcattcgaactgtttt

SEQ ID NO: 332 - DNA, 719 bp, Diabrotica virgifera
tatcgtttttacacccggtatacagtgacacttgcctttttagtaatggaattattacgttgatgttcttgaagaataaagctgtaatatactggaaaatcactcaaatcggacagcggatttaggaaatgcgaaacatcagaggatgtctcatttttgggatggtgcgttaattttgattgaatttggtgcgaatatttaagaattgataaaaaaacatatttgaatttgcttgatttagtcacacctataattatcaaacaaaatacacagctatatgacatgccaactagcaactacacagttttagtttgaatgtacaattttaactgaacagttttatctaatgaaatttcaattcatttgtcaattgaactgtacagtcttcagttttgcctacacacataagttttaactgaatagttcgattgtttagttgaaactgtgcagttcaaactaaaggtgtgtagcggcctttagcggaactgaattgaaaattatttcgcacattacaggatgtaacaaaaatacaggtcatagatttaatcacatattctgggacccaaaatggtttgattgaacctaacttaccttatgtgtgcacataagtacaaatgtgcacataagagggttacagccctttgaggttacaaagaaatcgattttttccaatatatcgggggctgttggagatcttttgttgaaagtggacatgtggc

SEQ ID NO: 333 - DNA, 701 bp, Diabrotica virgifera
atttgatcacatgttctgggacccaaagtagtttgattgaacctaacttaccttatgtgtgcacataagtacaaatgtgcacataaagaaggttacagccctttgaagttgcaggaaaatcgattttttccaatatatcgaagactattggagatcttttgttgaaagtggacatgtggcattcttatggtagtagtatcttgtgaaagattatagtgaagtttgggcaccccatagacatttttgagggttttgttcttttatacccccccaaacttttgtgtacgttccaatttaattgttgttgtggtaccattagctaaatacaatattttaaaagcttttttgcctcttagtactttttccaaacgtcagtttttatcgagatattttgaatatttgtcaaatccaccacatatttgtatatggctaagtacgattatggagacttggtaataatatgaaaatttatttatgatttacatttttaggtatattttgaaccatattataaaagaagtaatatcttgataaaaagtgccttctcgaaaaaatacaaaaaggcaaaaaagttataaaacactgtgtttaactgatggtaccgcagtaaaagcttaattggagcgtacacagacatttggggggtttaagggaacaaaacccccataaaaattttatgtaaacatattaaaaaagaagcc

SEQ ID NO: 334 - DNA, 676 bp, Diabrotica virgifera
ttctgggatcaaaaatggttcgattgaacctaacttgccttggtgcaagtgtgcacatggggggagttgcagccctttgaagttgcaaagcgaaatcgattttttccaatatatcgagaatattaaagatgttttattgaaggtggacatgtgatattcttttggtagtagtatcttgggaaggaattatagtgaagtttgggcaccccataggggttttatgggggttttgttctttaaacccccccaaacttttgtgtacgttccaatttaattattgttgttgtaccattagttaaacacaatgttttgaaacttttttgcctctcagtactttttcgaaaagttagtttttatcgagatattttgaatatttgtcaaatccaccacatatttgtatatggctaagtacgattatggagacttggtaataatatgaaaatttatttatgatttacatttttaggtatattttgaaccatattataaaagaagtaatatcttgataaaaagtgccttctcgaaaaaatacaaaaaggcaaaaaagttataaaacactgtgtttaactgatggtaccgcagtaaaagcttaattggagcgtacacagacatttggggggtttaagggaacaaaacccccataaaaattttatgtaaacatattaaaaaagaagcc

SEQ ID NO: 335 - DNA, 676 bp, Diabrotica virgifera
ttctgggatcaaaaatggttcgattgaacctaacttgccttggtgcaagtgtgcacatggggggagttgcagccctttgaagttgcaaagcgaaatcgattttttccaatatatcgagaatattaaagatgttttattgaaggtggacatgtgatattcttttggtagtagtatcttgggaaggaattatagtgaagtttgggcaccccataggggttttatgggggttttgttctttaaacccccccaaacttttgtgtacgttccaatttaattattgttgttgtaccattggttgaacacaatattttaaaacttttttgcctctcagtactttttcgaaaagttagtttttatcgagatattttgaatatttgtcaaatccaccacatatttgtatatggctaagtacgattatggagacttggtaataatatgaaaatttatttatgatttacatttttaggtatattttgaaccatattataaaagaagtaatatcttgataaaaagtgccttctcgaaaaaatacaaaaaggcaaaaaagttataaaacactgtgtttaactgatggtaccgcagtaaaagcttaattggagcgtacacagacatttggggggtttaagggaacaaaacccccataaaaattttatgtaaacatattaaaaaagaagcc

SEQ ID NO: 336 - DNA, 661 bp, Diabrotica virgifera
atagacattttgtgagggttttgttcttttataccccccccccccaaacttttgtgtacgttccggtttaattattgttgtggtaccattggctaaatacaatattttaaaaacttttttgcctcttagtactttttccaaaagtcagtttttatcgagatattttgaatatttgtcaaatccaccacatatttgtatatggctaagtacgattatggagacttggtaatattatgaaaatttatttatgatttacatttttaggtatattttgaaccatattaaaaaagaagccacatctcgataaaagtgcttatcgaaaaaatacaaagaggcaaaaaagttttaaaaacactgtgtttaactaatggtaccgcagtaatagtttaattggaacatacaacatttggggggtttaaaggaacaaaacccccataaatttttacgtggacatgttaaaaaagaagtcgcaactcgataaaaactgccttatctgaaaaatactaagaaacaaaaatattgaatttaactaatggtaccacaataataaaattgaattggaacgtacacaaaagtttgggaggatttaagggatcaaaacccccataaaatttttatggggtgcacaaatttcaccatagtttttctttaagatattcct

SEQ ID NO: 337 - DNA, 563 bp, Diabrotica virgifera
ggactattggagatcttttgttgaaagtggacatgtggcattcttgtggtagtagtatcttgatgaaggaattatagtgaaatttggacaccccataaacattttatgggggttttgttcttttatacccccccaaacttttgtgtacgttccaatttaattattattgtagtaccattagctaaatacaatatattaaaaacttttttgcctcttagtactttttccaaaagtcagtttttatcgagatattttgaatatttgtcaaatccaccacatatttgtatatggctaagtacgattatggagacttggtaatattatgaaaatttatttatgatttacatttttaggtatattttgaaccatattaaaaaagaagccacatctcgataaaagtgcttatcgaaaaaatacaaagaggcaaaaaagttttaaaaacactgtgtttaactaatggtaccgcagtaatagtttaattggaacgtacacaaacatttggggggtttaaaggaacaaaaccccataaaatttttatgtaaacatattaaaaaagaagccgc

SEQ ID NO: 338 - DNA, 564 bp, Diabrotica virgifera
tatcgtttttacacccggtatacagtgacacttgcctttttagtaatggaattattacgttgatgttcttgaagaataaagctgtaatatactggaaaatcactcaaatcggacagcggatttaggaaatgcgaaacatcagaggatgtctcatttttgggatggtgcgttaattttgattgaatttggtgcgaatatttaagaattgataaaaaaacatatttgaatttgcttgatttagtcacacctataattatcaaacaaaatacacagctatatgacatgccaactagcaactacacagttttagtttgaatgtacaattttaactgaacagttttatctaatgaaatttcaattcatttgtcaattgaactgtacagtcttcagttttgcctacacacataagttttaactgaatagttcgattgtttagttgaaactgtgcagttcaaactaaaggtgtgtagcggcctttagcggaactgaattgaaaattatttcgcacattacaggatgtaacaaaaatacaggtcataaatttgatcacatgttctgggaccc

SEQ ID NO: 339 - DNA, 474 bp, Diabrotica virgifera
atagacattttgtgagggttttgttcttttataccccccccccccaaacttttgtgtacgttccggtttaattattgttgtggtaccattggctaaatacaatattttaaaaacttttttgcctcttagtactttttccaaaagtcagtttttatcgagatattttgaatatttgtcaaatccaccacatatttgtatatggctaagtacgattatggagacttggtaatattatgaaaatttatttatgatttacatttttaggtatattttgaaccatattaaaaaagaagccacatctcgataaaagtgcttatcgaaaaaatacaaagaggcaaaaaagttttaaaaacactgtgtttaactaatggtaccgcagtaatagtttaattggaacgtacacaaacatttggggggtttaaaggaacaaaaccccataaaatttttatgtaaacatattaaaaaagaagccgc

SEQ ID NO: 340 - DNA, 540 bp, Diabrotica virgifera
ttgaaagtggacatgtggcattcttgtggtagtagtatcttgtgaaagagttatagtgtttggacaccccataaacattttattgggggttttgttcttttatacccccccaaacttttgtgtacgttccaatttaattgttgttgtggtaccattagctaaatacaatattttaaaagcttttttgcctcttagtactttttccaaacgtcagtttttatcgagatattttgaatatttgtcaaatccaccacatatttgtatatggctaagtacgattatggagacttggtaataatatgaaaatttatttatgatttacatttttaggtatattttgaaccatattataaaagaagtaatatcttgataaaaagtgccttctcgaaaaaatacaaaaaggcaaaaaagttataaaacactgtgtttaactgatggtaccgcagtaaaagcttaattggagcgtacacagacatttggggggtttaagggaacaaaacccccataaaaattttatgtaaacatattaaaaaagaagcc

SEQ ID NO: 341 - DNA, 480 bp, Diabrotica virgifera
cttcaaagggctgtaactttttttatgtgcatatttgtactaaggtgaattgggttcattcgactatttttggtctcaaaatgtgtgatttaatttgtgacctgtattttggttacaccctatctgaagcattatttggttaaaacatctcgtttctgttgatacaaaaaaatattaatgtgtttatgtcctagaagacttggtattcacgcaatgttgccaaactgaattttgttatatttgctttacattttctagccgatttccgagcgtactataactctatcgaccgattagtcgggactgtcagaaaaaggttttaaaatatttattacttttatgaataattattgttcatttgtttaaagtcatacatcaaagtttttatttttttatggtaaacatcgtgcatttttatatgtgattgatattaatcttgttatatatctgagacaaaaataaatgatgagatagaaatgc

SEQ ID NO: 342 - DNA, 3468 bp, Diabrotica virgifera
catttgcggacatatgtttgtggagcaagggtcattgttttttcatgtagaattgccccgtaaatgttgtcgcatttatttggaaacaccctgtattgatgaagaagcattgctagttgttgaagtgcctaacttttttattatccacataggtgaattagtcaaaaagcgtaatgttaagaaagcctaaagccatggtttgttaggaacagtgagcgacgcacggcatacgggtacagcagaatctgttgtactcgacgcacggcagatttgagtaagtcggtttgttagcatattattctgtcttctgtcgatctcaaaatagtttgagtttgacgtttattctcacggagggtgtacgtagaaaaacaaattctgacacaatcaaggcaataattttattactcctagaaaaggaggaggaagaagagataataatattaaatttaaataaaagaaataaaaatgtaaactaaatgttttcatgtcgtaatacagaaggtgcatttatattaatagtcaaaagaaaattgtttcagaacgagaaaaaatttcgagaatattttagaatttccagatatttatttgaaaatgtattaccatttataagggataatattactaaaaaaccctacaacagaagacaacatccgatttctggagaagaaaaattaagcataactttgaattaggttttttttttatttagagaaaaaataaaaatatgtgtttaagtaaaaaacagaaaacttcttaaaaatgtaaagtatattataattgtatcttacatttctacattgttattaattgattctggcgaaaattcaaacaaatgagatcctacatttatttccaaagaatttcacaagaattatttgttgtaataggaaccaattcatgtacctaattcatttgcagccagctcaatttcatatcgccaaacaatatgcattacttcagcttttattcttgccttttcaatcgtaggaaatctcgatactgtggaagcaacactttaaaaaaacatgtggatcacctgatttttgagccaatgtcgattatgtttccgactttttaacaagtttttcaatcaaagcggttcgttcctctcgtcccatttttaattcgctcgttaatgagaaatttctgtttttgacatttactttttttttcggtgctcacaatatagtattataaaagtgtaaaaagagtaataaatcgtctaatacaatagtaatagaaattagatgttgggttcctgtgaggcacatggtgtctttgaaacgcactactgaaagggaaaggtttatagtgggtactttttgttaaatgcaagctgcttttctctttgaatatttccccaaataattgacctgaaaacaggtcaattgacagagaactacgtacatatttaaaaatacgcgaatagaataataaaaaatgagatattcaaagcatactttaaaatagggatcagggataatggcaagacaaaattgtgccatttgttgaataataacgatacactttattttgtacaaacgtagttttattataatgcatgcttcagtttaataaataatagaaataataccaattaatctaaatagcaattaaatactaataatatcaatttaatacaagtgactttttcatttactttgtgcaattaaaaatatgtcaaatcatgcaaacttatttttgtttgaataaaattagtttacatcaccacgttgtacactgtgagttcagctgaacgtttgcgtccaaatcaaatcgcagttgattccagcgcacaccgtcgacgtatgtacactgctgtcggtcttcagagcgcgcagctaagcagaacctaacaatccgttaacatacagaagccattcctttgatttggactgacgtgcgcggcgttcgactgactgtgagttgtgcgtcgctcactgttctaacaaaccgtggcttaaggctacagttgggttttaattttaatattttatgtgtgctggagttttccacagggtgttccaaactttgaggaggagacacgctatcatttttacgcccggtgtacaatgacacttgcctttttggtaatgaattattacattgatattcttgaagaatagagctgtagtatactgggaaaatcactcaaatcggacagcagatttgggaaatacgaggcatcggaaatgtctcatttttgaggtggtgcgttaattttgattgaatttggtgcgaatatttaagaattgataaaaaaacatatttgaatttgcttgatttagtcacacctataattatcaaacaaaatacacagctatatgacatgccaactagcaactacacagttttagtttgaatgtacaattttaactgaacagttttatctaatgaaatttcaattcatttgtcaattgaactgtacagtcttcagttttgcctacacacataagttttaactgaatagttcgattgtttagttgaaactgtgcagttcaaactaaaggtgtgaagcggcctttagcggaactgaattgaaaattatttcgcacattacagggtgtaacaaaaatgcaggtcataaatttgatcacatgttctgggacccaaagtggtttgattgagcctaacttgccttagtacaaatgtgcacataaggggagttgcggccctttgaagttgcaggaaaatcgattttttccaatatatcgaggactattggagatcttttgttgaaagtggacatgtggcattcttatggtagtagtatcttgtgaaagattatagtgaagtttggacaccccataaacattttgtgagggttttgttcttttataccccccccccaaaggcttttgtgtacgttccagtttaattgttgttgtggtaccattggctaaatacaatattttaaaaacttttttgcctcttagtactttttccaaaagtcagtttttatcgagatattttgaatatttgtcaaatccaccacatatttgtatatggctaagtacgattatggagacttggtaatattatgaaaatttatttatgatttacatttttaggtatattttgaaccatattaaaaaagaagccacatctcgataaaagtgcttatcgaaaaaatacaaagaggcaaaaaagttttaaaaacactgtgtttaactaatggtaccgcagtaatagtttaattggaacatacaacatttggggggtttaaaggaacaaaacccccataaatttttacgtggacatgttaaaaaagaagtcgcaactcgataaaaactgccttatctgaaaaatactaagaaacaaaaatattgaatttaactaatggtaccacaataataaaattgaattggaacgtacacaaaagtttgggaggatttaagggatcaaaacccccataaaatttttatggggtgcacaaatttcaccatagtttttctttaagatattcct

SEQ ID NO: 343 - DNA, 3468 bp, Diabrotica virgifera
catttgcggacatatgtttgtggagcaagggtcattgttttttcatgtagaattgccccgtaaatgttgtcgcatttatttggaaacaccctgtattgatgaagaagcattgctagttgttgaagtgcctaacttttttattatccacataggtgaattagtcaaaaagcgtaatgttaagaaagcctaaagccatggtttgttaggaacagtgagcgacgcacggcatacgggtacagcagaatctgttgtactcgacgcacggcagatttgagtaagtcggtttgttagcatattattctgtcttctgtcgatctcaaaatagtttgagtttgacgtttattctcacggagggtgtacgtagaaaaacaaattctgacacaatcaaggcaataattttattactcctagaaaaggaggaggaagaagagataataatattaaatttaaataaaagaaataaaaatgtaaactaaatgttttcatgtcgtaatacagaaggtgcatttatattaatagtcaaaagaaaattgtttcagaacgagaaaaaatttcgagaatattttagaatttccagatatttatttgaaaatgtattaccatttataagggataatattactaaaaaaccctacaacagaagacaacatccgatttctggagaagaaaaattaagcataactttgaattaggttttttttttatttagagaaaaaataaaaatatgtgtttaagtaaaaaacagaaaacttcttaaaaatgtaaagtatattataattgtatcttacatttctacattgttattaattgattctggcgaaaattcaaacaaatgagatcctacatttatttccaaagaatttcacaagaattatttgttgtaataggaaccaattcatgtacctaattcatttgcagccagctcaatttcatatcgccaaacaatatgcattacttcagcttttattcttgccttttcaatcgtaggaaatctcgatactgtggaagcaacactttaaaaaaacatgtggatcacctgatttttgagccaatgtcgattatgtttccgactttttaacaagtttttcaatcaaagcggttcgttcctctcgtcccatttttaattcgctcgttaatgagaaatttctgtttttgacatttactttttttttcggtgctcacaatatagtattataaaagtgtaaaaagagtaataaatcgtctaatacaatagtaatagaaattagatgttgggttcctgtgaggcacatggtgtctttgaaacgcactactgaaagggaaaggtttatagtgggtactttttgttaaatgcaagctgcttttctctttgaatatttccccaaataattgacctgaaaacaggtcaattgacagagaactacgtacatatttaaaaatacgcgaatagaataataaaaaatgagatattcaaagcatactttaaaatagggatcagggataatggcaagacaaaattgtgccatttgttgaataataacgatacactttattttgtacaaacgtagttttattataatgcatgcttcagtttaataaataatagaaataataccaattaatctaaatagcaattaaatactaataatatcaatttaatacaagtgactttttcatttactttgtgcaattaaaaatatgtcaaatcatgcaaacttatttttgtttgaataaaattagtttacatcaccacgttgtacactgtgagttcagctgaacgtttgcgtccaaatcaaatcgcagttgattccagcgcacaccgtcgacgtatgtacactgctgtcggtcttcagagcgcgcagctaagcagaacctaacaatccgttaacatacagaagccattcctttgatttggactgacgtgcgcggcgttcgactgactgtgagttgtgcgtcgctcactgttctaacaaaccgtggcttaaggctacagttgggttttaattttaatattttatgtgtgctggagttttccacagggtgttccaaactttgaggaggagacacgctatcatttttacgcccggtgtacaatgacacttgcctttttggtaatgaattattacattgatattcttgaagaatagagctgtagtatactgggaaaatcactcaaatcggacagcagatttgggaaatacgaggcatcggaaatgtctcatttttgaggtggtgcgttaattttgattgaatttggtgcgaatatttaagaattgataaaaaaacatatttgaatttgcttgatttagtcacacctataattatcaaacaaaatacacagctatatgacatgccaactagcaactacacagttttagtttgaatgtacaattttaactgaacagttttatctaatgaaatttcaattcatttgtcaattgaactgtacagtcttcagttttgcctacacacataagttttaactgaatagttcgattgtttagttgaaactgtgcagttcaaactaaaggtgtgtagcggcctttagcggaactgaattgaaaattatttcgcacattacaggatgtaacaaaaatacaggtcataaatttgatcacatgttctgggacccaggagtagttcgattgaacctaacttgccttagtacaggtgtgcacatggaaggggttgcagccctttgaagttgcagaggaaaagtcgattttttccaatatatcgaaaactattggagatcttttgttgagagtggacatgtggcattcttatggtagtggtatcttgtgaaggggttatagtgaagtttggacaccccataaacattttatgagggttttgttcttttatacccccccaaacttttgtgtacgttccaatttaattattattgtagtaccattagctaaatacaatatattaaaaacttttttgcctcttagtactttttccaaaagtcagtttttatcgagatattttgaatatttgtcaaatccaccacatatttgtatatggctaagtacgattatggagacttggtaatattatgaaaatttatttatgatttacatttttaggtatattttgaaccatattaaaaaagaagccacatctcgataaaagtgcttatcgaaaaaatacaaagaggcaaaaaagttttaaaaacactgtgtttaactaatggtaccgcagtaatagtttaattggaacatacaacatttggggggtttaaaggaacaaaacccccataaatttttacgtggacatgttaaaaaagaagtcgcaactcgataaaaactgccttatctgaaaaatactaagaaacaaaaatattgaatttaactaatggtaccacaataataaaattgaattggaacgtacacaaaagtttgggaggatttaagggatcaaaacccccataaaatttttatggggtgcacaaatttcaccatagtttttctttaagatattcct

SEQ ID NO: 344 - DNA, 3281 bp, Diabrotica virgifera
catttgcggacatatgtttgtggagcaagggtcattgttttttcatgtagaattgccccgtaaatgttgtcgcatttatttggaaacaccctgtattgatgaagaagcattgctagttgttgaagtgcctaacttttttattatccacataggtgaattagtcaaaaagcgtaatgttaagaaagcctaaagccatggtttgttaggaacagtgagcgacgcacggcatacgggtacagcagaatctgttgtactcgacgcacggcagatttgagtaagtcggtttgttagcatattattctgtcttctgtcgatctcaaaatagtttgagtttgacgtttattctcacggagggtgtacgtagaaaaacaaattctgacacaatcaaggcaataattttattactcctagaaaaggaggaggaagaagagataataatattaaatttaaataaaagaaataaaaatgtaaactaaatgttttcatgtcgtaatacagaaggtgcatttatattaatagtcaaaagaaaattgtttcagaacgagaaaaaatttcgagaatattttagaatttccagatatttatttgaaaatgtattaccatttataagggataatattactaaaaaaccctacaacagaagacaacatccgatttctggagaagaaaaattaagcataactttgaattaggttttttttttatttagagaaaaaataaaaatatgtgtttaagtaaaaaacagaaaacttcttaaaaatgtaaagtatattataattgtatcttacatttctacattgttattaattgattctggcgaaaattcaaacaaatgagatcctacatttatttccaaagaatttcacaagaattatttgttgtaataggaaccaattcatgtacctaattcatttgcagccagctcaatttcatatcgccaaacaatatgcattacttcagcttttattcttgccttttcaatcgtaggaaatctcgatactgtggaagcaacactttaaaaaaacatgtggatcacctgatttttgagccaatgtcgattatgtttccgactttttaacaagtttttcaatcaaagcggttcgttcctctcgtcccatttttaattcgctcgttaatgagaaatttctgtttttgacatttactttttttttcggtgctcacaatatagtattataaaagtgtaaaaagagtaataaatcgtctaatacaatagtaatagaaattagatgttgggttcctgtgaggcacatggtgtctttgaaacgcactactgaaagggaaaggtttatagtgggtactttttgttaaatgcaagctgcttttctctttgaatatttccccaaataattgacctgaaaacaggtcaattgacagagaactacgtacatatttaaaaatacgcgaatagaataataaaaaatgagatattcaaagcatactttaaaatagggatcagggataatggcaagacaaaattgtgccatttgttgaataataacgatacactttattttgtacaaacgtagttttattataatgcatgcttcagtttaataaataatagaaataataccaattaatctaaatagcaattaaatactaataatatcaatttaatacaagtgactttttcatttactttgtgcaattaaaaatatgtcaaatcatgcaaacttatttttgtttgaataaaattagtttacatcaccacgttgtacactgtgagttcagctgaacgtttgcgtccaaatcaaatcgcagttgattccagcgcacaccgtcgacgtatgtacactgctgtcggtcttcagagcgcgcagctaagcagaacctaacaatccgttaacatacagaagccattcctttgatttggactgacgtgcgcggcgttcgactgactgtgagttgtgcgtcgctcactgttctaacaaaccgtggcttaaggctacagttgggttttaattttaatattttatgtgtgctggagttttccacagggtgttccaaactttgaggaggagacacgctatcatttttacgcccggtgtacaatgacacttgcctttttggtaatgaattattacattgatattcttgaagaatagagctgtagtatactgggaaaatcactcaaatcggacagcagatttgggaaatacgaggcatcggaaatgtctcatttttgaggtggtgcgttaattttgattgaatttggtgcgaatatttaagaattgataaaaaaacatatttgaatttgcttgatttagtcacacctataattatcaaacaaaatacacagctatatgacatgccaactagcaactacacagttttagtttgaatgtacaattttaactgaacagttttatctaatgaaatttcaattcatttgtcaattgaactgtacagtcttcagttttgcctacacacataagttttaactgaatagttcgattgtttagttgaaactgtgcagttcaaactaaaggtgtgaagcggcctttagcggaactgaattgaaaattatttcgcacattacagggtgtaacaaaaatgcaggtcataaatttgatcacatgttctgggacccaaagtggtttgattgagcctaacttgccttagtacaaatgtgcacataaggggagttgcggccctttgaagttgcaggaaaatcgattttttccaatatatcgaggactattggagatcttttgttgaaagtggacatgtggcattcttatggtagtagtatcttgtgaaagattatagtgaagtttggacaccccataaacattttgtgagggttttgttcttttataccccccccccaaaggcttttgtgtacgttccagtttaattgttgttgtggtaccattggctaaatacaatattttaaaaacttttttgcctcttagtactttttccaaaagtcagtttttatcgagatattttgaatatttgtcaaatccaccacatatttgtatatggctaagtacgattatggagacttggtaatattatgaaaatttatttatgatttacatttttaggtatattttgaaccatattaaaaaagaagccacatctcgataaaagtgcttatcgaaaaaatacaaagaggcaaaaaagttttaaaaacactgtgtttaactaatggtaccgcagtaatagtttaattggaacgtacacaaacatttggggggtttaaaggaacaaaaccccataaaatttttatgtaaacatattaaaaaagaagccgc

SEQ ID NO: 345 - DNA, 3281 bp, Diabrotica virgifera
catttgcggacatatgtttgtggagcaagggtcattgttttttcatgtagaattgccccgtaaatgttgtcgcatttatttggaaacaccctgtattgatgaagaagcattgctagttgttgaagtgcctaacttttttattatccacataggtgaattagtcaaaaagcgtaatgttaagaaagcctaaagccatggtttgttaggaacagtgagcgacgcacggcatacgggtacagcagaatctgttgtactcgacgcacggcagatttgagtaagtcggtttgttagcatattattctgtcttctgtcgatctcaaaatagtttgagtttgacgtttattctcacggagggtgtacgtagaaaaacaaattctgacacaatcaaggcaataattttattactcctagaaaaggaggaggaagaagagataataatattaaatttaaataaaagaaataaaaatgtaaactaaatgttttcatgtcgtaatacagaaggtgcatttatattaatagtcaaaagaaaattgtttcagaacgagaaaaaatttcgagaatattttagaatttccagatatttatttgaaaatgtattaccatttataagggataatattactaaaaaaccctacaacagaagacaacatccgatttctggagaagaaaaattaagcataactttgaattaggttttttttttatttagagaaaaaataaaaatatgtgtttaagtaaaaaacagaaaacttcttaaaaatgtaaagtatattataattgtatcttacatttctacattgttattaattgattctggcgaaaattcaaacaaatgagatcctacatttatttccaaagaatttcacaagaattatttgttgtaataggaaccaattcatgtacctaattcatttgcagccagctcaatttcatatcgccaaacaatatgcattacttcagcttttattcttgccttttcaatcgtaggaaatctcgatactgtggaagcaacactttaaaaaaacatgtggatcacctgatttttgagccaatgtcgattatgtttccgactttttaacaagtttttcaatcaaagcggttcgttcctctcgtcccatttttaattcgctcgttaatgagaaatttctgtttttgacatttactttttttttcggtgctcacaatatagtattataaaagtgtaaaaagagtaataaatcgtctaatacaatagtaatagaaattagatgttgggttcctgtgaggcacatggtgtctttgaaacgcactactgaaagggaaaggtttatagtgggtactttttgttaaatgcaagctgcttttctctttgaatatttccccaaataattgacctgaaaacaggtcaattgacagagaactacgtacatatttaaaaatacgcgaatagaataataaaaaatgagatattcaaagcatactttaaaatagggatcagggataatggcaagacaaaattgtgccatttgttgaataataacgatacactttattttgtacaaacgtagttttattataatgcatgcttcagtttaataaataatagaaataataccaattaatctaaatagcaattaaatactaataatatcaatttaatacaagtgactttttcatttactttgtgcaattaaaaatatgtcaaatcatgcaaacttatttttgtttgaataaaattagtttacatcaccacgttgtacactgtgagttcagctgaacgtttgcgtccaaatcaaatcgcagttgattccagcgcacaccgtcgacgtatgtacactgctgtcggtcttcagagcgcgcagctaagcagaacctaacaatccgttaacatacagaagccattcctttgatttggactgacgtgcgcggcgttcgactgactgtgagttgtgcgtcgctcactgttctaacaaaccgtggcttaaggctacagttgggttttaattttaatattttatgtgtgctggagttttccacagggtgttccaaactttgaggaggagacacgctatcatttttacgcccggtgtacaatgacacttgcctttttggtaatgaattattacattgatattcttgaagaatagagctgtagtatactgggaaaatcactcaaatcggacagcagatttgggaaatacgaggcatcggaaatgtctcatttttgaggtggtgcgttaattttgattgaatttggtgcgaatatttaagaattgataaaaaaacatatttgaatttgcttgatttagtcacacctataattatcaaacaaaatacacagctatatgacatgccaactagcaactacacagttttagtttgaatgtacaattttaactgaacagttttatctaatgaaatttcaattcatttgtcaattgaactgtacagtcttcagttttgcctacacacataagttttaactgaatagttcgattgtttagttgaaactgtgcagttcaaactaaaggtgtgtagcggcctttagcggaactgaattgaaaattatttcgcacattacaggatgtaacaaaaatacaggtcataaatttgatcacatgttctgggacccaggagtagttcgattgaacctaacttgccttagtacaggtgtgcacatggaaggggttgcagccctttgaagttgcagaggaaaagtcgattttttccaatatatcgaaaactattggagatcttttgttgagagtggacatgtggcattcttatggtagtggtatcttgtgaaggggttatagtgaagtttggacaccccataaacattttatgagggttttgttcttttatacccccccaaacttttgtgtacgttccaatttaattattattgtagtaccattagctaaatacaatatattaaaaacttttttgcctcttagtactttttccaaaagtcagtttttatcgagatattttgaatatttgtcaaatccaccacatatttgtatatggctaagtacgattatggagacttggtaatattatgaaaatttatttatgatttacatttttaggtatattttgaaccatattaaaaaagaagccacatctcgataaaagtgcttatcgaaaaaatacaaagaggcaaaaaagttttaaaaacactgtgtttaactaatggtaccgcagtaatagtttaattggaacgtacacaaacatttggggggtttaaaggaacaaaaccccataaaatttttatgtaaacatattaaaaaagaagccgc

SEQ ID NO: 346 - DNA, 3275 bp, Diabrotica virgifera
catttgcggacatatgtttgtggagcaagggtcattgttttttcatgtagaattgccccgtaaatgttgtcgcatttatttggaaacaccctgtattgatgaagaagcattgctagttgttgaagtgcctaacttttttattatccacataggtgaattagtcaaaaagcgtaatgttaagaaagcctaaagccatggtttgttaggaacagtgagcgacgcacggcatacgggtacagcagaatctgttgtactcgacgcacggcagatttgagtaagtcggtttgttagcatattattctgtcttctgtcgatctcaaaatagtttgagtttgacgtttattctcacggagggtgtacgtagaaaaacaaattctgacacaatcaaggcaataattttattactcctagaaaaggaggaggaagaagagataataatattaaatttaaataaaagaaataaaaatgtaaactaaatgttttcatgtcgtaatacagaaggtgcatttatattaatagtcaaaagaaaattgtttcagaacgagaaaaaatttcgagaatattttagaatttccagatatttatttgaaaatgtattaccatttataagggataatattactaaaaaaccctacaacagaagacaacatccgatttctggagaagaaaaattaagcataactttgaattaggttttttttttatttagagaaaaaataaaaatatgtgtttaagtaaaaaacagaaaacttcttaaaaatgtaaagtatattataattgtatcttacatttctacattgttattaattgattctggcgaaaattcaaacaaatgagatcctacatttatttccaaagaatttcacaagaattatttgttgtaataggaaccaattcatgtacctaattcatttgcagccagctcaatttcatatcgccaaacaatatgcattacttcagcttttattcttgccttttcaatcgtaggaaatctcgatactgtggaagcaacactttaaaaaaacatgtggatcacctgatttttgagccaatgtcgattatgtttccgactttttaacaagtttttcaatcaaagcggttcgttcctctcgtcccatttttaattcgctcgttaatgagaaatttctgtttttgacatttactttttttttcggtgctcacaatatagtattataaaagtgtaaaaagagtaataaatcgtctaatacaatagtaatagaaattagatgttgggttcctgtgaggcacatggtgtctttgaaacgcactactgaaagggaaaggtttatagtgggtactttttgttaaatgcaagctgcttttctctttgaatatttccccaaataattgacctgaaaacaggtcaattgacagagaactacgtacatatttaaaaatacgcgaatagaataataaaaaatgagatattcaaagcatactttaaaatagggatcagggataatggcaagacaaaattgtgccatttgttgaataataacgatacactttattttgtacaaacgtagttttattataatgcatgcttcagtttaataaataatagaaataataccaattaatctaaatagcaattaaatactaataatatcaatttaatacaagtgactttttcatttactttgtgcaattaaaaatatgtcaaatcatgcaaacttatttttgtttgaataaaattagtttacatcaccacgttgtacactgtgagttcagctgaacgtttgcgtccaaatcaaatcgcagttgattccagcgcacaccgtcgacgtatgtacactgctgtcggtcttcagagcgcgcagctaagcagaacctaacaatccgttaacatacagaagccattcctttgatttggactgacgtgcgcggcgttcgactgactgtgagttgtgcgtcgctcactgttctaacaaaccgtggcttaaggctacagttgggttttaattttaatattttatgtgtgctggagttttccacagggtgttccaaactttgaggaggagacacgctatcatttttacgcccggtgtacaatgacacttgcctttttggtaatgaattattacattgatattcttgaagaatagagctgtagtatactgggaaaatcactcaaatcggacagcagatttgggaaatacgaggcatcggaaatgtctcatttttgaggtggtgcgttaattttgattgaatttggtgcgaatatttaagaattgataaaaaaacatatttgaatttgcttgatttagtcacacctataattatcaaacaaaatacacagctatatgacatgccaactagcaactacacagttttagtttgaatgtacaattttaactgaacagttttatctaatgaaatttcaattcatttgtcaattgaactgtacagtcttcagttttgcctacacacataagttttaactgaatagttcgattgtttagttgaaactgtgcagttcaaactaaaggtgtgaagcggcctttagcggaactgaattgaaaattatttcgcacattacagggtgtaacaaaaatgcaggtcataaatttgatcacatgttctgggacccaaagtggtttgattgagcctaacttgccttagtacaaatgtgcacataaggggagttgcggccctttgaagttgcaggaaaatcgattttttccaatatatcgaggactattggagatcttttgttgaaagtggacatgtggcattcttatggtagtagtatcttgtgaaagattatagtgaagtttgggcaccccatagacatttttgagggttttgttcttttatacccccccaaacttttgtgtacgttccaatttaattgttgttgtggtaccattagctaaatacaatattttaaaagcttttttgcctcttagtactttttccaaacgtcagtttttatcgagatattttgaatatttgtcaaatccaccacatatttgtatatggctaagtacgattatggagacttggtaataatatgaaaatttatttatgatttacatttttaggtatattttgaaccatattataaaagaagtaatatcttgataaaaagtgccttctcgaaaaaatacaaaaaggcaaaaaagttataaaacactgtgtttaactgatggtaccgcagtaaaagcttaattggagcgtacacagacatttggggggtttaagggaacaaaacccccataaaaattttatgtaaacatattaaaaaagaagcc

SEQ ID NO: 347 - DNA, 6625 bp, Diabrotica virgifera
  SmartBlast Evalue=3E-61; Info=Ubiquitin-conjugating enzyme E2 variant 2 n=4 Tax=Apocrita RepID=E2AGB3_9HYME
aagtgttaactctatctctattctggaaagaattagtcctcacatcttttgtatttaagttgagggaaaaaggtgatttttgatatccaaagagccccgctttgttaatcaatagtaggggataagatttcaatcatccataatattcgaaaatattcaaaatacacttttaaaaattttaagtttgtgagtattttgtaatggcgaccccatcaactggtgttgttgtgcctcgaaactttcgactacttgaagaactagaagccggtcaaaagggtgtttcagatggtactattagctggggcttagaaaatgatgatgatatgacacttacacattggatggggatgataatcgggccccctcgtacaccgtatgaaaataggatgtattctgttaaaattgaatgtggccaaaggtatcctgatgatgcacctactgcaaagtttatctctagaatcaatataaactgtataaacagtaacacaggggtggtcgataacagacaagtcccaatattggctaggtggcaaagggattacactattaaaacggttttgcaagaattacgaagaataatgacacttaaagagaacatgaagctaacacagcctcctgaaggcacttgcttctagcctttgaatcagcataacactcccccagtatcttctgttacaacttgtccattgagtgtcgatacctgcaccacgcaatcatgctgtcttctgtagcggattcaccttactcacaaactatctatggggtgtcttgaactggttcttggaagataacctgtctggtaatgaggacaaactggtgtatttaggttaaggtgtctaatgataagagtattttttaatattactgcttgtacaacttgtttaactctattagaggatgactcatgatcgaacttgtatttttgtaggaaacaaaaagtaatgttgatgtcaattataataaaccatctatgacgcatctcgtatttcaataaaattgaatgaataggcgtttgacacaatattgttcttgtataacccaaagttttaagaatgggtggtcacgattcattcgatatactagatttttgggttgattaaccacttatttgtttttgtatattctactgggcagtagttgacaatttatcggaactgtatttttaaacttttactagtattcactcactttgtgtacgtttttataccaaagatgaaattgtcaactgctgtggtatgaaaaaaatcaatttatgcttaaatacatgttacgctttattatggagaatcagcttcgaaaatctaaaattctaaaagacatttattgaataactacaaggttgtattgatatttagacattttttgaatgtcgtgtgtgtttataaagaagttatcctttattttgtagtagtttcggacaccccttttaacagtcagagagtagatatctatttgtatatcattgattacatatatcataaacattatctaaatcattattttttttgaaaacacagaaattaaaagtaaaggtagaatacaccattttaaaatttgacaatgttatctcaatacattattacattctcaatattcacacacacgcttcactagcactcataggtatttagcatctccttgtttgctgtcataccttggttttacatttaaaacttatatgagaaaagtgatacttagatgagactttactttataagtttaacttttttctttaaagtcttgagtctgatgaaagaatgagtagagatctacactctgatgacccaagttgtaacaaagatggctaaggtgtacagctttataagctatgtagttaagttaacattttagctaaagttattaggttgaaataagtttatatacagtaccagagcatatattccatatatagcagcttatagaaaggtaggaggaactgctaaaaactttgtttgccttaccaatagttttaataatcgagttttaagtcgagatattcacgcaggtggtctaaaatgcccaaatgttatttattatagagtaagcgccactctactagatacattggtaggtacctagttggtatgattattggctaatctggtccgttctcagatgtgactttcatccctgtcatgttactgtcatgaaactattcaaaataattgtttttccatacaaaagaatacattaattaatagtattgttactctgctttaaaataactttattcaagcaccaagcaatattacaatactttaaaactattacaactttaacaaaatgacaactataaacgtcaaacacagctgatctattatttgtcaactttttatgttaatatagggcattccaacatgctgtcaaaagtcaatatgacgactgggaggcaaacataaatgttattctatcagttcttaatttgttttagataattttagttgcgtttctttgtaattttgtttttaaaagaattgatttgacattctcactagaagaattaatctaaaaagataatatgcctaatttctgttgtgttttgaaatgtggaatacgaaattcatgatgaagttcagttttatcggttactatcagtggtatattttaagcgtaaacacgtgtaaaacaactaaataagttatcatctgagagacaaaaacaaacaactaaataagttatgatctgggagacaaaaacaatggttaaatgctacaaaacgtcctataaaatgctaaataattatttccatgttacttacgcttggaaaacgtctaaaccatgtgttctcaaacccctcgaggaaaagtggacctatattatttattttgtcaatcttttgcttgtacctaccactgtgcgtctaggtacctactaacaacattatgtattgtctaccaagaatttatatgcactcatgtttatttattcactgcttaaaaccaaataaagtcgttcaggtacttctacaactaaaaactacacaaaatctacaacaaaatgttcagaaaatacaacttaaaactgttaatacatgtgctgcaaatattataaacagacacaatgtttgacagtttgcctcccaaacgtcagtcttgaaatgccctattcagtttctatacattttctgacgttctaaacgtcactggacatacaaataaacattgcaacaagtgaagggtccaggactataatagctcaatgttcctatggatctagtagggtggcggtggttactgtatagcaatattacagtatttctcatgatcatttttcagtgcgtaacaaatgataggaaaaagggtaagtccgtgataatacacatttatgacatttattctaacatgacattttagttaaatctgacagttgtcacattttattttcaatttggaataaaaacaaatcaaaagtgtttcttgcatttataaaatggtattttctttgatttgtatagtcttataaattatacagattatatttgtaatattattatctaatttaaaaaaaaatttttattatggcgccatctatcgacaactagaataactagaataaatgttataaaaatgtcaccgacgaaatgtaatcaccgacgtgcctttttttctgtcacatacaatttaatgcgttagaaagaaatcgaaaaactgtgacgcactgaaagatgatcatgagaaatactgtataatctgaatttacataatatatcgtattcctaaagtcgaaaatgtaatttttcgactttgggatcggttatttcgaatttggtttgagatatcaaactcgcaagatgatattccttcttcttcttaaagtgcccatccgttctggatgttggcgatcatcatggctatcttgactttgtttaccacagcgcgaaatagttcagcggtagtcgtgttataccactttcgtaaattttgaagccaggaaatgcgtcttcttcccggtcctcttttaccatccgttggagaaggccgtagcatttctcattacatgtcctagatattctaattttttcgttatgatggtcatgagaatttcacactctttccccattctacgcagtacttctacattagtaattcggtcaacccaggatatacgtaagatgcgcctataacaccacatttcgaaagcttcggaccgattcatagatgcaacagttagtgtccacgcttccattccgtagagcagaactgtaaatatgtatcatttcaacagacggtattttgtttttaatgatatgtctagactctagactattgaaaaagggtctcattccaacgaatgctgcttttgcttttattattcactgtttaatttctgttgagtgggtccattggctatttaaattggtgcctagatatgtatattgctccactctttcaatattctgttgtttgattgtaagttgagtgtttagtatgattttcctaaactaggtaaaaaacacattgatttgatacctatatcatatgccataaatcaaaaattcgattttttgactttgaggtcggttgatatcgaaatggtttttaaatttggattcaggagacaaactgcataagaatccatcgtagatcgactcacaagtatttcaggggcggcgatgtacaaacgaacgaatcaacgaacagactttgcgaatttatatacgaaaacgaagttttcgttgaaaataaatgaattcatcgattaagctgtccttagtagcaaagtaatgtaaagcatgtagtgctatcaaacgctgtattgcgtatgccagtggcggctcgtatcactttaagtaggtagtgccagaattcgggcagctgcctaaatttttagtgacgggttcacaatattgtcaaaaaaggtataaaatagaaattaaaaaaaataggtacggatatttttacattatgtaggtatataccatttctggggtgtcaagaaatttaaacatttaaaatgcattcagtgattgatttgacatcatgtccgtccaacaagtaaaatctccaaaatctctcaacttatcgccctttacacaaatatcggaaaactataactaactgaaattcaccagcgacgcgacgtctgtcgtttcatcggcaatcactgcaacacaaagataattttcaatttctttccttatttcctcgtgataaacatctaagatgcactgaaggagttcattttgtgttgttttgaggtacatgcttttaaagatttggaactttgaatatgaaccgaagtcgttgtctaattcggctaacattgaacagttccataaagatgcctctattttctgaattttccttttcgtcgtgatttctcaaaactaactcgaaactccacaaaaccatatagatataatttttaatttgattcaaaacatatcgattcttatccacttcttgttcattgtgtttaattagactatcacgataagctgaatttaactcgggttttattaaaattaaaaattttaaattacttaaaaatataatagtttataataaaaagtttaatcattaaaaatgtaataattataaatacaaaaacgagcgagcgagcgcgtaaaaaaactcgaaaagataatgtaggtactaccctgtacgagaagctttttggatctgatctacgatccactattcactatgatgagcatagtaaaaaatattagatcttcctgccttgtcgagccaggcacgaatagtttcatttaaacgtgtattaaaagtgcaatatagctctatctctgtcacttacatagaatgcccgtaaaatctttctcttttcagccgagccatctaagatttcggcacgatcatcccggccgctgtgagtggcgacggttgtattacactacacagttgccagattttatataatttataaagagaaaagaaatacgcacaaacaaatgaacgggcattaagacggtttaatgataaaaaaatatgtttctgcataaaaataagatagtgccatgactccatggcactacctcaccggccgccactgacttatacaggtagtcttcggtctgcttttctttttttccgggggttgccattccactctcggctttgggagtcgatgtttctccattctttttacattgccactccaacaaagttgtttttcctggatttcttctattatgtttgttttcctattcattgtatatcgtactcgttcattcgttatgtgtgagactctagagatgcaggccgatcttcgccagaagtccatttccagtgcgagcaacttatgttccgttcccttattctccatatatttatatccatatagtaccacactttttaagatgctattatatagctgtgttttcttttcttctgatatggttttttgaccaaagtagtgagttcaaagctcctattattcttccctttcataattctttcctctatttcgaattctgcccttccaatttgttgaattctctttccaacatatacataatcagagctttgttcgataaccatatcatcctctagttgtgactcatttttctctcctcctatactcatatatttggctttaggccccattttttgtattctcgtaacagccggtttgtcataaatattagatcatctttaccctgggc

SEQ ID NO: 348 - DNA, 5729 bp, Diabrotica virgifera
  SmartBlast Evalue=2E-42; Info=27 kDa hemolymph protein n=1 Tax= Harpegnathos saltator RepID=E2C9D0_9HYME
tgctgtcgaggtgtaagtacgtgtagttttacaatttttgttcaggagtgagaagtggaacttttcttttaaatttttgctgtttaatttaatacctagtatcaaaatgaatattattcaacgagctgtgatatttttcatcgtaatagtatgtatccagtgccaatcatcattaaatgacctagatgctgacaaaataaaaagtaaaatagagaaaggtctaggagatttaaacatagacattccagatgtagatttaaattctacgagtatgccaaatgcagaggatatagaaaaagtgcttagagaaaaatgcgagaagaatggagcaactgacgcagtagatttgataaaggaagaacaagaaaacgctcgtatttgcatagaaaaatacgttaattttacaaccatagaagaggaactggaagagaagaaaaagacaggttctatggatgaagtattctcaaaatactgtaagaaatggccagatattaagggatgtttcgataaggccgtttctatttcaagatcgtgtatggataaaaaagaagaagacgcctttaatagaacgctggatattataaacgatttgcaagaatttatgtgttacaaggatggagatagattagccatgtttgttgctgaaggtggcgtcgaatgtatgtcagagagaaaagatggtgtacaagaatgtgtaaataaaacccttggctcaagaatccctgatgcagatgatctttctgttacaaatttaccagttatgctttttacggatagagattgcgatgatttcgaagaagtcagagaatgtgttaaccatgaactagagaagtgcaaggatagtacccccgcaaacatcgtggacgcattcttcaaattcttaaagaaacaactaccttgtaaaggaagtctagcacagaagagcaccaaaccaaattcagcttgggccatatctagcagttcgatacttttggctatttcctttttgtacgtcaggctgtattaaactttttaaatttttacagtgggtgagcggataattcttacgcatctacagttactatgccataactataattttttatcagtagtgagatttacgtttagtaaatatattctgaagcattgagttctttatatatagttgtgagaacttattatctgcacaaagaaaacatttaaacaattaaattttttatttaagattgaaattaggcaaataggtatatcaaacctataacaaagtgaaaggattaaatccaaaaacaagctgagaatacgagcattatcataacggaaattttgtttacggttagcaaaaatcatctctatattactatatttaaatgcaatatatgtctaacctgaatttacataatatatcgtattcctaaagtcgaaaatgtaatttttcgactttgggattggttatttcgaatttggttcgagatatcgaattcgcaagatgatattccttcttcttcttaaagtgcctatccgttctggatgttggcgatcatcatggctatcttgactctgtttaccagagcgcggaatagttcagcggtattcgtgttataccactttcgtaaattttgaagctaggaaatgcgtcttcttcccggtcctcttttaccatctgttggagaaggtcgtagcattcttgatttctcattacatgtcctagatattctaattttttcgttatgatggtcatgagaatttcacactctttccccattttacgcagtacttctacattagtaattcggtcaacccaggatatacgtaagatgcgcctataacaccacatttcgaaagcttcggaccgattcatagatgcaacagttagtgtccacgcttccattccgtaaagcagaactgtgaacatgtagcatttcaacagacggtattttgtttttaatgatatgtctagactattgaaaatgggtctcattctaacgaatgctgcttttgcttttattattcactgtttaatttctgttgagtggtcccattggctatttaaattggtgcctagatatgtatatggctacactctttcaatattctgttgtttgattgtaagttgagcgtttagtatgattttcctaaactaggtaaaaaacacattgatttgatacctatatcatatgcaataaatcaaaaattcgattttttgactttgaggtcggttgatatcgaaatggtttttaaatttggattcaggagacaaactgcataagaatccatcgtagatcgactcacaagtatttcaggggcggcgatgtacaaacgaacgaatcaacgaacagactttgcgaatttatatacgaaaacgaagttttcgttgaaaataaatgaattcatcgattaagctgtccttagtagcaaagtaatgtaaagcatgtagtgctatcaaacgctgtattgcgtatgccagtggcggctcgtatcactttaagtaggtagtgccagaattcgggcagctgcctaaatttttagtgacgggttcacaatattgtcaaaaaaggtataaaatagaaattaaaaaaaataggtacggatatttttacattatgtaggtatataccatttctggggtgtcaagaaatttaaacatttaaaatgcattcagtgattgatttgacatcatgtccgtccaacaagtaaaatctccaaaatctctcaacttatcgccctttacacaaatatcggaaaactataactaactgaaattcaccagcgacgcgacgtctgtcgtttcatcggcaatcactgcaacacaaagataattttcaatttctttccttatttcctcgtgataaacatctaagatgcactgaaggagttcattttgtgttgttttgaggtacatgcttttaaagatttggaactttgaatatgaaccgaagtcgttgtctaattcggctaacattgaacagttccataaagatgcctctattttctgaattttccttttcgtcgtgatttctcaaaactaactcgaaactccacaaaaccatatagatataatttttaatttgattcaaaacatatcgattcttatccacttcttgttcattgtgtttaattagactatcacgataagctgaatttaactcgggttttattaaaattaaaaattttaaattacttaaaaatataatagtttataataaaaagtttaatcattatgtaataaatacaaaaacgagcgagcgagcgcataaaaaaactggaaaatataatgtactaccctgtacgagaatctttttggatctacgatccactattcactcactattcactatgatgagcatagtaaaaaatattagatcttccttgtccttgtcgagcatcttgttgagccaggcacgaatagtctcatttaaacgtgtattaaaagtgcaatatagctctacctctgtcacttatatagaatgcccgtaaaatctttctcttttcagccgagccatctaagcttttggcacgatgcgatcatcccgtccgctgtctgtgagtggcgagggttgtactacactgcacagttgccagattttatataatttataaagagaaaagaaatacgcacaaaaaatgaacgggcattaaaacggtttaaagataaaaaaaaaatatgtttctgcataaaaataaggtagtgtcatggcactacctcaccggccgccactggcgtatgcagaatatttcaaataaactaaaattccagaatttcgttctgcattatacaaaacttgatttatgtttatataaattataaacatgtaaattttggtgctattaaattaagtgtaaaattattaggcatggtaaagttataaaaaaataaccaaatcttttgtttgttaaaattcttagaagtaacaagttaattaactatttaaagttattaataaacaattagaaggtaaagtgaaataaaaccacttctaattcgatttctatgaaaaaagtcaatatatgtggaaaaatttaaaatttcttcaatactgtttccttggtttttacgctaccaaaatacgtttgatttatcgagtcacatcgaaactatcaatgtattaataaatttgtaatgttcattagtcatttaatattaaaatttttaggattacatgtcattattgcgtaatatagttttgcatttcaaagctagtcctattgaactggattctacttgttaggaaaaaagaaatgattagaaatttcataaatcttttacaattttcaatattccatgaatgtctttttgctgtttcaaaatttcatttaaatcaaatttcaagacaatctatatttgctttatagctgcctttagttattaaatttgtactatattcctgatccgataaaattggtggtagataaagattgatttttaacattattaggtttgggctaagtatctactagtctgggtatgtctagcgttacaatgtataacgtatagtgcgaataacgtgcgcaaaatggcgattttcgctaagagttacctaaggcccgtccggcgaaacgatcggattttctgtattcattcagtggcgtattttcaagaagttagttaatatattattatgtgtctttatgtaaattttagaatggcttctttatttttgattcaaataatggatatgttaaatgatttattagtcgattaaaaatacgctataacctagaccagaggttctcaatctttttgagtcaggtaccaccaaatactttttattatttttggtaccacctaactaaaatacctgtctagctaggtgatctaattaactataattgtgccaatggtggtgctgattttggctgttttgactttgcgtaccacctcaaataatgaaatgtaccaccagtggtacatgtaccagagattgagaaccgctgacctagaccttaagatatataaaattattgttaatttgtccgttaacattttgctatttaataagggccggcgtagctcaggctgtaggatatctgactcgcatgctggtaggccggggttcgaaacccgcgccggcgagaacatctagacatttttaaaaatgtctataggccccaggtcgactcagcctgaataaaattagtactttgggtaaaaccaggggtaataataggcggttgaagcgtagcactgaccctgttacctttcttgtataccgtaggcactagatatagcagactaccctgctataatcccaaagccgctttagcggtataaaacgggagactattataataacagatacagataatagatttttttttaattactgtgatgcatgctgtattctttcagtttcggctcaggaaatattatttgttaacttcctcagaaattgtgtgcagataataagttaatacaatctaaccccaatttttaatatacacaggaatcgacacgtttttttatattatttcataaaaatttttacacacctacttaaaacgagtcttttaatagtgaattagtgatgctgccaaatatttatgaacccaatttatcaaacttaatgttgtacttaggttacatcataatcttaattgtgaacactgactacatatcccttaaatgtaactttatcagtctttccattttttactactgatatacccttgtctatgtcaaaaaatagtataaacttgtgatatatgaaatatagtaattttggattttaatatatttataaatgttcttaaga

SEQ ID NO: 349 - DNA, 5723 bp, Diabrotica virgifera
  SmartBlast Evalue=2E-42; Info=27 kDa hemolymph protein n=1 Tax= Harpegnathos saltator RepID=E2C9D0_9HYME
tgctgtcgaggtgtaagtacgtgtagttttacaatttttgttcaggagtgagaagtggaacttttcttttaaatttttgctgtttaatttaatacctagtatcaaaatgaatattattcaacgagctgtgatatttttcatcgtaatagtatgtatccagtgccaatcatcattaaatgacctagatgctgacaaaataaaaagtaaaatagagaaaggtctaggagatttaaacatagacattccagatgtagatttaaattctacgagtatgccaaatgcagaggatatagaaaaagtgcttagagaaaaatgcgagaagaatggagcaactgacgcagtagatttgataaaggaagaacaagaaaacgctcgtatttgcatagaaaaatacgttaattttacaaccatagaagaggaactggaagagaagaaaaagacaggttctatggatgaagtattctcaaaatactgtaagaaatggccagatattaagggatgtttcgataaggccgtttctatttcaagatcgtgtatggataaaaaagaagaagacgcctttaatagaacgctggatattataaacgatttgcaagaatttatgtgttacaaggatggagatagattagccatgtttgttgctgaaggtggcgtcgaatgtatgtcagagagaaaagatggtgtacaagaatgtgtaaataaaacccttggctcaagaatccctgatgcagatgatctttctgttacaaatttaccagttatgctttttacggatagagattgcgatgatttcgaagaagtcagagaatgtgttaaccatgaactagagaagtgcaaggatagtacccccgcaaacatcgtggacgcattcttcaaattcttaaagaaacaactaccttgtaaaggaagtctagcacagaagagcaccaaaccaaattcagcttgggccatatctagcagttcgatacttttggctatttcctttttgtacgtcaggctgtattaaactttttaaatttttacagtgggtgagcggataattcttacgcatctacagttactatgccataactataattttttatcagtagtgagatttacgtttagtaaatatattctgaagcattgagttctttatatatagttgtgagaacttattatctgcacaaagaaaacatttaaacaattaaattttttatttaagattgaaattaggcaaataggtatatcaaacctataacaaagtgaaaggattaaatccaaaaacaagctgagaatacgagcattatcataacggaaattttgtttacggttagcaaaaatcatctctatattactatatttaaatgcaatatatgtctaacctgaatttacataatatatcgtattcctaaagtcgaaaatgtaatttttcgactttgggattggttatttcgaatttggttcgagatatcgaattcgcaagatgatattccttcttcttcttaaagtgcctatccgttctggatgttggcgatcatcatggctatcttgactctgtttaccagagcgcggaatagttcagcggtattcgtgttataccactttcgtaaattttgaagctaggaaatgcgtcttcttcccggtcctcttttaccatctgttggagaaggtcgtagcattcttgatttctcattacatgtcctagatattctaattttttcgttatgatggtcatgagaatttcacactctttccccattttacgcagtacttctacattagtaattcggtcaacccaggatatacgtaagatgcgcctataacaccacatttcgaaagcttcggaccgattcatagatgcaacagttagtgtccacgcttccattccgtaaagcagaactgtgaacatgtagcatttcaacagacggtattttgtttttaatgatatgtctagactattgaaaatgggtctcattctaacgaatgctgcttttgcttttattattcactgtttaatttctgttgagtggtcccattggctatttaaattggtgcctagatatgtatatggctacactctttcaatattctgttgtttgattgtaagttgagcgtttagtatgattttcctaaactaggtaaaaaacacattgatttgatacctatatcatatgcaataaatcaaaaattcgattttttgactttgaggtcggttgatatcgaaatggtttttaaatttggattcaggagacaaactgcataagaatccatcgtagatcgactcacaagtatttcaggggcggcgatgtacaaacgaacgaatcaacgaacagactttgcgaatttatatacgaaaacgaagttttcgttgaaaataaatgaattcatcgattaagctgtccttagtagcaaagtaatgtaaagcatgtagtgctatcaaacgctgtattgcgtatgccagtggcggctcgtatcactttaagtaggtagtgccagaattcgggcagctgcctaaatttttagtgacgggttcacaatattgtcaaaaaaggtataaaatagaaattaaaaaaaataggtacggatatttttacattatgtaggtatataccatttctggggtgtcaagaaatttaaacatttaaaatgcattcagtgattgatttgacatcatgtccgtccaacaagtaaaatctccaaaatctctcaacttatcgccctttacacaaatatcggaaaactataactaactgaaattcaccagcgacgcgacgtctgtcgtttcatcggcaatcactgcaacacaaagataattttcaatttctttccttatttcctcgtgataaacatctaagatgcactgaaggagttcattttgtgttgttttgaggtacatgcttttaaagatttggaactttgaatatgaaccgaagtcgttgtctaattcggctaacattgaacagttccataaagatgcctctattttctgaattttccttttcgtcgtgatttctcaaaactaactcgaaactccacaaaaccatatagatataatttttaatttgattcaaaacatatcgattcttatccacttcttgttcattgtgtttaattagactatcacgataagctgaatttaactcgggttttattaaaattaaaaattttaaattacttaaaaatataatagtttataataaaaagtttaatcattaaaaatgtaataattataaatacaaaaacgagcgagcgagcgcgtaaaaaaactcgaaaagataatgtaggtactaccctgtacgagaagctttttggatctgatctacgatccactattcactatgatgagcatagtaaaaaatattagatcttcctgccttgtcgagccaggcacgaatagtttcatttaaacgtgtattaaaagtgcaatatagctctatctctgtcacttacatagaatgcccgtaaaatctttctcttttcagccgagccatctaagcttttggcacgatgcgatcatcccgtccgctgtctgtgagtggcgagggttgtactacactgcacagttgccagattttatataatttataaagagaaaagaaatacgcacaaaaaatgaacgggcattaaaacggtttaaagataaaaaaaaaatatgtttctgcataaaaataaggtagtgtcatggcactacctcaccggccgccactggcgtatgcagaatatttcaaataaactaaaattccagaatttcgttctgcattatacaaaacttgatttatgtttatataaattataaacatgtaaattttggtgctattaaattaagtgtaaaattattaggcatggtaaagttataaaaaaataaccaaatcttttgtttgttaaaattcttagaagtaacaagttaattaactatttaaagttattaataaacaattagaaggtaaagtgaaataaaaccacttctaattcgatttctatgaaaaaagtcaatatatgtggaaaaatttaaaatttcttcaatactgtttccttggtttttacgctaccaaaatacgtttgatttatcgagtcacatcgaaactatcaatgtattaataaatttgtaatgttcattagtcatttaatattaaaatttttaggattacatgtcattattgcgtaatatagttttgcatttcaaagctagtcctattgaactggattctacttgttaggaaaaaagaaatgattagaaatttcataaatcttttacaattttcaatattccatgaatgtctttttgctgtttcaaaatttcatttaaatcaaatttcaagacaatctatatttgctttatagctgcctttagttattaaatttgtactatattcctgatccgataaaattggtggtagataaagattgatttttaacattattaggtttgggctaagtatctactagtctgggtatgtctagcgttacaatgtataacgtatagtgcgaataacgtgcgcaaaatggcgattttcgctaagagttacctaaggcccgtccggcgaaacgatcggattttctgtattcattcagtggcgtattttcaagaagttagttaatatattattatgtgtctttatgtaaattttagaatggcttctttatttttgattcaaataatggatatgttaaatgatttattagtcgattaaaaatacgctataacctagaccagaggttctcaatctttttgagtcaggtaccaccaaatactttttattatttttggtaccacctaactaaaatacctgtctagctaggtgatctaattaactataattgtgccaatggtggtgctgattttggctgttttgactttgcgtaccacctcaaataatgaaatgtaccaccagtggtacatgtaccagagattgagaaccgctgacctagaccttaagatatataaaattattgttaatttgtccgttaacattttgctatttaataagggccggcgtagctcaggctgtaggatatctgactcgcatgctggtaggccggggttcgaaacccgcgccggcgagaacatctagacatttttaaaaatgtctataggccccaggtcgactcagcctgaataaaattagtactttgggtaaaaccaggggtaataataggcggttgaagcgtagcactgaccctgttacctttcttgtataccgtaggcactagatatagcagactaccctgctataatcccaaagccgctttagcggtataaaacgggagactattataataacagatacagataatagatttttttttaattactgtgatgcatgctgtattctttcagtttcggctcaggaaatattatttgttaacttcctcagaaattgtgtgcagataataagttaatacaatctaaccccaatttttaatatacacaggaatcgacacgtttttttatattatttcataaaaatttttacacacctacttaaaacgagtcttttaatagtgaattagtgatgctgccaaatatttatgaacccaatttatcaaacttaatgttgtacttaggttacatcataatcttaattgtgaacactgactacatatcccttaaatgtaactttatcagtctttccattttttactactgatatacccttgtctatgtcaaaaaatagtataaacttgtgatatatgaaatatagtaattttggattttaatatatttataaatgttcttaaga

SEQ ID NO: 350 - DNA, 5702 bp, Diabrotica virgifera
  SmartBlast Evalue=2E-42; Info=27 kDa hemolymph protein n=1 Tax= Harpegnathos saltator RepID=E2C9D0_9HYME
tgctgtcgaggtgtaagtacgtgtagttttacaatttttgttcaggagtgagaagtggaacttttcttttaaatttttgctgtttaatttaatacctagtatcaaaatgaatattattcaacgagctgtgatatttttcatcgtaatagtatgtatccagtgccaatcatcattaaatgacctagatgctgacaaaataaaaagtaaaatagagaaaggtctaggagatttaaacatagacattccagatgtagatttaaattctacgagtatgccaaatgcagaggatatagaaaaagtgcttagagaaaaatgcgagaagaatggagcaactgacgcagtagatttgataaaggaagaacaagaaaacgctcgtatttgcatagaaaaatacgttaattttacaaccatagaagaggaactggaagagaagaaaaagacaggttctatggatgaagtattctcaaaatactgtaagaaatggccagatattaagggatgtttcgataaggccgtttctatttcaagatcgtgtatggataaaaaagaagaagacgcctttaatagaacgctggatattataaacgatttgcaagaatttatgtgttacaaggatggagatagattagccatgtttgttgctgaaggtggcgtcgaatgtatgtcagagagaaaagatggtgtacaagaatgtgtaaataaaacccttggctcaagaatccctgatgcagatgatctttctgttacaaatttaccagttatgctttttacggatagagattgcgatgatttcgaagaagtcagagaatgtgttaaccatgaactagagaagtgcaaggatagtacccccgcaaacatcgtggacgcattcttcaaattcttaaagaaacaactaccttgtaaaggaagtctagcacagaagagcaccaaaccaaattcagcttgggccatatctagcagttcgatacttttggctatttcctttttgtacgtcaggctgtattaaactttttaaatttttacagtgggtgagcggataattcttacgcatctacagttactatgccataactataattttttatcagtagtgagatttacgtttagtaaatatattctgaagcattgagttctttatatatagttgtgagaacttattatctgcacaaagaaaacatttaaacaattaaattttttatttaagattgaaattaggcaaataggtatatcaaacctataacaaagtgaaaggattaaatccaaaaacaagctgagaatacgagcattatcataacggaaattttgtttacggttagcaaaaatcatctctatattactatatttaaatgcaatatatgtctaacctgaatttacataatatatcgtattcctaaagtcgaaaatgtaatttttcgactttgggattggttatttcgaatttggttcgagatatcgaattcgcaagatgatattccttcttcttcttaaagtgcctatccgttctggatgttggcgatcatcatggctatcttgactctgtttaccagagcgcggaatagttcagcggtattcgtgttataccactttcgtaaattttgaagctaggaaatgcgtcttcttcccggtcctcttttaccatctgttggagaaggtcgtagcattcttgatttctcattacatgtcctagatattctaattttttcgttatgatggtcatgagaatttcacactctttccccattttacgcagtacttctacattagtaattcggtcaacccaggatatacgtaagatgcgcctataacaccacatttcgaaagcttcggaccgattcatagatgcaacagttagtgtccacgcttccattccgtaaagcagaactgtgaacatgtagcatttcaacagacggtattttgtttttaatgatatgtctagactattgaaaatgggtctcattctaacgaatgctgcttttgcttttattattcactgtttaatttctgttgagtggtcccattggctatttaaattggtgcctagatatgtatatggctacactctttcaatattctgttgtttgattgtaagttgagcgtttagtatgattttcctaaactaggtaaaaaacacattgatttgatacctatatcatatgcaataaatcaaaaattcgattttttgactttgaggtcggttgatatcgaaatggtttttaaatttggattcaggagacaaactgcataagaatccatcgtagatcgactcacaagtatttcaggggcggcgatgtacaaacgaacgaatcaacgaacagactttgcgaatttatatacgaaaacgaagttttcgttgaaaataaatgaattcatcgattaagctgtccttagtagcaaagtaatgtaaagcatgtagtgctatcaaacgctgtattgcgtatgccagtggcggctcgtatcactttaagtaggtagtgccagaattcgggcagctgcctaaatttttagtgacgggttcacaatattgtcaaaaaaggtataaaatagaaattaaaaaaaataggtacggatatttttacattatgtaggtatataccatttctggggtgtcaagaaatttaaacatttaaaatgcattcagtgattgatttgacatcatgtccgtccaacaagtaaaatctccaaaatctctcaacttatcgccctttacacaaatatcggaaaactataactaactgaaattcaccagcgacgcgacgtctgtcgtttcatcggcaatcactgcaacacaaagataattttcaatttctttccttatttcctcgtgataaacatctaagatgcactgaaggagttcattttgtgttgttttgaggtacatgcttttaaagatttggaactttgaatatgaaccgaagtcgttgtctaattcggctaacattgaacagttccataaagatgcctctattttctgaattttccttttcgtcgtgatttctcaaaactaactcgaaactccacaaaaccatatagatataatttttaatttgattcaaaacatatcgattcttatccacttcttgttcattgtgtttaattagactatcacgataagctgaatttaactcgggttttattaaaattaaaaattttaaattacttaaaaatataatagtttataataaaaagtttaatcattatgtaataaatacaaaaacgagcgagcgagcgcataaaaaaactggaaaatataatgtactaccctgtacgagaatctttttggatctacgatccactattcactcactattcactatgatgagcatagtaaaaaatattagatcttccttgtccttgtcgagcatcttgttgagccaggcacgaatagtctcatttaaacgtgtattaaaagtgcaatatagctctacctctgtcacttatatagaatgcccgtaaaatctttctcttttcagccgagccatctaagcttttggcacgatgcgatcatcccgtccgctgtgagtggcgaggattgtactacactgcacagttgccagattttatataatttataaagagaaaagaaatacgcacaaaaaatgaacgggcattaaaacggtttaaagataaaaaatatgtttctgcataaaaattctgcaccggccgccactggcgtatgcagaatatttcgattaaactaaaattccaaaatttcgttctgcattatgcaaaacttgatttatgtttatataaattataaacatgtaaattttggtgctattaaattaagtgtaaaattattaggcatggtaaagttataaaaaaataaccaaatcttttgtttgttaaaattcttagaagtaacaagttaattaactatttaaagttattaataaacaattagaaggtaaagtgaaataaaaccacttctaattcgatttctatgaaaaaagtcaatatatgtggaaaaatttaaaatttcttcaatactgtttccttggtttttacgctaccaaaatacgtttgatttatcgagtcacatcgaaactatcaatgtattaataaatttgtaatgttcattagtcatttaatattaaaatttttaggattacatgtcattattgcgtaatatagttttgcatttcaaagctagtcctattgaactggattctacttgttaggaaaaaagaaatgattagaaatttcataaatcttttacaattttcaatattccatgaatgtctttttgctgtttcaaaatttcatttaaatcaaatttcaagacaatctatatttgctttatagctgcctttagttattaaatttgtactatattcctgatccgataaaattggtggtagataaagattgatttttaacattattaggtttgggctaagtatctactagtctgggtatgtctagcgttacaatgtataacgtatagtgcgaataacgtgcgcaaaatggcgattttcgctaagagttacctaaggcccgtccggcgaaacgatcggattttctgtattcattcagtggcgtattttcaagaagttagttaatatattattatgtgtctttatgtaaattttagaatggcttctttatttttgattcaaataatggatatgttaaatgatttattagtcgattaaaaatacgctataacctagaccagaggttctcaatctttttgagtcaggtaccaccaaatactttttattatttttggtaccacctaactaaaatacctgtctagctaggtgatctaattaactataattgtgccaatggtggtgctgattttggctgttttgactttgcgtaccacctcaaataatgaaatgtaccaccagtggtacatgtaccagagattgagaaccgctgacctagaccttaagatatataaaattattgttaatttgtccgttaacattttgctatttaataagggccggcgtagctcaggctgtaggatatctgactcgcatgctggtaggccggggttcgaaacccgcgccggcgagaacatctagacatttttaaaaatgtctataggccccaggtcgactcagcctgaataaaattagtactttgggtaaaaccaggggtaataataggcggttgaagcgtagcactgaccctgttacctttcttgtataccgtaggcactagatatagcagactaccctgctataatcccaaagccgctttagcggtataaaacgggagactattataataacagatacagataatagatttttttttaattactgtgatgcatgctgtattctttcagtttcggctcaggaaatattatttgttaacttcctcagaaattgtgtgcagataataagttaatacaatctaaccccaatttttaatatacacaggaatcgacacgtttttttatattatttcataaaaatttttacacacctacttaaaacgagtcttttaatagtgaattagtgatgctgccaaatatttatgaacccaatttatcaaacttaatgttgtacttaggttacatcataatcttaattgtgaacactgactacatatcccttaaatgtaactttatcagtctttccattttttactactgatatacccttgtctatgtcaaaaaatagtataaacttgtgatatatgaaatatagtaattttggattttaatatatttataaatgttcttaaga

SEQ ID NO: 351 - DNA, 5696 bp, Diabrotica virgifera
  SmartBlast Evalue=2E-42; Info=27 kDa hemolymph protein n=1 Tax= Harpegnathos saltator RepID=E2C9D0_9HYME
tgctgtcgaggtgtaagtacgtgtagttttacaatttttgttcaggagtgagaagtggaacttttcttttaaatttttgctgtttaatttaatacctagtatcaaaatgaatattattcaacgagctgtgatatttttcatcgtaatagtatgtatccagtgccaatcatcattaaatgacctagatgctgacaaaataaaaagtaaaatagagaaaggtctaggagatttaaacatagacattccagatgtagatttaaattctacgagtatgccaaatgcagaggatatagaaaaagtgcttagagaaaaatgcgagaagaatggagcaactgacgcagtagatttgataaaggaagaacaagaaaacgctcgtatttgcatagaaaaatacgttaattttacaaccatagaagaggaactggaagagaagaaaaagacaggttctatggatgaagtattctcaaaatactgtaagaaatggccagatattaagggatgtttcgataaggccgtttctatttcaagatcgtgtatggataaaaaagaagaagacgcctttaatagaacgctggatattataaacgatttgcaagaatttatgtgttacaaggatggagatagattagccatgtttgttgctgaaggtggcgtcgaatgtatgtcagagagaaaagatggtgtacaagaatgtgtaaataaaacccttggctcaagaatccctgatgcagatgatctttctgttacaaatttaccagttatgctttttacggatagagattgcgatgatttcgaagaagtcagagaatgtgttaaccatgaactagagaagtgcaaggatagtacccccgcaaacatcgtggacgcattcttcaaattcttaaagaaacaactaccttgtaaaggaagtctagcacagaagagcaccaaaccaaattcagcttgggccatatctagcagttcgatacttttggctatttcctttttgtacgtcaggctgtattaaactttttaaatttttacagtgggtgagcggataattcttacgcatctacagttactatgccataactataattttttatcagtagtgagatttacgtttagtaaatatattctgaagcattgagttctttatatatagttgtgagaacttattatctgcacaaagaaaacatttaaacaattaaattttttatttaagattgaaattaggcaaataggtatatcaaacctataacaaagtgaaaggattaaatccaaaaacaagctgagaatacgagcattatcataacggaaattttgtttacggttagcaaaaatcatctctatattactatatttaaatgcaatatatgtctaacctgaatttacataatatatcgtattcctaaagtcgaaaatgtaatttttcgactttgggattggttatttcgaatttggttcgagatatcgaattcgcaagatgatattccttcttcttcttaaagtgcctatccgttctggatgttggcgatcatcatggctatcttgactctgtttaccagagcgcggaatagttcagcggtattcgtgttataccactttcgtaaattttgaagctaggaaatgcgtcttcttcccggtcctcttttaccatctgttggagaaggtcgtagcattcttgatttctcattacatgtcctagatattctaattttttcgttatgatggtcatgagaatttcacactctttccccattttacgcagtacttctacattagtaattcggtcaacccaggatatacgtaagatgcgcctataacaccacatttcgaaagcttcggaccgattcatagatgcaacagttagtgtccacgcttccattccgtaaagcagaactgtgaacatgtagcatttcaacagacggtattttgtttttaatgatatgtctagactattgaaaatgggtctcattctaacgaatgctgcttttgcttttattattcactgtttaatttctgttgagtggtcccattggctatttaaattggtgcctagatatgtatatggctacactctttcaatattctgttgtttgattgtaagttgagcgtttagtatgattttcctaaactaggtaaaaaacacattgatttgatacctatatcatatgcaataaatcaaaaattcgattttttgactttgaggtcggttgatatcgaaatggtttttaaatttggattcaggagacaaactgcataagaatccatcgtagatcgactcacaagtatttcaggggcggcgatgtacaaacgaacgaatcaacgaacagactttgcgaatttatatacgaaaacgaagttttcgttgaaaataaatgaattcatcgattaagctgtccttagtagcaaagtaatgtaaagcatgtagtgctatcaaacgctgtattgcgtatgccagtggcggctcgtatcactttaagtaggtagtgccagaattcgggcagctgcctaaatttttagtgacgggttcacaatattgtcaaaaaaggtataaaatagaaattaaaaaaaataggtacggatatttttacattatgtaggtatataccatttctggggtgtcaagaaatttaaacatttaaaatgcattcagtgattgatttgacatcatgtccgtccaacaagtaaaatctccaaaatctctcaacttatcgccctttacacaaatatcggaaaactataactaactgaaattcaccagcgacgcgacgtctgtcgtttcatcggcaatcactgcaacacaaagataattttcaatttctttccttatttcctcgtgataaacatctaagatgcactgaaggagttcattttgtgttgttttgaggtacatgcttttaaagatttggaactttgaatatgaaccgaagtcgttgtctaattcggctaacattgaacagttccataaagatgcctctattttctgaattttccttttcgtcgtgatttctcaaaactaactcgaaactccacaaaaccatatagatataatttttaatttgattcaaaacatatcgattcttatccacttcttgttcattgtgtttaattagactatcacgataagctgaatttaactcgggttttattaaaattaaaaattttaaattacttaaaaatataatagtttataataaaaagtttaatcattaaaaatgtaataattataaatacaaaaacgagcgagcgagcgcgtaaaaaaactcgaaaagataatgtaggtactaccctgtacgagaagctttttggatctgatctacgatccactattcactatgatgagcatagtaaaaaatattagatcttcctgccttgtcgagccaggcacgaatagtttcatttaaacgtgtattaaaagtgcaatatagctctatctctgtcacttacatagaatgcccgtaaaatctttctcttttcagccgagccatctaagcttttggcacgatgcgatcatcccgtccgctgtgagtggcgaggattgtactacactgcacagttgccagattttatataatttataaagagaaaagaaatacgcacaaaaaatgaacgggcattaaaacggtttaaagataaaaaatatgtttctgcataaaaattctgcaccggccgccactggcgtatgcagaatatttcgattaaactaaaattccaaaatttcgttctgcattatgcaaaacttgatttatgtttatataaattataaacatgtaaattttggtgctattaaattaagtgtaaaattattaggcatggtaaagttataaaaaaataaccaaatcttttgtttgttaaaattcttagaagtaacaagttaattaactatttaaagttattaataaacaattagaaggtaaagtgaaataaaaccacttctaattcgatttctatgaaaaaagtcaatatatgtggaaaaatttaaaatttcttcaatactgtttccttggtttttacgctaccaaaatacgtttgatttatcgagtcacatcgaaactatcaatgtattaataaatttgtaatgttcattagtcatttaatattaaaatttttaggattacatgtcattattgcgtaatatagttttgcatttcaaagctagtcctattgaactggattctacttgttaggaaaaaagaaatgattagaaatttcataaatcttttacaattttcaatattccatgaatgtctttttgctgtttcaaaatttcatttaaatcaaatttcaagacaatctatatttgctttatagctgcctttagttattaaatttgtactatattcctgatccgataaaattggtggtagataaagattgatttttaacattattaggtttgggctaagtatctactagtctgggtatgtctagcgttacaatgtataacgtatagtgcgaataacgtgcgcaaaatggcgattttcgctaagagttacctaaggcccgtccggcgaaacgatcggattttctgtattcattcagtggcgtattttcaagaagttagttaatatattattatgtgtctttatgtaaattttagaatggcttctttatttttgattcaaataatggatatgttaaatgatttattagtcgattaaaaatacgctataacctagaccagaggttctcaatctttttgagtcaggtaccaccaaatactttttattatttttggtaccacctaactaaaatacctgtctagctaggtgatctaattaactataattgtgccaatggtggtgctgattttggctgttttgactttgcgtaccacctcaaataatgaaatgtaccaccagtggtacatgtaccagagattgagaaccgctgacctagaccttaagatatataaaattattgttaatttgtccgttaacattttgctatttaataagggccggcgtagctcaggctgtaggatatctgactcgcatgctggtaggccggggttcgaaacccgcgccggcgagaacatctagacatttttaaaaatgtctataggccccaggtcgactcagcctgaataaaattagtactttgggtaaaaccaggggtaataataggcggttgaagcgtagcactgaccctgttacctttcttgtataccgtaggcactagatatagcagactaccctgctataatcccaaagccgctttagcggtataaaacgggagactattataataacagatacagataatagatttttttttaattactgtgatgcatgctgtattctttcagtttcggctcaggaaatattatttgttaacttcctcagaaattgtgtgcagataataagttaatacaatctaaccccaatttttaatatacacaggaatcgacacgtttttttatattatttcataaaaatttttacacacctacttaaaacgagtcttttaatagtgaattagtgatgctgccaaatatttatgaacccaatttatcaaacttaatgttgtacttaggttacatcataatcttaattgtgaacactgactacatatcccttaaatgtaactttatcagtctttccattttttactactgatatacccttgtctatgtcaaaaaatagtataaacttgtgatatatgaaatatagtaattttggattttaatatatttataaatgttcttaaga

SEQ ID NO: 352 - DNA, 5705 bp, Diabrotica virgifera
  SmartBlast Evalue=5E-27; Info=Endonuclease-reverse transcriptase n=1 Tax=Bombyx mori RepID=D5LB38_BOMMO
gcctgttatgtacgaatcatgacattcctgtctgatacagttagtcattattattatttcctggcgtataatattatagtttcttagtattttgtgtacatataagatatggcccgcaaatatcttactgaggccgagttacaggaaataattgttactgctagcgatttttatgatgatatagaagatgaaatagtatcagaaaacgataatgtattgttagatgaagatttaaatgctgaaaacattcattccaggtcatttttgacctggggtaattttttacccccgttggtcatccgtgtaacaaaaaaggttggtcatcggaaggttaaagcaatctcaagcttcaaccacagaatttagcggtgcaaaggcttgttacgatttttttttctcaccgagttaaataaaaataaatgactgttccattaacattaactgttccattaactgttttgttgcatgtataagcacatcaatattttcaaaatatgaatgaaaatgttcatcatcacgccaaaattttcttccaagatactgtgatgccattatattgttatttttggttttcgccaactacttatatgatttccaattaaagctggagaaggttttggtcaaatgtagcttgacaattattttataaattgcggatatcatcacattattttaaggtatccaacgatagctttatcgcattttgtattcatttttgaattatacaaaaacacattttgactaaaagcttcacgtctttttttgattacatttttgataatcttccacgtgcagaccaaagacaaacgaaaaagaaaattctcgtaaaagaatcaaatataagtacactttttggagtatatgtattataatttataactaattcactaatcaactattgtccttttcatgatcatttttcagtgcgtaacaaatgatatgaaaaagggtaagtccgtgataatacacatttatgacatttattctaacatgacattttagttaaatctgacagttgtcacattttattttcaatttggaataaaaacaaatcaaatgtgtttcttgcatttataaaatggtattttctttgatttgtatagtcttataaattatacagattatatttgtaatattattatctaattaaaaaaaatatttttttattatggcgccatctatcgacaactagaataactagaataaatgttataaaaatgtcaccgacgaaatgtaatcaccgacgtgcctttttttctgtcacatacaatttaatgcgttagaaagaaatcgaaaaactgtgacgcactgaaagatgatcatgagaaatactgtataatctgaatttacataatatatcgtattcctaaagtcgaaaatgtaatttttcgactttgggatcggttatttcgaatttggtttgagatatcaaactcgcaagatgatattccttcttcttcttaaagtgcccatccgttctggatgttggcgatcatcatggctatcttgactttgtttaccacagcgcgaaatagttcagcggtagtcgtgttataccactttcgtaaattttgaagccaggaaatgcgtcttcttcccggtcctcttttaccatccgttggagaaggccgtagcatttctcattacatgtcctagatattctaattttttcgttatgatggtcatgagaatttcacactctttccccattctacgcagtacttctacattagtaattcggtcaacccaggatatacgtaagatgcgcctataacaccacatttcgaaagcttcggaccgattcatagatgcaacagttagtgtccacgcttccattccgtagagcagaactgtaaatatgtatcatttcaacagacggtattttgtttttaatgatatgtctagactctagactattgaaaaagggtctcattccaacgaatgctgcttttgcttttattattcactgtttaatttctgttgagtgggtccattggctatttaaattggtgcctagatatgtatattgctccactctttcaatattctgttgtttgattgtaagttgagtgtttagtatgattttcctaaactaggtaaaaaacacattgatttgatacctatatcatatgccataaatcaaaaattcgattttttgactttgaggtcggttgatatcgaaatggtttttaaatttggattcaggagacaaactgcataagaatccatcgtagatcgactcacaagtatttcaggggcggcgatgtacaaacgaacgaatcaacgaacagactttgcgaatttatatacgaaaacgaagttttcgttgaaaataaatgaattcatcgattaagctgtccttagtagcaaagtaatgtaaagcatgtagtgctatcaaacgctgtattgcgtatgccagtggcggctcgtatcactttaagtaggtagtgccagaattcgggcagctgcctaaatttttagtgacgggttcacaatattgtcaaaaaaggtataaaatagaaattaaaaaaaataggtacggatatttttacattatgtaggtatataccatttctggggtgtcaagaaatttaaacatttaaaatgcattcagtgattgatttgacatcatgtccgtccaacaagtaaaatctccaaaatctctcaacttatcgccctttacacaaatatcggaaaactataactaactgaaattcaccagcgacgcgacgtctgtcgtttcatcggcaatcactgcaacacaaagataattttcaatttctttccttatttcctcgtgataaacatctaagatgcactgaaggagttcattttgtgttgttttgaggtacatgcttttaaagatttggaactttgaatatgaaccgaagtcgttgtctaattcggctaacattgaacagttccataaagatgcctctattttctgaattttccttttcgtcgtgatttctcaaaactaactcgaaactccacaaaaccatatagatataatttttaatttgattcaaaacatatcgattcttatccacttcttgttcattgtgtttaattagactatcacgataagctgaatttaactcgggttttattaaaattaaaaattttaaattacttaaaaatataatagtttataataaaaagtttaatcattatgtaataaatacaaaaacgagcgagcgagcgcataaaaaaactggaaaatataatgtactaccctgtacgagaatctttttggatctacgatccactattcactcactattcactatgatgagcatagtaaaaaatattagatcttccttgtccttgtcgagcatcttgttgagccaggcacgaatagtctcatttaaacgtgtattaaaagtgcaatatagctctacctctgtcacttatatagaatgcccgtaaaatctttctcttttcagccgagccatctaagcttttggcacgatgcgatcatcccgtccgctgtctgtgagtggcgagggttgtactacactgcacagttgccagattttatataatttataaagagaaaagaaatacgcacaaaaaatgaacgggcattaaaacggtttaaagataaaaaaaaaatatgtttctgcataaaaataaggtagtgtcatggcactacctcaccggccgccactggcgtatgcagaatatttcaaataaactaaaattccagaatttcgttctgcattatacaaaacttgatttatgtttatataaattataaacatgtaaattttggtgctattaaattaagtgtaaaattattaggcatggtaaagttataaaaaaataaccaaatcttttgtttgttaaaattcttagaagtaacaagttaattaactatttaaagttattaataaacaattagaaggtaaagtgaaataaaaccacttctaattcgatttctatgaaaaaagtcaatatatgtggaaaaatttaaaatttcttcaatactgtttccttggtttttacgctaccaaaatacgtttgatttatcgagtcacatcgaaactatcaatgtattaataaatttgtaatgttcattagtcatttaatattaaaatttttaggattacatgtcattattgcgtaatatagttttgcatttcaaagctagtcctattgaactggattctacttgttaggaaaaaagaaatgattagaaatttcataaatcttttacaattttcaatattccatgaatgtctttttgctgtttcaaaatttcatttaaatcaaatttcaagacaatctatatttgctttatagctgcctttagttattaaatttgtactatattcctgatccgataaaattggtggtagataaagattgatttttaacattattaggtttgggctaagtatctactagtctgggtatgtctagcgttacaatgtataacgtatagtgcgaataacgtgcgcaaaatggcgattttcgctaagagttacctaaggcccgtccggcgaaacgatcggattttctgtattcattcagtggcgtattttcaagaagttagttaatatattattatgtgtctttatgtaaattttagaatggcttctttatttttgattcaaataatggatatgttaaatgatttattagtcgattaaaaatacgctataacctagaccagaggttctcaatctttttgagtcaggtaccaccaaatactttttattatttttggtaccacctaactaaaatacctgtctagctaggtgatctaattaactataattgtgccaatggtggtgctgattttggctgttttgactttgcgtaccacctcaaataatgaaatgtaccaccagtggtacatgtaccagagattgagaaccgctgacctagaccttaagatatataaaattattgttaatttgtccgttaacattttgctatttaataagggccggcgtagctcaggctgtaggatatctgactcgcatgctggtaggccggggttcgaaacccgcgccggcgagaacatctagacatttttaaaaatgtctataggccccaggtcgactcagcctgaataaaattagtactttgggtaaaaccaggggtaataataggcggttgaagcgtagcactgaccctgttacctttcttgtataccgtaggcactagatatagcagactaccctgctataatcccaaagccgctttagcggtataaaacgggagactattataataacagatacagataatagatttttttttaattactgtgatgcatgctgtattctttcagtttcggctcaggaaatattatttgttaacttcctcagaaattgtgtgcagataataagttaatacaatctaaccccaatttttaatatacacaggaatcgacacgtttttttatattatttcataaaaatttttacacacctacttaaaacgagtcttttaatagtgaattagtgatgctgccaaatatttatgaacccaatttatcaaacttaatgttgtacttaggttacatcataatcttaattgtgaacactgactacatatcccttaaatgtaactttatcagtctttccattttttactactgatatacccttgtctatgtcaaaaaatagtataaacttgtgatatatgaaatatagtaattttggattttaatatatttataaatgttcttaaga

SEQ ID NO: 353 - DNA, 5699 bp, Diabrotica virgifera
  SmartBlast Evalue=5E-27; Info=Endonuclease-reverse transcriptase n=1 Tax=Bombyx mori RepID=D5LB38_BOMMO
gcctgttatgtacgaatcatgacattcctgtctgatacagttagtcattattattatttcctggcgtataatattatagtttcttagtattttgtgtacatataagatatggcccgcaaatatcttactgaggccgagttacaggaaataattgttactgctagcgatttttatgatgatatagaagatgaaatagtatcagaaaacgataatgtattgttagatgaagatttaaatgctgaaaacattcattccaggtcatttttgacctggggtaattttttacccccgttggtcatccgtgtaacaaaaaaggttggtcatcggaaggttaaagcaatctcaagcttcaaccacagaatttagcggtgcaaaggcttgttacgatttttttttctcaccgagttaaataaaaataaatgactgttccattaacattaactgttccattaactgttttgttgcatgtataagcacatcaatattttcaaaatatgaatgaaaatgttcatcatcacgccaaaattttcttccaagatactgtgatgccattatattgttatttttggttttcgccaactacttatatgatttccaattaaagctggagaaggttttggtcaaatgtagcttgacaattattttataaattgcggatatcatcacattattttaaggtatccaacgatagctttatcgcattttgtattcatttttgaattatacaaaaacacattttgactaaaagcttcacgtctttttttgattacatttttgataatcttccacgtgcagaccaaagacaaacgaaaaagaaaattctcgtaaaagaatcaaatataagtacactttttggagtatatgtattataatttataactaattcactaatcaactattgtccttttcatgatcatttttcagtgcgtaacaaatgatatgaaaaagggtaagtccgtgataatacacatttatgacatttattctaacatgacattttagttaaatctgacagttgtcacattttattttcaatttggaataaaaacaaatcaaatgtgtttcttgcatttataaaatggtattttctttgatttgtatagtcttataaattatacagattatatttgtaatattattatctaattaaaaaaaatatttttttattatggcgccatctatcgacaactagaataactagaataaatgttataaaaatgtcaccgacgaaatgtaatcaccgacgtgcctttttttctgtcacatacaatttaatgcgttagaaagaaatcgaaaaactgtgacgcactgaaagatgatcatgagaaatactgtataatctgaatttacataatatatcgtattcctaaagtcgaaaatgtaatttttcgactttgggatcggttatttcgaatttggtttgagatatcaaactcgcaagatgatattccttcttcttcttaaagtgcccatccgttctggatgttggcgatcatcatggctatcttgactttgtttaccacagcgcgaaatagttcagcggtagtcgtgttataccactttcgtaaattttgaagccaggaaatgcgtcttcttcccggtcctcttttaccatccgttggagaaggccgtagcatttctcattacatgtcctagatattctaattttttcgttatgatggtcatgagaatttcacactctttccccattctacgcagtacttctacattagtaattcggtcaacccaggatatacgtaagatgcgcctataacaccacatttcgaaagcttcggaccgattcatagatgcaacagttagtgtccacgcttccattccgtagagcagaactgtaaatatgtatcatttcaacagacggtattttgtttttaatgatatgtctagactctagactattgaaaaagggtctcattccaacgaatgctgcttttgcttttattattcactgtttaatttctgttgagtgggtccattggctatttaaattggtgcctagatatgtatattgctccactctttcaatattctgttgtttgattgtaagttgagtgtttagtatgattttcctaaactaggtaaaaaacacattgatttgatacctatatcatatgccataaatcaaaaattcgattttttgactttgaggtcggttgatatcgaaatggtttttaaatttggattcaggagacaaactgcataagaatccatcgtagatcgactcacaagtatttcaggggcggcgatgtacaaacgaacgaatcaacgaacagactttgcgaatttatatacgaaaacgaagttttcgttgaaaataaatgaattcatcgattaagctgtccttagtagcaaagtaatgtaaagcatgtagtgctatcaaacgctgtattgcgtatgccagtggcggctcgtatcactttaagtaggtagtgccagaattcgggcagctgcctaaatttttagtgacgggttcacaatattgtcaaaaaaggtataaaatagaaattaaaaaaaataggtacggatatttttacattatgtaggtatataccatttctggggtgtcaagaaatttaaacatttaaaatgcattcagtgattgatttgacatcatgtccgtccaacaagtaaaatctccaaaatctctcaacttatcgccctttacacaaatatcggaaaactataactaactgaaattcaccagcgacgcgacgtctgtcgtttcatcggcaatcactgcaacacaaagataattttcaatttctttccttatttcctcgtgataaacatctaagatgcactgaaggagttcattttgtgttgttttgaggtacatgcttttaaagatttggaactttgaatatgaaccgaagtcgttgtctaattcggctaacattgaacagttccataaagatgcctctattttctgaattttccttttcgtcgtgatttctcaaaactaactcgaaactccacaaaaccatatagatataatttttaatttgattcaaaacatatcgattcttatccacttcttgttcattgtgtttaattagactatcacgataagctgaatttaactcgggttttattaaaattaaaaattttaaattacttaaaaatataatagtttataataaaaagtttaatcattaaaaatgtaataattataaatacaaaaacgagcgagcgagcgcgtaaaaaaactcgaaaagataatgtaggtactaccctgtacgagaagctttttggatctgatctacgatccactattcactatgatgagcatagtaaaaaatattagatcttcctgccttgtcgagccaggcacgaatagtttcatttaaacgtgtattaaaagtgcaatatagctctatctctgtcacttacatagaatgcccgtaaaatctttctcttttcagccgagccatctaagcttttggcacgatgcgatcatcccgtccgctgtctgtgagtggcgagggttgtactacactgcacagttgccagattttatataatttataaagagaaaagaaatacgcacaaaaaatgaacgggcattaaaacggtttaaagataaaaaaaaaatatgtttctgcataaaaataaggtagtgtcatggcactacctcaccggccgccactggcgtatgcagaatatttcaaataaactaaaattccagaatttcgttctgcattatacaaaacttgatttatgtttatataaattataaacatgtaaattttggtgctattaaattaagtgtaaaattattaggcatggtaaagttataaaaaaataaccaaatcttttgtttgttaaaattcttagaagtaacaagttaattaactatttaaagttattaataaacaattagaaggtaaagtgaaataaaaccacttctaattcgatttctatgaaaaaagtcaatatatgtggaaaaatttaaaatttcttcaatactgtttccttggtttttacgctaccaaaatacgtttgatttatcgagtcacatcgaaactatcaatgtattaataaatttgtaatgttcattagtcatttaatattaaaatttttaggattacatgtcattattgcgtaatatagttttgcatttcaaagctagtcctattgaactggattctacttgttaggaaaaaagaaatgattagaaatttcataaatcttttacaattttcaatattccatgaatgtctttttgctgtttcaaaatttcatttaaatcaaatttcaagacaatctatatttgctttatagctgcctttagttattaaatttgtactatattcctgatccgataaaattggtggtagataaagattgatttttaacattattaggtttgggctaagtatctactagtctgggtatgtctagcgttacaatgtataacgtatagtgcgaataacgtgcgcaaaatggcgattttcgctaagagttacctaaggcccgtccggcgaaacgatcggattttctgtattcattcagtggcgtattttcaagaagttagttaatatattattatgtgtctttatgtaaattttagaatggcttctttatttttgattcaaataatggatatgttaaatgatttattagtcgattaaaaatacgctataacctagaccagaggttctcaatctttttgagtcaggtaccaccaaatactttttattatttttggtaccacctaactaaaatacctgtctagctaggtgatctaattaactataattgtgccaatggtggtgctgattttggctgttttgactttgcgtaccacctcaaataatgaaatgtaccaccagtggtacatgtaccagagattgagaaccgctgacctagaccttaagatatataaaattattgttaatttgtccgttaacattttgctatttaataagggccggcgtagctcaggctgtaggatatctgactcgcatgctggtaggccggggttcgaaacccgcgccggcgagaacatctagacatttttaaaaatgtctataggccccaggtcgactcagcctgaataaaattagtactttgggtaaaaccaggggtaataataggcggttgaagcgtagcactgaccctgttacctttcttgtataccgtaggcactagatatagcagactaccctgctataatcccaaagccgctttagcggtataaaacgggagactattataataacagatacagataatagatttttttttaattactgtgatgcatgctgtattctttcagtttcggctcaggaaatattatttgttaacttcctcagaaattgtgtgcagataataagttaatacaatctaaccccaatttttaatatacacaggaatcgacacgtttttttatattatttcataaaaatttttacacacctacttaaaacgagtcttttaatagtgaattagtgatgctgccaaatatttatgaacccaatttatcaaacttaatgttgtacttaggttacatcataatcttaattgtgaacactgactacatatcccttaaatgtaactttatcagtctttccattttttactactgatatacccttgtctatgtcaaaaaatagtataaacttgtgatatatgaaatatagtaattttggattttaatatatttataaatgttcttaaga

SEQ ID NO: 354 - DNA, 5678 bp, Diabrotica virgifera
  SmartBlast Evalue=5E-27; Info=Endonuclease-reverse transcriptase n=1 Tax=Bombyx mori RepID=D5LB38_BOMMO
gcctgttatgtacgaatcatgacattcctgtctgatacagttagtcattattattatttcctggcgtataatattatagtttcttagtattttgtgtacatataagatatggcccgcaaatatcttactgaggccgagttacaggaaataattgttactgctagcgatttttatgatgatatagaagatgaaatagtatcagaaaacgataatgtattgttagatgaagatttaaatgctgaaaacattcattccaggtcatttttgacctggggtaattttttacccccgttggtcatccgtgtaacaaaaaaggttggtcatcggaaggttaaagcaatctcaagcttcaaccacagaatttagcggtgcaaaggcttgttacgatttttttttctcaccgagttaaataaaaataaatgactgttccattaacattaactgttccattaactgttttgttgcatgtataagcacatcaatattttcaaaatatgaatgaaaatgttcatcatcacgccaaaattttcttccaagatactgtgatgccattatattgttatttttggttttcgccaactacttatatgatttccaattaaagctggagaaggttttggtcaaatgtagcttgacaattattttataaattgcggatatcatcacattattttaaggtatccaacgatagctttatcgcattttgtattcatttttgaattatacaaaaacacattttgactaaaagcttcacgtctttttttgattacatttttgataatcttccacgtgcagaccaaagacaaacgaaaaagaaaattctcgtaaaagaatcaaatataagtacactttttggagtatatgtattataatttataactaattcactaatcaactattgtccttttcatgatcatttttcagtgcgtaacaaatgatatgaaaaagggtaagtccgtgataatacacatttatgacatttattctaacatgacattttagttaaatctgacagttgtcacattttattttcaatttggaataaaaacaaatcaaatgtgtttcttgcatttataaaatggtattttctttgatttgtatagtcttataaattatacagattatatttgtaatattattatctaattaaaaaaaatatttttttattatggcgccatctatcgacaactagaataactagaataaatgttataaaaatgtcaccgacgaaatgtaatcaccgacgtgcctttttttctgtcacatacaatttaatgcgttagaaagaaatcgaaaaactgtgacgcactgaaagatgatcatgagaaatactgtataatctgaatttacataatatatcgtattcctaaagtcgaaaatgtaatttttcgactttgggatcggttatttcgaatttggtttgagatatcaaactcgcaagatgatattccttcttcttcttaaagtgcccatccgttctggatgttggcgatcatcatggctatcttgactttgtttaccacagcgcgaaatagttcagcggtagtcgtgttataccactttcgtaaattttgaagccaggaaatgcgtcttcttcccggtcctcttttaccatccgttggagaaggccgtagcatttctcattacatgtcctagatattctaattttttcgttatgatggtcatgagaatttcacactctttccccattctacgcagtacttctacattagtaattcggtcaacccaggatatacgtaagatgcgcctataacaccacatttcgaaagcttcggaccgattcatagatgcaacagttagtgtccacgcttccattccgtagagcagaactgtaaatatgtatcatttcaacagacggtattttgtttttaatgatatgtctagactctagactattgaaaaagggtctcattccaacgaatgctgcttttgcttttattattcactgtttaatttctgttgagtgggtccattggctatttaaattggtgcctagatatgtatattgctccactctttcaatattctgttgtttgattgtaagttgagtgtttagtatgattttcctaaactaggtaaaaaacacattgatttgatacctatatcatatgccataaatcaaaaattcgattttttgactttgaggtcggttgatatcgaaatggtttttaaatttggattcaggagacaaactgcataagaatccatcgtagatcgactcacaagtatttcaggggcggcgatgtacaaacgaacgaatcaacgaacagactttgcgaatttatatacgaaaacgaagttttcgttgaaaataaatgaattcatcgattaagctgtccttagtagcaaagtaatgtaaagcatgtagtgctatcaaacgctgtattgcgtatgccagtggcggctcgtatcactttaagtaggtagtgccagaattcgggcagctgcctaaatttttagtgacgggttcacaatattgtcaaaaaaggtataaaatagaaattaaaaaaaataggtacggatatttttacattatgtaggtatataccatttctggggtgtcaagaaatttaaacatttaaaatgcattcagtgattgatttgacatcatgtccgtccaacaagtaaaatctccaaaatctctcaacttatcgccctttacacaaatatcggaaaactataactaactgaaattcaccagcgacgcgacgtctgtcgtttcatcggcaatcactgcaacacaaagataattttcaatttctttccttatttcctcgtgataaacatctaagatgcactgaaggagttcattttgtgttgttttgaggtacatgcttttaaagatttggaactttgaatatgaaccgaagtcgttgtctaattcggctaacattgaacagttccataaagatgcctctattttctgaattttccttttcgtcgtgatttctcaaaactaactcgaaactccacaaaaccatatagatataatttttaatttgattcaaaacatatcgattcttatccacttcttgttcattgtgtttaattagactatcacgataagctgaatttaactcgggttttattaaaattaaaaattttaaattacttaaaaatataatagtttataataaaaagtttaatcattatgtaataaatacaaaaacgagcgagcgagcgcataaaaaaactggaaaatataatgtactaccctgtacgagaatctttttggatctacgatccactattcactcactattcactatgatgagcatagtaaaaaatattagatcttccttgtccttgtcgagcatcttgttgagccaggcacgaatagtctcatttaaacgtgtattaaaagtgcaatatagctctacctctgtcacttatatagaatgcccgtaaaatctttctcttttcagccgagccatctaagcttttggcacgatgcgatcatcccgtccgctgtgagtggcgaggattgtactacactgcacagttgccagattttatataatttataaagagaaaagaaatacgcacaaaaaatgaacgggcattaaaacggtttaaagataaaaaatatgtttctgcataaaaattctgcaccggccgccactggcgtatgcagaatatttcgattaaactaaaattccaaaatttcgttctgcattatgcaaaacttgatttatgtttatataaattataaacatgtaaattttggtgctattaaattaagtgtaaaattattaggcatggtaaagttataaaaaaataaccaaatcttttgtttgttaaaattcttagaagtaacaagttaattaactatttaaagttattaataaacaattagaaggtaaagtgaaataaaaccacttctaattcgatttctatgaaaaaagtcaatatatgtggaaaaatttaaaatttcttcaatactgtttccttggtttttacgctaccaaaatacgtttgatttatcgagtcacatcgaaactatcaatgtattaataaatttgtaatgttcattagtcatttaatattaaaatttttaggattacatgtcattattgcgtaatatagttttgcatttcaaagctagtcctattgaactggattctacttgttaggaaaaaagaaatgattagaaatttcataaatcttttacaattttcaatattccatgaatgtctttttgctgtttcaaaatttcatttaaatcaaatttcaagacaatctatatttgctttatagctgcctttagttattaaatttgtactatattcctgatccgataaaattggtggtagataaagattgatttttaacattattaggtttgggctaagtatctactagtctgggtatgtctagcgttacaatgtataacgtatagtgcgaataacgtgcgcaaaatggcgattttcgctaagagttacctaaggcccgtccggcgaaacgatcggattttctgtattcattcagtggcgtattttcaagaagttagttaatatattattatgtgtctttatgtaaattttagaatggcttctttatttttgattcaaataatggatatgttaaatgatttattagtcgattaaaaatacgctataacctagaccagaggttctcaatctttttgagtcaggtaccaccaaatactttttattatttttggtaccacctaactaaaatacctgtctagctaggtgatctaattaactataattgtgccaatggtggtgctgattttggctgttttgactttgcgtaccacctcaaataatgaaatgtaccaccagtggtacatgtaccagagattgagaaccgctgacctagaccttaagatatataaaattattgttaatttgtccgttaacattttgctatttaataagggccggcgtagctcaggctgtaggatatctgactcgcatgctggtaggccggggttcgaaacccgcgccggcgagaacatctagacatttttaaaaatgtctataggccccaggtcgactcagcctgaataaaattagtactttgggtaaaaccaggggtaataataggcggttgaagcgtagcactgaccctgttacctttcttgtataccgtaggcactagatatagcagactaccctgctataatcccaaagccgctttagcggtataaaacgggagactattataataacagatacagataatagatttttttttaattactgtgatgcatgctgtattctttcagtttcggctcaggaaatattatttgttaacttcctcagaaattgtgtgcagataataagttaatacaatctaaccccaatttttaatatacacaggaatcgacacgtttttttatattatttcataaaaatttttacacacctacttaaaacgagtcttttaatagtgaattagtgatgctgccaaatatttatgaacccaatttatcaaacttaatgttgtacttaggttacatcataatcttaattgtgaacactgactacatatcccttaaatgtaactttatcagtctttccattttttactactgatatacccttgtctatgtcaaaaaatagtataaacttgtgatatatgaaatatagtaattttggattttaatatatttataaatgttcttaaga

SEQ ID NO: 355 - DNA, 5672 bp, Diabrotica virgifera
  SmartBlast Evalue=5E-27; Info=Endonuclease-reverse transcriptase n=1 Tax=Bombyx mori RepID=D5LB38_BOMMO
gcctgttatgtacgaatcatgacattcctgtctgatacagttagtcattattattatttcctggcgtataatattatagtttcttagtattttgtgtacatataagatatggcccgcaaatatcttactgaggccgagttacaggaaataattgttactgctagcgatttttatgatgatatagaagatgaaatagtatcagaaaacgataatgtattgttagatgaagatttaaatgctgaaaacattcattccaggtcatttttgacctggggtaattttttacccccgttggtcatccgtgtaacaaaaaaggttggtcatcggaaggttaaagcaatctcaagcttcaaccacagaatttagcggtgcaaaggcttgttacgatttttttttctcaccgagttaaataaaaataaatgactgttccattaacattaactgttccattaactgttttgttgcatgtataagcacatcaatattttcaaaatatgaatgaaaatgttcatcatcacgccaaaattttcttccaagatactgtgatgccattatattgttatttttggttttcgccaactacttatatgatttccaattaaagctggagaaggttttggtcaaatgtagcttgacaattattttataaattgcggatatcatcacattattttaaggtatccaacgatagctttatcgcattttgtattcatttttgaattatacaaaaacacattttgactaaaagcttcacgtctttttttgattacatttttgataatcttccacgtgcagaccaaagacaaacgaaaaagaaaattctcgtaaaagaatcaaatataagtacactttttggagtatatgtattataatttataactaattcactaatcaactattgtccttttcatgatcatttttcagtgcgtaacaaatgatatgaaaaagggtaagtccgtgataatacacatttatgacatttattctaacatgacattttagttaaatctgacagttgtcacattttattttcaatttggaataaaaacaaatcaaatgtgtttcttgcatttataaaatggtattttctttgatttgtatagtcttataaattatacagattatatttgtaatattattatctaattaaaaaaaatatttttttattatggcgccatctatcgacaactagaataactagaataaatgttataaaaatgtcaccgacgaaatgtaatcaccgacgtgcctttttttctgtcacatacaatttaatgcgttagaaagaaatcgaaaaactgtgacgcactgaaagatgatcatgagaaatactgtataatctgaatttacataatatatcgtattcctaaagtcgaaaatgtaatttttcgactttgggatcggttatttcgaatttggtttgagatatcaaactcgcaagatgatattccttcttcttcttaaagtgcccatccgttctggatgttggcgatcatcatggctatcttgactttgtttaccacagcgcgaaatagttcagcggtagtcgtgttataccactttcgtaaattttgaagccaggaaatgcgtcttcttcccggtcctcttttaccatccgttggagaaggccgtagcatttctcattacatgtcctagatattctaattttttcgttatgatggtcatgagaatttcacactctttccccattctacgcagtacttctacattagtaattcggtcaacccaggatatacgtaagatgcgcctataacaccacatttcgaaagcttcggaccgattcatagatgcaacagttagtgtccacgcttccattccgtagagcagaactgtaaatatgtatcatttcaacagacggtattttgtttttaatgatatgtctagactctagactattgaaaaagggtctcattccaacgaatgctgcttttgcttttattattcactgtttaatttctgttgagtgggtccattggctatttaaattggtgcctagatatgtatattgctccactctttcaatattctgttgtttgattgtaagttgagtgtttagtatgattttcctaaactaggtaaaaaacacattgatttgatacctatatcatatgccataaatcaaaaattcgattttttgactttgaggtcggttgatatcgaaatggtttttaaatttggattcaggagacaaactgcataagaatccatcgtagatcgactcacaagtatttcaggggcggcgatgtacaaacgaacgaatcaacgaacagactttgcgaatttatatacgaaaacgaagttttcgttgaaaataaatgaattcatcgattaagctgtccttagtagcaaagtaatgtaaagcatgtagtgctatcaaacgctgtattgcgtatgccagtggcggctcgtatcactttaagtaggtagtgccagaattcgggcagctgcctaaatttttagtgacgggttcacaatattgtcaaaaaaggtataaaatagaaattaaaaaaaataggtacggatatttttacattatgtaggtatataccatttctggggtgtcaagaaatttaaacatttaaaatgcattcagtgattgatttgacatcatgtccgtccaacaagtaaaatctccaaaatctctcaacttatcgccctttacacaaatatcggaaaactataactaactgaaattcaccagcgacgcgacgtctgtcgtttcatcggcaatcactgcaacacaaagataattttcaatttctttccttatttcctcgtgataaacatctaagatgcactgaaggagttcattttgtgttgttttgaggtacatgcttttaaagatttggaactttgaatatgaaccgaagtcgttgtctaattcggctaacattgaacagttccataaagatgcctctattttctgaattttccttttcgtcgtgatttctcaaaactaactcgaaactccacaaaaccatatagatataatttttaatttgattcaaaacatatcgattcttatccacttcttgttcattgtgtttaattagactatcacgataagctgaatttaactcgggttttattaaaattaaaaattttaaattacttaaaaatataatagtttataataaaaagtttaatcattaaaaatgtaataattataaatacaaaaacgagcgagcgagcgcgtaaaaaaactcgaaaagataatgtaggtactaccctgtacgagaagctttttggatctgatctacgatccactattcactatgatgagcatagtaaaaaatattagatcttcctgccttgtcgagccaggcacgaatagtttcatttaaacgtgtattaaaagtgcaatatagctctatctctgtcacttacatagaatgcccgtaaaatctttctcttttcagccgagccatctaagcttttggcacgatgcgatcatcccgtccgctgtgagtggcgaggattgtactacactgcacagttgccagattttatataatttataaagagaaaagaaatacgcacaaaaaatgaacgggcattaaaacggtttaaagataaaaaatatgtttctgcataaaaattctgcaccggccgccactggcgtatgcagaatatttcgattaaactaaaattccaaaatttcgttctgcattatgcaaaacttgatttatgtttatataaattataaacatgtaaattttggtgctattaaattaagtgtaaaattattaggcatggtaaagttataaaaaaataaccaaatcttttgtttgttaaaattcttagaagtaacaagttaattaactatttaaagttattaataaacaattagaaggtaaagtgaaataaaaccacttctaattcgatttctatgaaaaaagtcaatatatgtggaaaaatttaaaatttcttcaatactgtttccttggtttttacgctaccaaaatacgtttgatttatcgagtcacatcgaaactatcaatgtattaataaatttgtaatgttcattagtcatttaatattaaaatttttaggattacatgtcattattgcgtaatatagttttgcatttcaaagctagtcctattgaactggattctacttgttaggaaaaaagaaatgattagaaatttcataaatcttttacaattttcaatattccatgaatgtctttttgctgtttcaaaatttcatttaaatcaaatttcaagacaatctatatttgctttatagctgcctttagttattaaatttgtactatattcctgatccgataaaattggtggtagataaagattgatttttaacattattaggtttgggctaagtatctactagtctgggtatgtctagcgttacaatgtataacgtatagtgcgaataacgtgcgcaaaatggcgattttcgctaagagttacctaaggcccgtccggcgaaacgatcggattttctgtattcattcagtggcgtattttcaagaagttagttaatatattattatgtgtctttatgtaaattttagaatggcttctttatttttgattcaaataatggatatgttaaatgatttattagtcgattaaaaatacgctataacctagaccagaggttctcaatctttttgagtcaggtaccaccaaatactttttattatttttggtaccacctaactaaaatacctgtctagctaggtgatctaattaactataattgtgccaatggtggtgctgattttggctgttttgactttgcgtaccacctcaaataatgaaatgtaccaccagtggtacatgtaccagagattgagaaccgctgacctagaccttaagatatataaaattattgttaatttgtccgttaacattttgctatttaataagggccggcgtagctcaggctgtaggatatctgactcgcatgctggtaggccggggttcgaaacccgcgccggcgagaacatctagacatttttaaaaatgtctataggccccaggtcgactcagcctgaataaaattagtactttgggtaaaaccaggggtaataataggcggttgaagcgtagcactgaccctgttacctttcttgtataccgtaggcactagatatagcagactaccctgctataatcccaaagccgctttagcggtataaaacgggagactattataataacagatacagataatagatttttttttaattactgtgatgcatgctgtattctttcagtttcggctcaggaaatattatttgttaacttcctcagaaattgtgtgcagataataagttaatacaatctaaccccaatttttaatatacacaggaatcgacacgtttttttatattatttcataaaaatttttacacacctacttaaaacgagtcttttaatagtgaattagtgatgctgccaaatatttatgaacccaatttatcaaacttaatgttgtacttaggttacatcataatcttaattgtgaacactgactacatatcccttaaatgtaactttatcagtctttccattttttactactgatatacccttgtctatgtcaaaaaatagtataaacttgtgatatatgaaatatagtaattttggattttaatatatttataaatgttcttaaga

SEQ ID NO: 356 - DNA, 5509 bp, Diabrotica virgifera
  SmartBlast Evalue=2E-42; Info=27 kDa hemolymph protein n=1 Tax= Harpegnathos saltator RepID=E2C9D0_9HYME
tgctgtcgaggtgtaagtacgtgtagttttacaatttttgttcaggagtgagaagtggaacttttcttttaaatttttgctgtttaatttaatacctagtatcaaaatgaatattattcaacgagctgtgatatttttcatcgtaatagtatgtatccagtgccaatcatcattaaatgacctagatgctgacaaaataaaaagtaaaatagagaaaggtctaggagatttaaacatagacattccagatgtagatttaaattctacgagtatgccaaatgcagaggatatagaaaaagtgcttagagaaaaatgcgagaagaatggagcaactgacgcagtagatttgataaaggaagaacaagaaaacgctcgtatttgcatagaaaaatacgttaattttacaaccatagaagaggaactggaagagaagaaaaagacaggttctatggatgaagtattctcaaaatactgtaagaaatggccagatattaagggatgtttcgataaggccgtttctatttcaagatcgtgtatggataaaaaagaagaagacgcctttaatagaacgctggatattataaacgatttgcaagaatttatgtgttacaaggatggagatagattagccatgtttgttgctgaaggtggcgtcgaatgtatgtcagagagaaaagatggtgtacaagaatgtgtaaataaaacccttggctcaagaatccctgatgcagatgatctttctgttacaaatttaccagttatgctttttacggatagagattgcgatgatttcgaagaagtcagagaatgtgttaaccatgaactagagaagtgcaaggatagtacccccgcaaacatcgtggacgcattcttcaaattcttaaagaaacaactaccttgtaaaggaagtctagcacagaagagcaccaaaccaaattcagcttgggccatatctagcagttcgatacttttggctatttcctttttgtacgtcaggctgtattaaactttttaaatttttacagtgggtgagcggataattcttacgcatctacagttactatgccataactataattttttatcagtagtgagatttacgtttagtaaatatattctgaagcattgagttctttatatatagttgtgagaacttattatctgcacaaagaaaacatttaaacaattaaattttttatttaagattgaaattaggcaaataggtatatcaaacctataacaaagtgaaaggattaaatccaaaaacaagctgagaatacgagcattatcataacggaaattttgtttacggttagcaaaaatcatctctatattactatatttaaatgcaatatatgtctaacctgaatttacataatatatcgtattcctaaagtcgaaaatgtaatttttcgactttgggattggttatttcgaatttggttcgagatatcgaattcgcaagatgatattccttcttcttcttaaagtgcctatccgttctggatgttggcgatcatcatggctatcttgactctgtttaccagagcgcggaatagttcagcggtattcgtgttataccactttcgtaaattttgaagctaggaaatgcgtcttcttcccggtcctcttttaccatctgttggagaaggtcgtagcattcttgatttctcattacatgtcctagatattctaattttttcgttatgatggtcatgagaatttcacactctttccccattttacgcagtacttctacattagtaattcggtcaacccaggatatacgtaagatgcgcctataacaccacatttcgaaagcttcggaccgattcatagatgcaacagttagtgtccacgcttccattccgtaaagcagaactgtgaacatgtagcatttcaacagacggtattttgtttttaatgatatgtctagactattgaaaatgggtctcattctaacgaatgctgcttttgcttttattattcactgtttaatttctgttgagtggtcccattggctatttaaattggtgcctagatatgtatatggctacactctttcaatattctgttgtttgattgtaagttgagcgtttagtatgattttcctaaactaggtaaaaaacacattgatttgatacctatatcatatgcaataaatcaaaaattcgattttttgactttgaggtcggttgatatcgaaatggtttttaaatttggattcaggagacaaactgcataagaatccatcgtagatcgactcacaagtatttcaggggcggcgatgtacaaacgaacgaatcaacgaacagactttgcgaatttatatacgaaaacgaagttttcgttgaaaataaatgaattcatcgattaagctgtccttagtagcaaagtaatgtaaagcatgtagtgctatcaaacgctgtattgcgtatgccagtggcggctcgtatcactttaagtaggtagtgccagaattcgggcagctgcctaaatttttagtgacgggttcacaatattgtcaaaaaaggtataaaatagaaattaaaaaaaataggtacggatatttttacattatgtaggtatataccatttctggggtgtcaagaaatttaaacatttaaaatgcattcagtgattgatttgacatcatgtccgtccaacaagtaaaatctccaaaatctctcaacttatcgccctttacacaaatatcggaaaactataactaactgaaattcaccagcgacgcgacgtctgtcgtttcatcggcaatcactgcaacacaaagataattttcaatttctttccttatttcctcgtgataaacatctaagatgcactgaaggagttcattttgtgttgttttgaggtacatgcttttaaagatttggaactttgaatatgaaccgaagtcgttgtctaattcggctaacattgaacagttccataaagatgcctctattttctgaattttccttttcgtcgtgatttctcaaaactaactcgaaactccacaaaaccatatagatataatttttaatttgattcaaaacatatcgattcttatccacttcttgttcattgtgtttaattagactatcacgataagctgaatttaactcgggttttattaaaattaaaaattttaaattacttaaaaatataatagtttataataaaaagtttaatcattatgtaataaatacaaaaacgagcgagcgagcgcataaaaaaactggaaaatataatgtactaccctgtacgagaatctttttggatctacgatccactattcactcactattcactatgatgagcatagtaaaaaatattagatcttccttgtccttgtcgagcatcttgttgagccaggcacgaatagtctcatttaaacgtgtattaaaagtgcaatatagctctacctctgtcacttatatagaatgcccgtaaaatctttctcttttcagccgagccatctaagcttttggcacgatgcgatcatcccgtccgctgtctgtgagtggcgagggttgtactacactgcacagttgccagattttatataatttataaagagaaaagaaatacgcacaaaaaatgaacgggcattaaaacggtttaaagataaaaaaaaaatatgtttctgcataaaaataaggtagtgtcatggcactacctcaccggccgccactggcgtatgcagaatatttcaaataaactaaaattccagaatttcgttctgcattatacaaaacttgatttatgtttatataaattataaacatgtaaattttggtgctattaaattaagtgtaaaattattaggcatggtaaagttataaaaaaataaccaaatcttttgtttgttaaaattcttagaagtaacaagttaattaactatttaaagttattaataaacaattagaaggtaaagtgaaataaaaccacttctaattcgatttctatgaaaaaagtcaatatatgtggaaaaatttaaaatttcttcaatactgtttccttggtttttacgctaccaaaatacgtttgatttatcgagtcacatcgaaactatcaatgtattaataaatttgtaatgttcattagtcatttaatattaaaatttttaggattacatgtcattattgcgtaatatagttttgcatttcaaagctagtcctattgaactggattctacttgttaggaaaaaagaaatgattagaaatttcataaatcttttacaattttcaatattccatgaatgtctttttgctgtttcaaaatttcatttaaatcaaatttcaagacaatctatatttgctttatagctgcctttagttattaaatttgtactatattcctgatccgataaaattggtggtagataaagattgatttttaacattattaggtttgggctaagtatctactagtctgggtatgtctagcgttacaatgtataacgtatactgcgaataacgtgcgcaaaatggcgattttcgctaagagttacctaaggcccgtccggcgaaacgatcagattttctgcattcattcagtggcgtattttcaagaagttagttaatatattattatgtgtctttatgtaaattttagaatggcttctttatttttgattcaaataatggatatgttaaataatttattagtcgattaaaaatacgctataacctagaccttaagatatataaaattattgttaatttgtccgttaacattttgctatttaataagggccgccgtagctcaggctgtaggatatctgactcgcatgctggtaggccggggttcgaaacccgcgccggcgagaacatctagacatttttaaaaatgtctataggccccaggtcgactcagcctgaataaaattagtactttgggtaaaaccaggggtaataataggcggttgaagcgtagcactgaccctgttacctttcttgtataccgtaggcactagatatagcagactaccctgctataatcccaaagccgctttagcggtataaaacgggagactattataataacagatacagataatagatttttttttaattactgtgatgcatgctgtattctttcagtttcggctcaggaaatattatttgttaacttcctcagaaattgtgtgcagataataagttaatacaatctaaccccaatttttaatatacacaggaatcgacacgtttttttatattatttcataaaaatttttacacacctacttaaaacgagtcttttaatagtgaattagtgatgctgccaaatatttatgaacccaatttatcaaacttaatgttgtacttaggttacatcataatcttaattgtgaacactgactacatatcccttaaatgtaactttatcagtctttccattttttactactgatatacccttgtctatgtcaaaaaatagtataaacttgtgatatatgaaatatagtaattttggattttaatatatttataaatgttcttaaga

SEQ ID NO: 357 - DNA, 8054 bp, Diabrotica virgifera
  SmartBlast Evalue=4E-61; Info=Ubiquitin-conjugating enzyme E2 variant 2 n=4 Tax=Apocrita RepID=E2AGB3_9HYME
aagtgttaactctatctctattctggaaagaattagtcctcacatcttttgtatttaagttgagggaaaaaggtgatttttgatatccaaagagccccgctttgttaatcaatagtaggggataagatttcaatcatccataatattcgaaaatattcaaaatacacttttaaaaattttaagtttgtgagtattttgtaatggcgaccccatcaactggtgttgttgtgcctcgaaactttcgactacttgaagaactagaagccggtcaaaagggtgtttcagatggtactattagctggggcttagaaaatgatgatgatatgacacttacacattggatggggatgataatcgggccccctcgtacaccgtatgaaaataggatgtattctgttaaaattgaatgtggccaaaggtatcctgatgatgcacctactgcaaagtttatctctagaatcaatataaactgtataaacagtaacacaggggtggtcgataacagacaagtcccaatattggctaggtggcaaagggattacactattaaaacggttttgcaagaattacgaagaataatgacacttaaagagaacatgaagctaacacagcctcctgaaggcacttgcttctagcctttgaatcagcataacactcccccagtatcttctgttacaacttgtccattgagtgtcgatacctgcaccacgcaatcatgctgtcttctgtagcggattcaccttactcacaaactatctatggggtgtcttgaactggttcttggaagataacctgtctggtaatgaggacaaactggtgtatttaggttaaggtgtctaatgataagagtattttttaatattactgcttgtacaacttgtttaactctattagaggatgactcatgatcgaacttgtatttttgtaggaaacaaaaagtaatgttgatgtcaattataataaaccatctatgacgcatctcgtatttcaataaaattgaatgaataggcgtttgacacaatattgttcttgtataacccaaagttttaagaatgggtggtcacgattcattcgatatactagatttttgggttgattaaccacttatttgtttttgtatattctactgggcagtagttgacaatttatcggaactgtatttttaaacttttactagtattcactcactttgtgtacgtttttataccaaagatgaaattgtcaactgctgtggtatgaaaaaaatcaatttatgcttaaatacatgttacgctttattatggagaatcagcttcgaaaatctaaaattctaaaagacatttattgaataactacaaggttgtattgatatttagacattttttgaatgtcgtgtgtgtttataaagaagttatcctttattttgtagtagtttcggacaccccttttaacagtcagagagtagatatctatttgtatatcattgattacatatatcataaacattatctaaatcattattttttttgaaaacacagaaattaaaagtaaaggtagaatacaccattttaaaatttgacaatgttatctcaatacattattacattctcaatattcacacacacgcttcactagcactcataggtatttagcatctccttgtttgctgtcataccttggttttacatttaaaacttatatgagaaaagtgatacttagatgagactttactttataagtttaacttttttctttaaagtcttgagtctgatgaaagaatgagtagagatctacactctgatgacccaagttgtaacaaagatggctaaggtgtacagctttataagctatgtagttaagttaacattttagctaaagttattaggttgaaataagtttatatacagtaccagagcatatattccatatatagcagcttatagaaaggtaggaggaactgctaaaaactttgtttgccttaccaatagttttaataatcgagttttaagtcgagatattcacgcaggtggtctaaaatgcccaaatgttatttattatagagtaagcgccactctactagatacattggtaggtacctagttggtatgattattggctaatctggtccgttctcagatgtgactttcatccctgtcatgttactgtcatgaaactattcaaaataattgtttttccatacaaaagaatacattaattaatagtattgttactctgctttaaaataactttattcaagcaccaagcaatattacaatactttaaaactattacaactttaacaaaatgacaactataaacgtcaaacacagctgatctattatttgtcaactttttatgttaatatagggcattccaacatgctgtcaaaagtcaatatgacgactgggaggcaaacataaatgttattctatcagttcttaatttgttttagataattttagttgcgtttctttgtaattttgtttttaaaagaattgatttgacattctcactagaagaattaatctaaaaagataatatgcctaatttctgttgtgttttgaaatgtggaatacgaaattcatgatgaagttcagttttatcggttactatcagtggtatattttaagcgtaaacacgtgtaaaacaactaaataagttatcatctgagagacaaaaacaaacaactaaataagttatgatctgggagacaaaaacaatggttaaatgctacaaaacgtcctataaaatgctaaataattatttccatgttacttacgcttggaaaacgtctaaaccatgtgttctcaaacccctcgaggaaaagtggacctatattatttattttgtcaatcttttgcttgtacctaccactgtgcgtctaggtacctactaacaacattatgtattgtctaccaagaatttatatgcactcatgtttatttattcactgcttaaaaccaaataaagtcgttcaggtacttctacaactaaaaactacacaaaatctacaacaaaatgttcagaaaatacaacttaaaactgttaatacatgtgctgcaaatattataaacagacacaatgtttgacagtttgcctcccaaacgtcagtcttgaaatgccctattcagtttctatacattttctgacgttctaaacgtcactggacatacaaataaacattgcaacaagtgaagggtccaggactataatagctcaatgttcctatggatctagtagggtggcggtggttactgtatagcaatattacagtatttctcatgatcatttttcagtgcgtaacaaatgataggaaaaagggtaagtccgtgataatacacatttatgacatttattctaacatgacattttagttaaatctgacagttgtcacattttattttcaatttggaataaaaacaaatcaaaagtgtttcttgcatttataaaatggtattttctttgatttgtatagtcttataaattatacagattatatttgtaatattattatctaatttaaaaaaaaatttttattatggcgccatctatcgacaactagaataactagaataaatgttataaaaatgtcaccgacgaaatgtaatcaccgacgtgcctttttttctgtcacatacaatttaatgcgttagaaagaaatcgaaaaactgtgacgcactgaaagatgatcatgagaaatactgtataatctgaatttacataatatatcgtattcctaaagtcgaaaatgtaatttttcgactttgggatcggttatttcgaatttggtttgagatatcaaactcgcaagatgatattccttcttcttcttaaagtgcccatccgttctggatgttggcgatcatcatggctatcttgactttgtttaccacagcgcgaaatagttcagcggtagtcgtgttataccactttcgtaaattttgaagccaggaaatgcgtcttcttcccggtcctcttttaccatccgttggagaaggccgtagcatttctcattacatgtcctagatattctaattttttcgttatgatggtcatgagaatttcacactctttccccattctacgcagtacttctacattagtaattcggtcaacccaggatatacgtaagatgcgcctataacaccacatttcgaaagcttcggaccgattcatagatgcaacagttagtgtccacgcttccattccgtagagcagaactgtaaatatgtatcatttcaacagacggtattttgtttttaatgatatgtctagactctagactattgaaaaagggtctcattccaacgaatgctgcttttgcttttattattcactgtttaatttctgttgagtgggtccattggctatttaaattggtgcctagatatgtatattgctccactctttcaatattctgttgtttgattgtaagttgagtgtttagtatgattttcctaaactaggtaaaaaacacattgatttgatacctatatcatatgccataaatcaaaaattcgattttttgactttgaggtcggttgatatcgaaatggtttttaaatttggattcaggagacaaactgcataagaatccatcgtagatcgactcacaagtatttcaggggcggcgatgtacaaacgaacgaatcaacgaacagactttgcgaatttatatacgaaaacgaagttttcgttgaaaataaatgaattcatcgattaagctgtccttagtagcaaagtaatgtaaagcatgtagtgctatcaaacgctgtattgcgtatgccagtggcggctcgtatcactttaagtaggtagtgccagaattcgggcagctgcctaaatttttagtgacgggttcacaatattgtcaaaaaaggtataaaatagaaattaaaaaaaataggtacggatatttttacattatgtaggtatataccatttctggggtgtcaagaaatttaaacatttaaaatgcattcagtgattgatttgacatcatgtccgtccaacaagtaaaatctccaaaatctctcaacttatcgccctttacacaaatatcggaaaactataactaactgaaattcaccagcgacgcgacgtctgtcgtttcatcggcaatcactgcaacacaaagataattttcaatttctttccttatttcctcgtgataaacatctaagatgcactgaaggagttcattttgtgttgttttgaggtacatgcttttaaagatttggaactttgaatatgaaccgaagtcgttgtctaattcggctaacattgaacagttccataaagatgcctctattttctgaattttccttttcgtcgtgatttctcaaaactaactcgaaactccacaaaaccatatagatataatttttaatttgattcaaaacatatcgattcttatccacttcttgttcattgtgtttaattagactatcacgataagctgaatttaactcgggttttattaaaattaaaaattttaaattacttaaaaatataatagtttataataaaaagtttaatcattatgtaataaatacaaaaacgagcgagcgagcgcataaaaaaactggaaaatataatgtactaccctgtacgagaatctttttggatctacgatccactattcactcactattcactatgatgagcatagtaaaaaatattagatcttccttgtccttgtcgagcatcttgttgagccaggcacgaatagtctcatttaaacgtgtattaaaagtgcaatatagctctacctctgtcacttatatagaatgcccgtaaaatctttctcttttcagccgagccatctaagcttttggcacgatgcgatcatcccgtccgctgtctgtgagtggcgagggttgtactacactgcacagttgccagattttatataatttataaagagaaaagaaatacgcacaaaaaatgaacgggcattaaaacggtttaaagataaaaaaaaaatatgtttctgcataaaaataaggtagtgtcatggcactacctcaccggccgccactggcgtatgcagaatatttcaaataaactaaaattccagaatttcgttctgcattatacaaaacttgatttatgtttatataaattataaacatgtaaattttggtgctattaaattaagtgtaaaattattaggcatggtaaagttataaaaaaataaccaaatcttttgtttgttaaaattcttagaagtaacaagttaattaactatttaaagttattaataaacaattagaaggtaaagtgaaataaaaccacttctaattcgatttctatgaaaaaagtcaatatatgtggaaaaatttaaaatttcttcaatactgtttccttggtttttacgctaccaaaatacgtttgatttatcgagtcacatcgaaactatcaatgtattaataaatttgtaatgttcattagtcatttaatattaaaatttttaggattacatgtcattattgcgtaatatagttttgcatttcaaagctagtcctattgaactggattctacttgttaggaaaaaagaaatgattagaaatttcataaatcttttacaattttcaatattccatgaatgtctttttgctgtttcaaaatttcatttaaatcaaatttcaagacaatctatatttgctttatagctgcctttagttattaaatttgtactatattcctgatccgataaaattggtggtagataaagattgatttttaacattattaggtttgggctaagtatctactagtctgggtatgtctagcgttacaatgtataacgtatagtgcgaataacgtgcgcaaaatggcgattttcgctaagagttacctaaggcccgtccggcgaaacgatcggattttctgtattcattcagtggcgtattttcaagaagttagttaatatattattatgtgtctttatgtaaattttagaatggcttctttatttttgattcaaataatggatatgttaaatgatttattagtcgattaaaaatacgctataacctagaccagaggttctcaatctttttgagtcaggtaccaccaaatactttttattatttttggtaccacctaactaaaatacctgtctagctaggtgatctaattaactataattgtgccaatggtggtgctgattttggctgttttgactttgcgtaccacctcaaataatgaaatgtaccaccagtggtacatgtaccagagattgagaaccgctgacctagaccttaagatatataaaattattgttaatttgtccgttaacattttgctatttaataagggccggcgtagctcaggctgtaggatatctgactcgcatgctggtaggccggggttcgaaacccgcgccggcgagaacatctagacatttttaaaaatgtctataggccccaggtcgactcagcctgaataaaattagtactttgggtaaaaccaggggtaataataggcggttgaagcgtagcactgaccctgttacctttcttgtataccgtaggcactagatatagcagactaccctgctataatcccaaagccgctttagcggtataaaacgggagactattataataacagatacagataatagatttttttttaattactgtgatgcatgctgtattctttcagtttcggctcaggaaatattatttgttaacttcctcagaaattgtgtgcagataataagttaatacaatctaaccccaatttttaatatacacaggaatcgacacgtttttttatattatttcataaaaatttttacacacctacttaaaacgagtcttttaatagtgaattagtgatgctgccaaatatttatgaacccaatttatcaaacttaatgttgtacttaggttacatcataatcttaattgtgaacactgactacatatcccttaaatgtaactttatcagtctttccattttttactactgatatacccttgtctatgtcaaaaaatagtataaacttgtgatatatgaaatatagtaattttggattttaatatatttataaatgttcttaaga

SEQ ID NO: 358 - DNA, 5503 bp, Diabrotica virgifera
  SmartBlast Evalue=2E-42; Info=27 kDa hemolymph protein n=1 Tax= Harpegnathos saltator RepID=E2C9D0_9HYME
tgctgtcgaggtgtaagtacgtgtagttttacaatttttgttcaggagtgagaagtggaacttttcttttaaatttttgctgtttaatttaatacctagtatcaaaatgaatattattcaacgagctgtgatatttttcatcgtaatagtatgtatccagtgccaatcatcattaaatgacctagatgctgacaaaataaaaagtaaaatagagaaaggtctaggagatttaaacatagacattccagatgtagatttaaattctacgagtatgccaaatgcagaggatatagaaaaagtgcttagagaaaaatgcgagaagaatggagcaactgacgcagtagatttgataaaggaagaacaagaaaacgctcgtatttgcatagaaaaatacgttaattttacaaccatagaagaggaactggaagagaagaaaaagacaggttctatggatgaagtattctcaaaatactgtaagaaatggccagatattaagggatgtttcgataaggccgtttctatttcaagatcgtgtatggataaaaaagaagaagacgcctttaatagaacgctggatattataaacgatttgcaagaatttatgtgttacaaggatggagatagattagccatgtttgttgctgaaggtggcgtcgaatgtatgtcagagagaaaagatggtgtacaagaatgtgtaaataaaacccttggctcaagaatccctgatgcagatgatctttctgttacaaatttaccagttatgctttttacggatagagattgcgatgatttcgaagaagtcagagaatgtgttaaccatgaactagagaagtgcaaggatagtacccccgcaaacatcgtggacgcattcttcaaattcttaaagaaacaactaccttgtaaaggaagtctagcacagaagagcaccaaaccaaattcagcttgggccatatctagcagttcgatacttttggctatttcctttttgtacgtcaggctgtattaaactttttaaatttttacagtgggtgagcggataattcttacgcatctacagttactatgccataactataattttttatcagtagtgagatttacgtttagtaaatatattctgaagcattgagttctttatatatagttgtgagaacttattatctgcacaaagaaaacatttaaacaattaaattttttatttaagattgaaattaggcaaataggtatatcaaacctataacaaagtgaaaggattaaatccaaaaacaagctgagaatacgagcattatcataacggaaattttgtttacggttagcaaaaatcatctctatattactatatttaaatgcaatatatgtctaacctgaatttacataatatatcgtattcctaaagtcgaaaatgtaatttttcgactttgggattggttatttcgaatttggttcgagatatcgaattcgcaagatgatattccttcttcttcttaaagtgcctatccgttctggatgttggcgatcatcatggctatcttgactctgtttaccagagcgcggaatagttcagcggtattcgtgttataccactttcgtaaattttgaagctaggaaatgcgtcttcttcccggtcctcttttaccatctgttggagaaggtcgtagcattcttgatttctcattacatgtcctagatattctaattttttcgttatgatggtcatgagaatttcacactctttccccattttacgcagtacttctacattagtaattcggtcaacccaggatatacgtaagatgcgcctataacaccacatttcgaaagcttcggaccgattcatagatgcaacagttagtgtccacgcttccattccgtaaagcagaactgtgaacatgtagcatttcaacagacggtattttgtttttaatgatatgtctagactattgaaaatgggtctcattctaacgaatgctgcttttgcttttattattcactgtttaatttctgttgagtggtcccattggctatttaaattggtgcctagatatgtatatggctacactctttcaatattctgttgtttgattgtaagttgagcgtttagtatgattttcctaaactaggtaaaaaacacattgatttgatacctatatcatatgcaataaatcaaaaattcgattttttgactttgaggtcggttgatatcgaaatggtttttaaatttggattcaggagacaaactgcataagaatccatcgtagatcgactcacaagtatttcaggggcggcgatgtacaaacgaacgaatcaacgaacagactttgcgaatttatatacgaaaacgaagttttcgttgaaaataaatgaattcatcgattaagctgtccttagtagcaaagtaatgtaaagcatgtagtgctatcaaacgctgtattgcgtatgccagtggcggctcgtatcactttaagtaggtagtgccagaattcgggcagctgcctaaatttttagtgacgggttcacaatattgtcaaaaaaggtataaaatagaaattaaaaaaaataggtacggatatttttacattatgtaggtatataccatttctggggtgtcaagaaatttaaacatttaaaatgcattcagtgattgatttgacatcatgtccgtccaacaagtaaaatctccaaaatctctcaacttatcgccctttacacaaatatcggaaaactataactaactgaaattcaccagcgacgcgacgtctgtcgtttcatcggcaatcactgcaacacaaagataattttcaatttctttccttatttcctcgtgataaacatctaagatgcactgaaggagttcattttgtgttgttttgaggtacatgcttttaaagatttggaactttgaatatgaaccgaagtcgttgtctaattcggctaacattgaacagttccataaagatgcctctattttctgaattttccttttcgtcgtgatttctcaaaactaactcgaaactccacaaaaccatatagatataatttttaatttgattcaaaacatatcgattcttatccacttcttgttcattgtgtttaattagactatcacgataagctgaatttaactcgggttttattaaaattaaaaattttaaattacttaaaaatataatagtttataataaaaagtttaatcattaaaaatgtaataattataaatacaaaaacgagcgagcgagcgcgtaaaaaaactcgaaaagataatgtaggtactaccctgtacgagaagctttttggatctgatctacgatccactattcactatgatgagcatagtaaaaaatattagatcttcctgccttgtcgagccaggcacgaatagtttcatttaaacgtgtattaaaagtgcaatatagctctatctctgtcacttacatagaatgcccgtaaaatctttctcttttcagccgagccatctaagcttttggcacgatgcgatcatcccgtccgctgtctgtgagtggcgagggttgtactacactgcacagttgccagattttatataatttataaagagaaaagaaatacgcacaaaaaatgaacgggcattaaaacggtttaaagataaaaaaaaaatatgtttctgcataaaaataaggtagtgtcatggcactacctcaccggccgccactggcgtatgcagaatatttcaaataaactaaaattccagaatttcgttctgcattatacaaaacttgatttatgtttatataaattataaacatgtaaattttggtgctattaaattaagtgtaaaattattaggcatggtaaagttataaaaaaataaccaaatcttttgtttgttaaaattcttagaagtaacaagttaattaactatttaaagttattaataaacaattagaaggtaaagtgaaataaaaccacttctaattcgatttctatgaaaaaagtcaatatatgtggaaaaatttaaaatttcttcaatactgtttccttggtttttacgctaccaaaatacgtttgatttatcgagtcacatcgaaactatcaatgtattaataaatttgtaatgttcattagtcatttaatattaaaatttttaggattacatgtcattattgcgtaatatagttttgcatttcaaagctagtcctattgaactggattctacttgttaggaaaaaagaaatgattagaaatttcataaatcttttacaattttcaatattccatgaatgtctttttgctgtttcaaaatttcatttaaatcaaatttcaagacaatctatatttgctttatagctgcctttagttattaaatttgtactatattcctgatccgataaaattggtggtagataaagattgatttttaacattattaggtttgggctaagtatctactagtctgggtatgtctagcgttacaatgtataacgtatactgcgaataacgtgcgcaaaatggcgattttcgctaagagttacctaaggcccgtccggcgaaacgatcagattttctgcattcattcagtggcgtattttcaagaagttagttaatatattattatgtgtctttatgtaaattttagaatggcttctttatttttgattcaaataatggatatgttaaataatttattagtcgattaaaaatacgctataacctagaccttaagatatataaaattattgttaatttgtccgttaacattttgctatttaataagggccgccgtagctcaggctgtaggatatctgactcgcatgctggtaggccggggttcgaaacccgcgccggcgagaacatctagacatttttaaaaatgtctataggccccaggtcgactcagcctgaataaaattagtactttgggtaaaaccaggggtaataataggcggttgaagcgtagcactgaccctgttacctttcttgtataccgtaggcactagatatagcagactaccctgctataatcccaaagccgctttagcggtataaaacgggagactattataataacagatacagataatagatttttttttaattactgtgatgcatgctgtattctttcagtttcggctcaggaaatattatttgttaacttcctcagaaattgtgtgcagataataagttaatacaatctaaccccaatttttaatatacacaggaatcgacacgtttttttatattatttcataaaaatttttacacacctacttaaaacgagtcttttaatagtgaattagtgatgctgccaaatatttatgaacccaatttatcaaacttaatgttgtacttaggttacatcataatcttaattgtgaacactgactacatatcccttaaatgtaactttatcagtctttccattttttactactgatatacccttgtctatgtcaaaaaatagtataaacttgtgatatatgaaatatagtaattttggattttaatatatttataaatgttcttaaga

SEQ ID NO: 359 - DNA, 5482 bp, Diabrotica virgifera
  SmartBlast Evalue=2E-42; Info=27 kDa hemolymph protein n=1 Tax= Harpegnathos saltator RepID=E2C9D0_9HYME
tgctgtcgaggtgtaagtacgtgtagttttacaatttttgttcaggagtgagaagtggaacttttcttttaaatttttgctgtttaatttaatacctagtatcaaaatgaatattattcaacgagctgtgatatttttcatcgtaatagtatgtatccagtgccaatcatcattaaatgacctagatgctgacaaaataaaaagtaaaatagagaaaggtctaggagatttaaacatagacattccagatgtagatttaaattctacgagtatgccaaatgcagaggatatagaaaaagtgcttagagaaaaatgcgagaagaatggagcaactgacgcagtagatttgataaaggaagaacaagaaaacgctcgtatttgcatagaaaaatacgttaattttacaaccatagaagaggaactggaagagaagaaaaagacaggttctatggatgaagtattctcaaaatactgtaagaaatggccagatattaagggatgtttcgataaggccgtttctatttcaagatcgtgtatggataaaaaagaagaagacgcctttaatagaacgctggatattataaacgatttgcaagaatttatgtgttacaaggatggagatagattagccatgtttgttgctgaaggtggcgtcgaatgtatgtcagagagaaaagatggtgtacaagaatgtgtaaataaaacccttggctcaagaatccctgatgcagatgatctttctgttacaaatttaccagttatgctttttacggatagagattgcgatgatttcgaagaagtcagagaatgtgttaaccatgaactagagaagtgcaaggatagtacccccgcaaacatcgtggacgcattcttcaaattcttaaagaaacaactaccttgtaaaggaagtctagcacagaagagcaccaaaccaaattcagcttgggccatatctagcagttcgatacttttggctatttcctttttgtacgtcaggctgtattaaactttttaaatttttacagtgggtgagcggataattcttacgcatctacagttactatgccataactataattttttatcagtagtgagatttacgtttagtaaatatattctgaagcattgagttctttatatatagttgtgagaacttattatctgcacaaagaaaacatttaaacaattaaattttttatttaagattgaaattaggcaaataggtatatcaaacctataacaaagtgaaaggattaaatccaaaaacaagctgagaatacgagcattatcataacggaaattttgtttacggttagcaaaaatcatctctatattactatatttaaatgcaatatatgtctaacctgaatttacataatatatcgtattcctaaagtcgaaaatgtaatttttcgactttgggattggttatttcgaatttggttcgagatatcgaattcgcaagatgatattccttcttcttcttaaagtgcctatccgttctggatgttggcgatcatcatggctatcttgactctgtttaccagagcgcggaatagttcagcggtattcgtgttataccactttcgtaaattttgaagctaggaaatgcgtcttcttcccggtcctcttttaccatctgttggagaaggtcgtagcattcttgatttctcattacatgtcctagatattctaattttttcgttatgatggtcatgagaatttcacactctttccccattttacgcagtacttctacattagtaattcggtcaacccaggatatacgtaagatgcgcctataacaccacatttcgaaagcttcggaccgattcatagatgcaacagttagtgtccacgcttccattccgtaaagcagaactgtgaacatgtagcatttcaacagacggtattttgtttttaatgatatgtctagactattgaaaatgggtctcattctaacgaatgctgcttttgcttttattattcactgtttaatttctgttgagtggtcccattggctatttaaattggtgcctagatatgtatatggctacactctttcaatattctgttgtttgattgtaagttgagcgtttagtatgattttcctaaactaggtaaaaaacacattgatttgatacctatatcatatgcaataaatcaaaaattcgattttttgactttgaggtcggttgatatcgaaatggtttttaaatttggattcaggagacaaactgcataagaatccatcgtagatcgactcacaagtatttcaggggcggcgatgtacaaacgaacgaatcaacgaacagactttgcgaatttatatacgaaaacgaagttttcgttgaaaataaatgaattcatcgattaagctgtccttagtagcaaagtaatgtaaagcatgtagtgctatcaaacgctgtattgcgtatgccagtggcggctcgtatcactttaagtaggtagtgccagaattcgggcagctgcctaaatttttagtgacgggttcacaatattgtcaaaaaaggtataaaatagaaattaaaaaaaataggtacggatatttttacattatgtaggtatataccatttctggggtgtcaagaaatttaaacatttaaaatgcattcagtgattgatttgacatcatgtccgtccaacaagtaaaatctccaaaatctctcaacttatcgccctttacacaaatatcggaaaactataactaactgaaattcaccagcgacgcgacgtctgtcgtttcatcggcaatcactgcaacacaaagataattttcaatttctttccttatttcctcgtgataaacatctaagatgcactgaaggagttcattttgtgttgttttgaggtacatgcttttaaagatttggaactttgaatatgaaccgaagtcgttgtctaattcggctaacattgaacagttccataaagatgcctctattttctgaattttccttttcgtcgtgatttctcaaaactaactcgaaactccacaaaaccatatagatataatttttaatttgattcaaaacatatcgattcttatccacttcttgttcattgtgtttaattagactatcacgataagctgaatttaactcgggttttattaaaattaaaaattttaaattacttaaaaatataatagtttataataaaaagtttaatcattatgtaataaatacaaaaacgagcgagcgagcgcataaaaaaactggaaaatataatgtactaccctgtacgagaatctttttggatctacgatccactattcactcactattcactatgatgagcatagtaaaaaatattagatcttccttgtccttgtcgagcatcttgttgagccaggcacgaatagtctcatttaaacgtgtattaaaagtgcaatatagctctacctctgtcacttatatagaatgcccgtaaaatctttctcttttcagccgagccatctaagcttttggcacgatgcgatcatcccgtccgctgtgagtggcgaggattgtactacactgcacagttgccagattttatataatttataaagagaaaagaaatacgcacaaaaaatgaacgggcattaaaacggtttaaagataaaaaatatgtttctgcataaaaattctgcaccggccgccactggcgtatgcagaatatttcgattaaactaaaattccaaaatttcgttctgcattatgcaaaacttgatttatgtttatataaattataaacatgtaaattttggtgctattaaattaagtgtaaaattattaggcatggtaaagttataaaaaaataaccaaatcttttgtttgttaaaattcttagaagtaacaagttaattaactatttaaagttattaataaacaattagaaggtaaagtgaaataaaaccacttctaattcgatttctatgaaaaaagtcaatatatgtggaaaaatttaaaatttcttcaatactgtttccttggtttttacgctaccaaaatacgtttgatttatcgagtcacatcgaaactatcaatgtattaataaatttgtaatgttcattagtcatttaatattaaaatttttaggattacatgtcattattgcgtaatatagttttgcatttcaaagctagtcctattgaactggattctacttgttaggaaaaaagaaatgattagaaatttcataaatcttttacaattttcaatattccatgaatgtctttttgctgtttcaaaatttcatttaaatcaaatttcaagacaatctatatttgctttatagctgcctttagttattaaatttgtactatattcctgatccgataaaattggtggtagataaagattgatttttaacattattaggtttgggctaagtatctactagtctgggtatgtctagcgttacaatgtataacgtatactgcgaataacgtgcgcaaaatggcgattttcgctaagagttacctaaggcccgtccggcgaaacgatcagattttctgcattcattcagtggcgtattttcaagaagttagttaatatattattatgtgtctttatgtaaattttagaatggcttctttatttttgattcaaataatggatatgttaaataatttattagtcgattaaaaatacgctataacctagaccttaagatatataaaattattgttaatttgtccgttaacattttgctatttaataagggccgccgtagctcaggctgtaggatatctgactcgcatgctggtaggccggggttcgaaacccgcgccggcgagaacatctagacatttttaaaaatgtctataggccccaggtcgactcagcctgaataaaattagtactttgggtaaaaccaggggtaataataggcggttgaagcgtagcactgaccctgttacctttcttgtataccgtaggcactagatatagcagactaccctgctataatcccaaagccgctttagcggtataaaacgggagactattataataacagatacagataatagatttttttttaattactgtgatgcatgctgtattctttcagtttcggctcaggaaatattatttgttaacttcctcagaaattgtgtgcagataataagttaatacaatctaaccccaatttttaatatacacaggaatcgacacgtttttttatattatttcataaaaatttttacacacctacttaaaacgagtcttttaatagtgaattagtgatgctgccaaatatttatgaacccaatttatcaaacttaatgttgtacttaggttacatcataatcttaattgtgaacactgactacatatcccttaaatgtaactttatcagtctttccattttttactactgatatacccttgtctatgtcaaaaaatagtataaacttgtgatatatgaaatatagtaattttggattttaatatatttataaatgttcttaaga

SEQ ID NO: 360 - DNA, 5476 bp, Diabrotica virgifera
  SmartBlast Evalue=2E-42; Info=27 kDa hemolymph protein n=1 Tax= Harpegnathos saltator RepID=E2C9D0_9HYME
tgctgtcgaggtgtaagtacgtgtagttttacaatttttgttcaggagtgagaagtggaacttttcttttaaatttttgctgtttaatttaatacctagtatcaaaatgaatattattcaacgagctgtgatatttttcatcgtaatagtatgtatccagtgccaatcatcattaaatgacctagatgctgacaaaataaaaagtaaaatagagaaaggtctaggagatttaaacatagacattccagatgtagatttaaattctacgagtatgccaaatgcagaggatatagaaaaagtgcttagagaaaaatgcgagaagaatggagcaactgacgcagtagatttgataaaggaagaacaagaaaacgctcgtatttgcatagaaaaatacgttaattttacaaccatagaagaggaactggaagagaagaaaaagacaggttctatggatgaagtattctcaaaatactgtaagaaatggccagatattaagggatgtttcgataaggccgtttctatttcaagatcgtgtatggataaaaaagaagaagacgcctttaatagaacgctggatattataaacgatttgcaagaatttatgtgttacaaggatggagatagattagccatgtttgttgctgaaggtggcgtcgaatgtatgtcagagagaaaagatggtgtacaagaatgtgtaaataaaacccttggctcaagaatccctgatgcagatgatctttctgttacaaatttaccagttatgctttttacggatagagattgcgatgatttcgaagaagtcagagaatgtgttaaccatgaactagagaagtgcaaggatagtacccccgcaaacatcgtggacgcattcttcaaattcttaaagaaacaactaccttgtaaaggaagtctagcacagaagagcaccaaaccaaattcagcttgggccatatctagcagttcgatacttttggctatttcctttttgtacgtcaggctgtattaaactttttaaatttttacagtgggtgagcggataattcttacgcatctacagttactatgccataactataattttttatcagtagtgagatttacgtttagtaaatatattctgaagcattgagttctttatatatagttgtgagaacttattatctgcacaaagaaaacatttaaacaattaaattttttatttaagattgaaattaggcaaataggtatatcaaacctataacaaagtgaaaggattaaatccaaaaacaagctgagaatacgagcattatcataacggaaattttgtttacggttagcaaaaatcatctctatattactatatttaaatgcaatatatgtctaacctgaatttacataatatatcgtattcctaaagtcgaaaatgtaatttttcgactttgggattggttatttcgaatttggttcgagatatcgaattcgcaagatgatattccttcttcttcttaaagtgcctatccgttctggatgttggcgatcatcatggctatcttgactctgtttaccagagcgcggaatagttcagcggtattcgtgttataccactttcgtaaattttgaagctaggaaatgcgtcttcttcccggtcctcttttaccatctgttggagaaggtcgtagcattcttgatttctcattacatgtcctagatattctaattttttcgttatgatggtcatgagaatttcacactctttccccattttacgcagtacttctacattagtaattcggtcaacccaggatatacgtaagatgcgcctataacaccacatttcgaaagcttcggaccgattcatagatgcaacagttagtgtccacgcttccattccgtaaagcagaactgtgaacatgtagcatttcaacagacggtattttgtttttaatgatatgtctagactattgaaaatgggtctcattctaacgaatgctgcttttgcttttattattcactgtttaatttctgttgagtggtcccattggctatttaaattggtgcctagatatgtatatggctacactctttcaatattctgttgtttgattgtaagttgagcgtttagtatgattttcctaaactaggtaaaaaacacattgatttgatacctatatcatatgcaataaatcaaaaattcgattttttgactttgaggtcggttgatatcgaaatggtttttaaatttggattcaggagacaaactgcataagaatccatcgtagatcgactcacaagtatttcaggggcggcgatgtacaaacgaacgaatcaacgaacagactttgcgaatttatatacgaaaacgaagttttcgttgaaaataaatgaattcatcgattaagctgtccttagtagcaaagtaatgtaaagcatgtagtgctatcaaacgctgtattgcgtatgccagtggcggctcgtatcactttaagtaggtagtgccagaattcgggcagctgcctaaatttttagtgacgggttcacaatattgtcaaaaaaggtataaaatagaaattaaaaaaaataggtacggatatttttacattatgtaggtatataccatttctggggtgtcaagaaatttaaacatttaaaatgcattcagtgattgatttgacatcatgtccgtccaacaagtaaaatctccaaaatctctcaacttatcgccctttacacaaatatcggaaaactataactaactgaaattcaccagcgacgcgacgtctgtcgtttcatcggcaatcactgcaacacaaagataattttcaatttctttccttatttcctcgtgataaacatctaagatgcactgaaggagttcattttgtgttgttttgaggtacatgcttttaaagatttggaactttgaatatgaaccgaagtcgttgtctaattcggctaacattgaacagttccataaagatgcctctattttctgaattttccttttcgtcgtgatttctcaaaactaactcgaaactccacaaaaccatatagatataatttttaatttgattcaaaacatatcgattcttatccacttcttgttcattgtgtttaattagactatcacgataagctgaatttaactcgggttttattaaaattaaaaattttaaattacttaaaaatataatagtttataataaaaagtttaatcattaaaaatgtaataattataaatacaaaaacgagcgagcgagcgcgtaaaaaaactcgaaaagataatgtaggtactaccctgtacgagaagctttttggatctgatctacgatccactattcactatgatgagcatagtaaaaaatattagatcttcctgccttgtcgagccaggcacgaatagtttcatttaaacgtgtattaaaagtgcaatatagctctatctctgtcacttacatagaatgcccgtaaaatctttctcttttcagccgagccatctaagcttttggcacgatgcgatcatcccgtccgctgtgagtggcgaggattgtactacactgcacagttgccagattttatataatttataaagagaaaagaaatacgcacaaaaaatgaacgggcattaaaacggtttaaagataaaaaatatgtttctgcataaaaattctgcaccggccgccactggcgtatgcagaatatttcgattaaactaaaattccaaaatttcgttctgcattatgcaaaacttgatttatgtttatataaattataaacatgtaaattttggtgctattaaattaagtgtaaaattattaggcatggtaaagttataaaaaaataaccaaatcttttgtttgttaaaattcttagaagtaacaagttaattaactatttaaagttattaataaacaattagaaggtaaagtgaaataaaaccacttctaattcgatttctatgaaaaaagtcaatatatgtggaaaaatttaaaatttcttcaatactgtttccttggtttttacgctaccaaaatacgtttgatttatcgagtcacatcgaaactatcaatgtattaataaatttgtaatgttcattagtcatttaatattaaaatttttaggattacatgtcattattgcgtaatatagttttgcatttcaaagctagtcctattgaactggattctacttgttaggaaaaaagaaatgattagaaatttcataaatcttttacaattttcaatattccatgaatgtctttttgctgtttcaaaatttcatttaaatcaaatttcaagacaatctatatttgctttatagctgcctttagttattaaatttgtactatattcctgatccgataaaattggtggtagataaagattgatttttaacattattaggtttgggctaagtatctactagtctgggtatgtctagcgttacaatgtataacgtatactgcgaataacgtgcgcaaaatggcgattttcgctaagagttacctaaggcccgtccggcgaaacgatcagattttctgcattcattcagtggcgtattttcaagaagttagttaatatattattatgtgtctttatgtaaattttagaatggcttctttatttttgattcaaataatggatatgttaaataatttattagtcgattaaaaatacgctataacctagaccttaagatatataaaattattgttaatttgtccgttaacattttgctatttaataagggccgccgtagctcaggctgtaggatatctgactcgcatgctggtaggccggggttcgaaacccgcgccggcgagaacatctagacatttttaaaaatgtctataggccccaggtcgactcagcctgaataaaattagtactttgggtaaaaccaggggtaataataggcggttgaagcgtagcactgaccctgttacctttcttgtataccgtaggcactagatatagcagactaccctgctataatcccaaagccgctttagcggtataaaacgggagactattataataacagatacagataatagatttttttttaattactgtgatgcatgctgtattctttcagtttcggctcaggaaatattatttgttaacttcctcagaaattgtgtgcagataataagttaatacaatctaaccccaatttttaatatacacaggaatcgacacgtttttttatattatttcataaaaatttttacacacctacttaaaacgagtcttttaatagtgaattagtgatgctgccaaatatttatgaacccaatttatcaaacttaatgttgtacttaggttacatcataatcttaattgtgaacactgactacatatcccttaaatgtaactttatcagtctttccattttttactactgatatacccttgtctatgtcaaaaaatagtataaacttgtgatatatgaaatatagtaattttggattttaatatatttataaatgttcttaaga

SEQ ID NO: 361 - DNA, 5485 bp, Diabrotica virgifera
  SmartBlast Evalue=5E-27; Info=Endonuclease-reverse transcriptase n=1 Tax=Bombyx mori RepID=D5LB38_BOMMO
gcctgttatgtacgaatcatgacattcctgtctgatacagttagtcattattattatttcctggcgtataatattatagtttcttagtattttgtgtacatataagatatggcccgcaaatatcttactgaggccgagttacaggaaataattgttactgctagcgatttttatgatgatatagaagatgaaatagtatcagaaaacgataatgtattgttagatgaagatttaaatgctgaaaacattcattccaggtcatttttgacctggggtaattttttacccccgttggtcatccgtgtaacaaaaaaggttggtcatcggaaggttaaagcaatctcaagcttcaaccacagaatttagcggtgcaaaggcttgttacgatttttttttctcaccgagttaaataaaaataaatgactgttccattaacattaactgttccattaactgttttgttgcatgtataagcacatcaatattttcaaaatatgaatgaaaatgttcatcatcacgccaaaattttcttccaagatactgtgatgccattatattgttatttttggttttcgccaactacttatatgatttccaattaaagctggagaaggttttggtcaaatgtagcttgacaattattttataaattgcggatatcatcacattattttaaggtatccaacgatagctttatcgcattttgtattcatttttgaattatacaaaaacacattttgactaaaagcttcacgtctttttttgattacatttttgataatcttccacgtgcagaccaaagacaaacgaaaaagaaaattctcgtaaaagaatcaaatataagtacactttttggagtatatgtattataatttataactaattcactaatcaactattgtccttttcatgatcatttttcagtgcgtaacaaatgatatgaaaaagggtaagtccgtgataatacacatttatgacatttattctaacatgacattttagttaaatctgacagttgtcacattttattttcaatttggaataaaaacaaatcaaatgtgtttcttgcatttataaaatggtattttctttgatttgtatagtcttataaattatacagattatatttgtaatattattatctaattaaaaaaaatatttttttattatggcgccatctatcgacaactagaataactagaataaatgttataaaaatgtcaccgacgaaatgtaatcaccgacgtgcctttttttctgtcacatacaatttaatgcgttagaaagaaatcgaaaaactgtgacgcactgaaagatgatcatgagaaatactgtataatctgaatttacataatatatcgtattcctaaagtcgaaaatgtaatttttcgactttgggatcggttatttcgaatttggtttgagatatcaaactcgcaagatgatattccttcttcttcttaaagtgcccatccgttctggatgttggcgatcatcatggctatcttgactttgtttaccacagcgcgaaatagttcagcggtagtcgtgttataccactttcgtaaattttgaagccaggaaatgcgtcttcttcccggtcctcttttaccatccgttggagaaggccgtagcatttctcattacatgtcctagatattctaattttttcgttatgatggtcatgagaatttcacactctttccccattctacgcagtacttctacattagtaattcggtcaacccaggatatacgtaagatgcgcctataacaccacatttcgaaagcttcggaccgattcatagatgcaacagttagtgtccacgcttccattccgtagagcagaactgtaaatatgtatcatttcaacagacggtattttgtttttaatgatatgtctagactctagactattgaaaaagggtctcattccaacgaatgctgcttttgcttttattattcactgtttaatttctgttgagtgggtccattggctatttaaattggtgcctagatatgtatattgctccactctttcaatattctgttgtttgattgtaagttgagtgtttagtatgattttcctaaactaggtaaaaaacacattgatttgatacctatatcatatgccataaatcaaaaattcgattttttgactttgaggtcggttgatatcgaaatggtttttaaatttggattcaggagacaaactgcataagaatccatcgtagatcgactcacaagtatttcaggggcggcgatgtacaaacgaacgaatcaacgaacagactttgcgaatttatatacgaaaacgaagttttcgttgaaaataaatgaattcatcgattaagctgtccttagtagcaaagtaatgtaaagcatgtagtgctatcaaacgctgtattgcgtatgccagtggcggctcgtatcactttaagtaggtagtgccagaattcgggcagctgcctaaatttttagtgacgggttcacaatattgtcaaaaaaggtataaaatagaaattaaaaaaaataggtacggatatttttacattatgtaggtatataccatttctggggtgtcaagaaatttaaacatttaaaatgcattcagtgattgatttgacatcatgtccgtccaacaagtaaaatctccaaaatctctcaacttatcgccctttacacaaatatcggaaaactataactaactgaaattcaccagcgacgcgacgtctgtcgtttcatcggcaatcactgcaacacaaagataattttcaatttctttccttatttcctcgtgataaacatctaagatgcactgaaggagttcattttgtgttgttttgaggtacatgcttttaaagatttggaactttgaatatgaaccgaagtcgttgtctaattcggctaacattgaacagttccataaagatgcctctattttctgaattttccttttcgtcgtgatttctcaaaactaactcgaaactccacaaaaccatatagatataatttttaatttgattcaaaacatatcgattcttatccacttcttgttcattgtgtttaattagactatcacgataagctgaatttaactcgggttttattaaaattaaaaattttaaattacttaaaaatataatagtttataataaaaagtttaatcattatgtaataaatacaaaaacgagcgagcgagcgcataaaaaaactggaaaatataatgtactaccctgtacgagaatctttttggatctacgatccactattcactcactattcactatgatgagcatagtaaaaaatattagatcttccttgtccttgtcgagcatcttgttgagccaggcacgaatagtctcatttaaacgtgtattaaaagtgcaatatagctctacctctgtcacttatatagaatgcccgtaaaatctttctcttttcagccgagccatctaagcttttggcacgatgcgatcatcccgtccgctgtctgtgagtggcgagggttgtactacactgcacagttgccagattttatataatttataaagagaaaagaaatacgcacaaaaaatgaacgggcattaaaacggtttaaagataaaaaaaaaatatgtttctgcataaaaataaggtagtgtcatggcactacctcaccggccgccactggcgtatgcagaatatttcaaataaactaaaattccagaatttcgttctgcattatacaaaacttgatttatgtttatataaattataaacatgtaaattttggtgctattaaattaagtgtaaaattattaggcatggtaaagttataaaaaaataaccaaatcttttgtttgttaaaattcttagaagtaacaagttaattaactatttaaagttattaataaacaattagaaggtaaagtgaaataaaaccacttctaattcgatttctatgaaaaaagtcaatatatgtggaaaaatttaaaatttcttcaatactgtttccttggtttttacgctaccaaaatacgtttgatttatcgagtcacatcgaaactatcaatgtattaataaatttgtaatgttcattagtcatttaatattaaaatttttaggattacatgtcattattgcgtaatatagttttgcatttcaaagctagtcctattgaactggattctacttgttaggaaaaaagaaatgattagaaatttcataaatcttttacaattttcaatattccatgaatgtctttttgctgtttcaaaatttcatttaaatcaaatttcaagacaatctatatttgctttatagctgcctttagttattaaatttgtactatattcctgatccgataaaattggtggtagataaagattgatttttaacattattaggtttgggctaagtatctactagtctgggtatgtctagcgttacaatgtataacgtatactgcgaataacgtgcgcaaaatggcgattttcgctaagagttacctaaggcccgtccggcgaaacgatcagattttctgcattcattcagtggcgtattttcaagaagttagttaatatattattatgtgtctttatgtaaattttagaatggcttctttatttttgattcaaataatggatatgttaaataatttattagtcgattaaaaatacgctataacctagaccttaagatatataaaattattgttaatttgtccgttaacattttgctatttaataagggccgccgtagctcaggctgtaggatatctgactcgcatgctggtaggccggggttcgaaacccgcgccggcgagaacatctagacatttttaaaaatgtctataggccccaggtcgactcagcctgaataaaattagtactttgggtaaaaccaggggtaataataggcggttgaagcgtagcactgaccctgttacctttcttgtataccgtaggcactagatatagcagactaccctgctataatcccaaagccgctttagcggtataaaacgggagactattataataacagatacagataatagatttttttttaattactgtgatgcatgctgtattctttcagtttcggctcaggaaatattatttgttaacttcctcagaaattgtgtgcagataataagttaatacaatctaaccccaatttttaatatacacaggaatcgacacgtttttttatattatttcataaaaatttttacacacctacttaaaacgagtcttttaatagtgaattagtgatgctgccaaatatttatgaacccaatttatcaaacttaatgttgtacttaggttacatcataatcttaattgtgaacactgactacatatcccttaaatgtaactttatcagtctttccattttttactactgatatacccttgtctatgtcaaaaaatagtataaacttgtgatatatgaaatatagtaattttggattttaatatatttataaatgttcttaaga

SEQ ID NO: 362 - DNA, 5479 bp, Diabrotica virgifera
  SmartBlast Evalue=5E-27; Info=Endonuclease-reverse transcriptase n=1 Tax=Bombyx mori RepID=D5LB38_BOMMO
gcctgttatgtacgaatcatgacattcctgtctgatacagttagtcattattattatttcctggcgtataatattatagtttcttagtattttgtgtacatataagatatggcccgcaaatatcttactgaggccgagttacaggaaataattgttactgctagcgatttttatgatgatatagaagatgaaatagtatcagaaaacgataatgtattgttagatgaagatttaaatgctgaaaacattcattccaggtcatttttgacctggggtaattttttacccccgttggtcatccgtgtaacaaaaaaggttggtcatcggaaggttaaagcaatctcaagcttcaaccacagaatttagcggtgcaaaggcttgttacgatttttttttctcaccgagttaaataaaaataaatgactgttccattaacattaactgttccattaactgttttgttgcatgtataagcacatcaatattttcaaaatatgaatgaaaatgttcatcatcacgccaaaattttcttccaagatactgtgatgccattatattgttatttttggttttcgccaactacttatatgatttccaattaaagctggagaaggttttggtcaaatgtagcttgacaattattttataaattgcggatatcatcacattattttaaggtatccaacgatagctttatcgcattttgtattcatttttgaattatacaaaaacacattttgactaaaagcttcacgtctttttttgattacatttttgataatcttccacgtgcagaccaaagacaaacgaaaaagaaaattctcgtaaaagaatcaaatataagtacactttttggagtatatgtattataatttataactaattcactaatcaactattgtccttttcatgatcatttttcagtgcgtaacaaatgatatgaaaaagggtaagtccgtgataatacacatttatgacatttattctaacatgacattttagttaaatctgacagttgtcacattttattttcaatttggaataaaaacaaatcaaatgtgtttcttgcatttataaaatggtattttctttgatttgtatagtcttataaattatacagattatatttgtaatattattatctaattaaaaaaaatatttttttattatggcgccatctatcgacaactagaataactagaataaatgttataaaaatgtcaccgacgaaatgtaatcaccgacgtgcctttttttctgtcacatacaatttaatgcgttagaaagaaatcgaaaaactgtgacgcactgaaagatgatcatgagaaatactgtataatctgaatttacataatatatcgtattcctaaagtcgaaaatgtaatttttcgactttgggatcggttatttcgaatttggtttgagatatcaaactcgcaagatgatattccttcttcttcttaaagtgcccatccgttctggatgttggcgatcatcatggctatcttgactttgtttaccacagcgcgaaatagttcagcggtagtcgtgttataccactttcgtaaattttgaagccaggaaatgcgtcttcttcccggtcctcttttaccatccgttggagaaggccgtagcatttctcattacatgtcctagatattctaattttttcgttatgatggtcatgagaatttcacactctttccccattctacgcagtacttctacattagtaattcggtcaacccaggatatacgtaagatgcgcctataacaccacatttcgaaagcttcggaccgattcatagatgcaacagttagtgtccacgcttccattccgtagagcagaactgtaaatatgtatcatttcaacagacggtattttgtttttaatgatatgtctagactctagactattgaaaaagggtctcattccaacgaatgctgcttttgcttttattattcactgtttaatttctgttgagtgggtccattggctatttaaattggtgcctagatatgtatattgctccactctttcaatattctgttgtttgattgtaagttgagtgtttagtatgattttcctaaactaggtaaaaaacacattgatttgatacctatatcatatgccataaatcaaaaattcgattttttgactttgaggtcggttgatatcgaaatggtttttaaatttggattcaggagacaaactgcataagaatccatcgtagatcgactcacaagtatttcaggggcggcgatgtacaaacgaacgaatcaacgaacagactttgcgaatttatatacgaaaacgaagttttcgttgaaaataaatgaattcatcgattaagctgtccttagtagcaaagtaatgtaaagcatgtagtgctatcaaacgctgtattgcgtatgccagtggcggctcgtatcactttaagtaggtagtgccagaattcgggcagctgcctaaatttttagtgacgggttcacaatattgtcaaaaaaggtataaaatagaaattaaaaaaaataggtacggatatttttacattatgtaggtatataccatttctggggtgtcaagaaatttaaacatttaaaatgcattcagtgattgatttgacatcatgtccgtccaacaagtaaaatctccaaaatctctcaacttatcgccctttacacaaatatcggaaaactataactaactgaaattcaccagcgacgcgacgtctgtcgtttcatcggcaatcactgcaacacaaagataattttcaatttctttccttatttcctcgtgataaacatctaagatgcactgaaggagttcattttgtgttgttttgaggtacatgcttttaaagatttggaactttgaatatgaaccgaagtcgttgtctaattcggctaacattgaacagttccataaagatgcctctattttctgaattttccttttcgtcgtgatttctcaaaactaactcgaaactccacaaaaccatatagatataatttttaatttgattcaaaacatatcgattcttatccacttcttgttcattgtgtttaattagactatcacgataagctgaatttaactcgggttttattaaaattaaaaattttaaattacttaaaaatataatagtttataataaaaagtttaatcattaaaaatgtaataattataaatacaaaaacgagcgagcgagcgcgtaaaaaaactcgaaaagataatgtaggtactaccctgtacgagaagctttttggatctgatctacgatccactattcactatgatgagcatagtaaaaaatattagatcttcctgccttgtcgagccaggcacgaatagtttcatttaaacgtgtattaaaagtgcaatatagctctatctctgtcacttacatagaatgcccgtaaaatctttctcttttcagccgagccatctaagcttttggcacgatgcgatcatcccgtccgctgtctgtgagtggcgagggttgtactacactgcacagttgccagattttatataatttataaagagaaaagaaatacgcacaaaaaatgaacgggcattaaaacggtttaaagataaaaaaaaaatatgtttctgcataaaaataaggtagtgtcatggcactacctcaccggccgccactggcgtatgcagaatatttcaaataaactaaaattccagaatttcgttctgcattatacaaaacttgatttatgtttatataaattataaacatgtaaattttggtgctattaaattaagtgtaaaattattaggcatggtaaagttataaaaaaataaccaaatcttttgtttgttaaaattcttagaagtaacaagttaattaactatttaaagttattaataaacaattagaaggtaaagtgaaataaaaccacttctaattcgatttctatgaaaaaagtcaatatatgtggaaaaatttaaaatttcttcaatactgtttccttggtttttacgctaccaaaatacgtttgatttatcgagtcacatcgaaactatcaatgtattaataaatttgtaatgttcattagtcatttaatattaaaatttttaggattacatgtcattattgcgtaatatagttttgcatttcaaagctagtcctattgaactggattctacttgttaggaaaaaagaaatgattagaaatttcataaatcttttacaattttcaatattccatgaatgtctttttgctgtttcaaaatttcatttaaatcaaatttcaagacaatctatatttgctttatagctgcctttagttattaaatttgtactatattcctgatccgataaaattggtggtagataaagattgatttttaacattattaggtttgggctaagtatctactagtctgggtatgtctagcgttacaatgtataacgtatactgcgaataacgtgcgcaaaatggcgattttcgctaagagttacctaaggcccgtccggcgaaacgatcagattttctgcattcattcagtggcgtattttcaagaagttagttaatatattattatgtgtctttatgtaaattttagaatggcttctttatttttgattcaaataatggatatgttaaataatttattagtcgattaaaaatacgctataacctagaccttaagatatataaaattattgttaatttgtccgttaacattttgctatttaataagggccgccgtagctcaggctgtaggatatctgactcgcatgctggtaggccggggttcgaaacccgcgccggcgagaacatctagacatttttaaaaatgtctataggccccaggtcgactcagcctgaataaaattagtactttgggtaaaaccaggggtaataataggcggttgaagcgtagcactgaccctgttacctttcttgtataccgtaggcactagatatagcagactaccctgctataatcccaaagccgctttagcggtataaaacgggagactattataataacagatacagataatagatttttttttaattactgtgatgcatgctgtattctttcagtttcggctcaggaaatattatttgttaacttcctcagaaattgtgtgcagataataagttaatacaatctaaccccaatttttaatatacacaggaatcgacacgtttttttatattatttcataaaaatttttacacacctacttaaaacgagtcttttaatagtgaattagtgatgctgccaaatatttatgaacccaatttatcaaacttaatgttgtacttaggttacatcataatcttaattgtgaacactgactacatatcccttaaatgtaactttatcagtctttccattttttactactgatatacccttgtctatgtcaaaaaatagtataaacttgtgatatatgaaatatagtaattttggattttaatatatttataaatgttcttaaga

SEQ ID NO: 363 - DNA, 5434 bp, Diabrotica virgifera
  SmartBlast Evalue=5E-27; Info=Endonuclease-reverse transcriptase n=1 Tax=Bombyx mori RepID=D5LB38_BOMMO
gcaaatctagtattttgttgatttatggtatacagccagctacaggaagtttattttccttttcgattttgattttattacctccaaagctagaacgaaaagagtttgatctggaattgagcatggagtatactggagtattctggagaatttttttgcaggatctgtcaattatcgtttctttagcacctttctggatgttggcgatcagcatggctatcctaacttcgcttgctgctattcgcaatagtccagttgtcgatgtattgaaccactttcgcaggttttgaagcctagatatcgtagaatatttgtagatataacgtagaaaatacatagcttctgaaaagagacttcatcattatgaactctgatctcgcttttcctatgtgttgttttatttcatttgtgtggtcccactggctgtttatgttagtaccaaggaatgtgtaactgtccaccctgtcaattggttgttggttaaccaaaaactgtgtatttaatatttcgcgcttactgactaccatgtactttgtttttttttcgtattgagatcaactccgtgttctttacttatttatatctgatatgcgcgacattattctttactgtgacaatatacagtgtattgtccttttcatgacatttttcagtgcgtaacaaatgataggaaaaagggtaagtccgtgataatacacatttatgacatttattctaacatgacattttagttaaatctgacagttgtcacattttattttcaatttggaataaaaacaaatcaaatgtgtttcttgcatttataaaatggtattttctttgatttgtatagtcttataaattatacagattatatttgtaatattattatctaattaaaaaaaatatttttttattatggcgccatctatcgacaactagaataactagaataaatgttataaaaatgtcaccgacgaaatgtaatcaccgacgtgcctttttttctgtcacatacaatttaatgcgttagaaagaaatcgaaaaactgtgacgcactgaaagatgatcatgagaaatactgtataatctgaatttacataatatatcgtattcctaaagtcgaaaatgtaatttttcgactttgggatcggttatttcgaatttggtttgagatatcaaactcgcaagatgatattccttcttcttcttaaagtgcccatccgttctggatgttggcgatcatcatggctatcttgactttgtttaccacagcgcgaaatagttcagcggtagtcgtgttataccactttcgtaaattttgaagccaggaaatgcgtcttcttcccggtcctcttttaccatccgttggagaaggccgtagcatttctcattacatgtcctagatattctaattttttcgttatgatggtcatgagaatttcacactctttccccattctacgcagtacttctacattagtaattcggtcaacccaggatatacgtaagatgcgcctataacaccacatttcgaaagcttcggaccgattcatagatgcaacagttagtgtccacgcttccattccgtagagcagaactgtaaatatgtatcatttcaacagacggtattttgtttttaatgatatgtctagactctagactattgaaaaagggtctcattccaacgaatgctgcttttgcttttattattcactgtttaatttctgttgagtgggtccattggctatttaaattggtgcctagatatgtatattgctccactctttcaatattctgttgtttgattgtaagttgagtgtttagtatgattttcctaaactaggtaaaaaacacattgatttgatacctatatcatatgccataaatcaaaaattcgattttttgactttgaggtcggttgatatcgaaatggtttttaaatttggattcaggagacaaactgcataagaatccatcgtagatcgactcacaagtatttcaggggcggcgatgtacaaacgaacgaatcaacgaacagactttgcgaatttatatacgaaaacgaagttttcgttgaaaataaatgaattcatcgattaagctgtccttagtagcaaagtaatgtaaagcatgtagtgctatcaaacgctgtattgcgtatgccagtggcggctcgtatcactttaagtaggtagtgccagaattcgggcagctgcctaaatttttagtgacgggttcacaatattgtcaaaaaaggtataaaatagaaattaaaaaaaataggtacggatatttttacattatgtaggtatataccatttctggggtgtcaagaaatttaaacatttaaaatgcattcagtgattgatttgacatcatgtccgtccaacaagtaaaatctccaaaatctctcaacttatcgccctttacacaaatatcggaaaactataactaactgaaattcaccagcgacgcgacgtctgtcgtttcatcggcaatcactgcaacacaaagataattttcaatttctttccttatttcctcgtgataaacatctaagatgcactgaaggagttcattttgtgttgttttgaggtacatgcttttaaagatttggaactttgaatatgaaccgaagtcgttgtctaattcggctaacattgaacagttccataaagatgcctctattttctgaattttccttttcgtcgtgatttctcaaaactaactcgaaactccacaaaaccatatagatataatttttaatttgattcaaaacatatcgattcttatccacttcttgttcattgtgtttaattagactatcacgataagctgaatttaactcgggttttattaaaattaaaaattttaaattacttaaaaatataatagtttataataaaaagtttaatcattatgtaataaatacaaaaacgagcgagcgagcgcataaaaaaactggaaaatataatgtactaccctgtacgagaatctttttggatctacgatccactattcactcactattcactatgatgagcatagtaaaaaatattagatcttccttgtccttgtcgagcatcttgttgagccaggcacgaatagtctcatttaaacgtgtattaaaagtgcaatatagctctacctctgtcacttatatagaatgcccgtaaaatctttctcttttcagccgagccatctaagcttttggcacgatgcgatcatcccgtccgctgtctgtgagtggcgagggttgtactacactgcacagttgccagattttatataatttataaagagaaaagaaatacgcacaaaaaatgaacgggcattaaaacggtttaaagataaaaaaaaaatatgtttctgcataaaaataaggtagtgtcatggcactacctcaccggccgccactggcgtatgcagaatatttcaaataaactaaaattccagaatttcgttctgcattatacaaaacttgatttatgtttatataaattataaacatgtaaattttggtgctattaaattaagtgtaaaattattaggcatggtaaagttataaaaaaataaccaaatcttttgtttgttaaaattcttagaagtaacaagttaattaactatttaaagttattaataaacaattagaaggtaaagtgaaataaaaccacttctaattcgatttctatgaaaaaagtcaatatatgtggaaaaatttaaaatttcttcaatactgtttccttggtttttacgctaccaaaatacgtttgatttatcgagtcacatcgaaactatcaatgtattaataaatttgtaatgttcattagtcatttaatattaaaatttttaggattacatgtcattattgcgtaatatagttttgcatttcaaagctagtcctattgaactggattctacttgttaggaaaaaagaaatgattagaaatttcataaatcttttacaattttcaatattccatgaatgtctttttgctgtttcaaaatttcatttaaatcaaatttcaagacaatctatatttgctttatagctgcctttagttattaaatttgtactatattcctgatccgataaaattggtggtagataaagattgatttttaacattattaggtttgggctaagtatctactagtctgggtatgtctagcgttacaatgtataacgtatagtgcgaataacgtgcgcaaaatggcgattttcgctaagagttacctaaggcccgtccggcgaaacgatcggattttctgtattcattcagtggcgtattttcaagaagttagttaatatattattatgtgtctttatgtaaattttagaatggcttctttatttttgattcaaataatggatatgttaaatgatttattagtcgattaaaaatacgctataacctagaccagaggttctcaatctttttgagtcaggtaccaccaaatactttttattatttttggtaccacctaactaaaatacctgtctagctaggtgatctaattaactataattgtgccaatggtggtgctgattttggctgttttgactttgcgtaccacctcaaataatgaaatgtaccaccagtggtacatgtaccagagattgagaaccgctgacctagaccttaagatatataaaattattgttaatttgtccgttaacattttgctatttaataagggccggcgtagctcaggctgtaggatatctgactcgcatgctggtaggccggggttcgaaacccgcgccggcgagaacatctagacatttttaaaaatgtctataggccccaggtcgactcagcctgaataaaattagtactttgggtaaaaccaggggtaataataggcggttgaagcgtagcactgaccctgttacctttcttgtataccgtaggcactagatatagcagactaccctgctataatcccaaagccgctttagcggtataaaacgggagactattataataacagatacagataatagatttttttttaattactgtgatgcatgctgtattctttcagtttcggctcaggaaatattatttgttaacttcctcagaaattgtgtgcagataataagttaatacaatctaaccccaatttttaatatacacaggaatcgacacgtttttttatattatttcataaaaatttttacacacctacttaaaacgagtcttttaatagtgaattagtgatgctgccaaatatttatgaacccaatttatcaaacttaatgttgtacttaggttacatcataatcttaattgtgaacactgactacatatcccttaaatgtaactttatcagtctttccattttttactactgatatacccttgtctatgtcaaaaaatagtataaacttgtgatatatgaaatatagtaattttggattttaatatatttataaatgttcttaaga

SEQ ID NO: 364 - DNA, 5428 bp, Diabrotica virgifera
  SmartBlast Evalue=5E-27; Info=Endonuclease-reverse transcriptase n=1 Tax=Bombyx mori RepID=D5LB38_BOMMO
gcaaatctagtattttgttgatttatggtatacagccagctacaggaagtttattttccttttcgattttgattttattacctccaaagctagaacgaaaagagtttgatctggaattgagcatggagtatactggagtattctggagaatttttttgcaggatctgtcaattatcgtttctttagcacctttctggatgttggcgatcagcatggctatcctaacttcgcttgctgctattcgcaatagtccagttgtcgatgtattgaaccactttcgcaggttttgaagcctagatatcgtagaatatttgtagatataacgtagaaaatacatagcttctgaaaagagacttcatcattatgaactctgatctcgcttttcctatgtgttgttttatttcatttgtgtggtcccactggctgtttatgttagtaccaaggaatgtgtaactgtccaccctgtcaattggttgttggttaaccaaaaactgtgtatttaatatttcgcgcttactgactaccatgtactttgtttttttttcgtattgagatcaactccgtgttctttacttatttatatctgatatgcgcgacattattctttactgtgacaatatacagtgtattgtccttttcatgacatttttcagtgcgtaacaaatgataggaaaaagggtaagtccgtgataatacacatttatgacatttattctaacatgacattttagttaaatctgacagttgtcacattttattttcaatttggaataaaaacaaatcaaatgtgtttcttgcatttataaaatggtattttctttgatttgtatagtcttataaattatacagattatatttgtaatattattatctaattaaaaaaaatatttttttattatggcgccatctatcgacaactagaataactagaataaatgttataaaaatgtcaccgacgaaatgtaatcaccgacgtgcctttttttctgtcacatacaatttaatgcgttagaaagaaatcgaaaaactgtgacgcactgaaagatgatcatgagaaatactgtataatctgaatttacataatatatcgtattcctaaagtcgaaaatgtaatttttcgactttgggatcggttatttcgaatttggtttgagatatcaaactcgcaagatgatattccttcttcttcttaaagtgcccatccgttctggatgttggcgatcatcatggctatcttgactttgtttaccacagcgcgaaatagttcagcggtagtcgtgttataccactttcgtaaattttgaagccaggaaatgcgtcttcttcccggtcctcttttaccatccgttggagaaggccgtagcatttctcattacatgtcctagatattctaattttttcgttatgatggtcatgagaatttcacactctttccccattctacgcagtacttctacattagtaattcggtcaacccaggatatacgtaagatgcgcctataacaccacatttcgaaagcttcggaccgattcatagatgcaacagttagtgtccacgcttccattccgtagagcagaactgtaaatatgtatcatttcaacagacggtattttgtttttaatgatatgtctagactctagactattgaaaaagggtctcattccaacgaatgctgcttttgcttttattattcactgtttaatttctgttgagtgggtccattggctatttaaattggtgcctagatatgtatattgctccactctttcaatattctgttgtttgattgtaagttgagtgtttagtatgattttcctaaactaggtaaaaaacacattgatttgatacctatatcatatgccataaatcaaaaattcgattttttgactttgaggtcggttgatatcgaaatggtttttaaatttggattcaggagacaaactgcataagaatccatcgtagatcgactcacaagtatttcaggggcggcgatgtacaaacgaacgaatcaacgaacagactttgcgaatttatatacgaaaacgaagttttcgttgaaaataaatgaattcatcgattaagctgtccttagtagcaaagtaatgtaaagcatgtagtgctatcaaacgctgtattgcgtatgccagtggcggctcgtatcactttaagtaggtagtgccagaattcgggcagctgcctaaatttttagtgacgggttcacaatattgtcaaaaaaggtataaaatagaaattaaaaaaaataggtacggatatttttacattatgtaggtatataccatttctggggtgtcaagaaatttaaacatttaaaatgcattcagtgattgatttgacatcatgtccgtccaacaagtaaaatctccaaaatctctcaacttatcgccctttacacaaatatcggaaaactataactaactgaaattcaccagcgacgcgacgtctgtcgtttcatcggcaatcactgcaacacaaagataattttcaatttctttccttatttcctcgtgataaacatctaagatgcactgaaggagttcattttgtgttgttttgaggtacatgcttttaaagatttggaactttgaatatgaaccgaagtcgttgtctaattcggctaacattgaacagttccataaagatgcctctattttctgaattttccttttcgtcgtgatttctcaaaactaactcgaaactccacaaaaccatatagatataatttttaatttgattcaaaacatatcgattcttatccacttcttgttcattgtgtttaattagactatcacgataagctgaatttaactcgggttttattaaaattaaaaattttaaattacttaaaaatataatagtttataataaaaagtttaatcattaaaaatgtaataattataaatacaaaaacgagcgagcgagcgcgtaaaaaaactcgaaaagataatgtaggtactaccctgtacgagaagctttttggatctgatctacgatccactattcactatgatgagcatagtaaaaaatattagatcttcctgccttgtcgagccaggcacgaatagtttcatttaaacgtgtattaaaagtgcaatatagctctatctctgtcacttacatagaatgcccgtaaaatctttctcttttcagccgagccatctaagcttttggcacgatgcgatcatcccgtccgctgtctgtgagtggcgagggttgtactacactgcacagttgccagattttatataatttataaagagaaaagaaatacgcacaaaaaatgaacgggcattaaaacggtttaaagataaaaaaaaaatatgtttctgcataaaaataaggtagtgtcatggcactacctcaccggccgccactggcgtatgcagaatatttcaaataaactaaaattccagaatttcgttctgcattatacaaaacttgatttatgtttatataaattataaacatgtaaattttggtgctattaaattaagtgtaaaattattaggcatggtaaagttataaaaaaataaccaaatcttttgtttgttaaaattcttagaagtaacaagttaattaactatttaaagttattaataaacaattagaaggtaaagtgaaataaaaccacttctaattcgatttctatgaaaaaagtcaatatatgtggaaaaatttaaaatttcttcaatactgtttccttggtttttacgctaccaaaatacgtttgatttatcgagtcacatcgaaactatcaatgtattaataaatttgtaatgttcattagtcatttaatattaaaatttttaggattacatgtcattattgcgtaatatagttttgcatttcaaagctagtcctattgaactggattctacttgttaggaaaaaagaaatgattagaaatttcataaatcttttacaattttcaatattccatgaatgtctttttgctgtttcaaaatttcatttaaatcaaatttcaagacaatctatatttgctttatagctgcctttagttattaaatttgtactatattcctgatccgataaaattggtggtagataaagattgatttttaacattattaggtttgggctaagtatctactagtctgggtatgtctagcgttacaatgtataacgtatagtgcgaataacgtgcgcaaaatggcgattttcgctaagagttacctaaggcccgtccggcgaaacgatcggattttctgtattcattcagtggcgtattttcaagaagttagttaatatattattatgtgtctttatgtaaattttagaatggcttctttatttttgattcaaataatggatatgttaaatgatttattagtcgattaaaaatacgctataacctagaccagaggttctcaatctttttgagtcaggtaccaccaaatactttttattatttttggtaccacctaactaaaatacctgtctagctaggtgatctaattaactataattgtgccaatggtggtgctgattttggctgttttgactttgcgtaccacctcaaataatgaaatgtaccaccagtggtacatgtaccagagattgagaaccgctgacctagaccttaagatatataaaattattgttaatttgtccgttaacattttgctatttaataagggccggcgtagctcaggctgtaggatatctgactcgcatgctggtaggccggggttcgaaacccgcgccggcgagaacatctagacatttttaaaaatgtctataggccccaggtcgactcagcctgaataaaattagtactttgggtaaaaccaggggtaataataggcggttgaagcgtagcactgaccctgttacctttcttgtataccgtaggcactagatatagcagactaccctgctataatcccaaagccgctttagcggtataaaacgggagactattataataacagatacagataatagatttttttttaattactgtgatgcatgctgtattctttcagtttcggctcaggaaatattatttgttaacttcctcagaaattgtgtgcagataataagttaatacaatctaaccccaatttttaatatacacaggaatcgacacgtttttttatattatttcataaaaatttttacacacctacttaaaacgagtcttttaatagtgaattagtgatgctgccaaatatttatgaacccaatttatcaaacttaatgttgtacttaggttacatcataatcttaattgtgaacactgactacatatcccttaaatgtaactttatcagtctttccattttttactactgatatacccttgtctatgtcaaaaaatagtataaacttgtgatatatgaaatatagtaattttggattttaatatatttataaatgttcttaaga

SEQ ID NO: 365 - DNA, 5458 bp, Diabrotica virgifera
  SmartBlast Evalue=5E-27; Info=Endonuclease-reverse transcriptase n=1 Tax=Bombyx mori RepID=D5LB38_BOMMO
gcctgttatgtacgaatcatgacattcctgtctgatacagttagtcattattattatttcctggcgtataatattatagtttcttagtattttgtgtacatataagatatggcccgcaaatatcttactgaggccgagttacaggaaataattgttactgctagcgatttttatgatgatatagaagatgaaatagtatcagaaaacgataatgtattgttagatgaagatttaaatgctgaaaacattcattccaggtcatttttgacctggggtaattttttacccccgttggtcatccgtgtaacaaaaaaggttggtcatcggaaggttaaagcaatctcaagcttcaaccacagaatttagcggtgcaaaggcttgttacgatttttttttctcaccgagttaaataaaaataaatgactgttccattaacattaactgttccattaactgttttgttgcatgtataagcacatcaatattttcaaaatatgaatgaaaatgttcatcatcacgccaaaattttcttccaagatactgtgatgccattatattgttatttttggttttcgccaactacttatatgatttccaattaaagctggagaaggttttggtcaaatgtagcttgacaattattttataaattgcggatatcatcacattattttaaggtatccaacgatagctttatcgcattttgtattcatttttgaattatacaaaaacacattttgactaaaagcttcacgtctttttttgattacatttttgataatcttccacgtgcagaccaaagacaaacgaaaaagaaaattctcgtaaaagaatcaaatataagtacactttttggagtatatgtattataatttataactaattcactaatcaactattgtccttttcatgatcatttttcagtgcgtaacaaatgatatgaaaaagggtaagtccgtgataatacacatttatgacatttattctaacatgacattttagttaaatctgacagttgtcacattttattttcaatttggaataaaaacaaatcaaatgtgtttcttgcatttataaaatggtattttctttgatttgtatagtcttataaattatacagattatatttgtaatattattatctaattaaaaaaaatatttttttattatggcgccatctatcgacaactagaataactagaataaatgttataaaaatgtcaccgacgaaatgtaatcaccgacgtgcctttttttctgtcacatacaatttaatgcgttagaaagaaatcgaaaaactgtgacgcactgaaagatgatcatgagaaatactgtataatctgaatttacataatatatcgtattcctaaagtcgaaaatgtaatttttcgactttgggatcggttatttcgaatttggtttgagatatcaaactcgcaagatgatattccttcttcttcttaaagtgcccatccgttctggatgttggcgatcatcatggctatcttgactttgtttaccacagcgcgaaatagttcagcggtagtcgtgttataccactttcgtaaattttgaagccaggaaatgcgtcttcttcccggtcctcttttaccatccgttggagaaggccgtagcatttctcattacatgtcctagatattctaattttttcgttatgatggtcatgagaatttcacactctttccccattctacgcagtacttctacattagtaattcggtcaacccaggatatacgtaagatgcgcctataacaccacatttcgaaagcttcggaccgattcatagatgcaacagttagtgtccacgcttccattccgtagagcagaactgtaaatatgtatcatttcaacagacggtattttgtttttaatgatatgtctagactctagactattgaaaaagggtctcattccaacgaatgctgcttttgcttttattattcactgtttaatttctgttgagtgggtccattggctatttaaattggtgcctagatatgtatattgctccactctttcaatattctgttgtttgattgtaagttgagtgtttagtatgattttcctaaactaggtaaaaaacacattgatttgatacctatatcatatgccataaatcaaaaattcgattttttgactttgaggtcggttgatatcgaaatggtttttaaatttggattcaggagacaaactgcataagaatccatcgtagatcgactcacaagtatttcaggggcggcgatgtacaaacgaacgaatcaacgaacagactttgcgaatttatatacgaaaacgaagttttcgttgaaaataaatgaattcatcgattaagctgtccttagtagcaaagtaatgtaaagcatgtagtgctatcaaacgctgtattgcgtatgccagtggcggctcgtatcactttaagtaggtagtgccagaattcgggcagctgcctaaatttttagtgacgggttcacaatattgtcaaaaaaggtataaaatagaaattaaaaaaaataggtacggatatttttacattatgtaggtatataccatttctggggtgtcaagaaatttaaacatttaaaatgcattcagtgattgatttgacatcatgtccgtccaacaagtaaaatctccaaaatctctcaacttatcgccctttacacaaatatcggaaaactataactaactgaaattcaccagcgacgcgacgtctgtcgtttcatcggcaatcactgcaacacaaagataattttcaatttctttccttatttcctcgtgataaacatctaagatgcactgaaggagttcattttgtgttgttttgaggtacatgcttttaaagatttggaactttgaatatgaaccgaagtcgttgtctaattcggctaacattgaacagttccataaagatgcctctattttctgaattttccttttcgtcgtgatttctcaaaactaactcgaaactccacaaaaccatatagatataatttttaatttgattcaaaacatatcgattcttatccacttcttgttcattgtgtttaattagactatcacgataagctgaatttaactcgggttttattaaaattaaaaattttaaattacttaaaaatataatagtttataataaaaagtttaatcattatgtaataaatacaaaaacgagcgagcgagcgcataaaaaaactggaaaatataatgtactaccctgtacgagaatctttttggatctacgatccactattcactcactattcactatgatgagcatagtaaaaaatattagatcttccttgtccttgtcgagcatcttgttgagccaggcacgaatagtctcatttaaacgtgtattaaaagtgcaatatagctctacctctgtcacttatatagaatgcccgtaaaatctttctcttttcagccgagccatctaagcttttggcacgatgcgatcatcccgtccgctgtgagtggcgaggattgtactacactgcacagttgccagattttatataatttataaagagaaaagaaatacgcacaaaaaatgaacgggcattaaaacggtttaaagataaaaaatatgtttctgcataaaaattctgcaccggccgccactggcgtatgcagaatatttcgattaaactaaaattccaaaatttcgttctgcattatgcaaaacttgatttatgtttatataaattataaacatgtaaattttggtgctattaaattaagtgtaaaattattaggcatggtaaagttataaaaaaataaccaaatcttttgtttgttaaaattcttagaagtaacaagttaattaactatttaaagttattaataaacaattagaaggtaaagtgaaataaaaccacttctaattcgatttctatgaaaaaagtcaatatatgtggaaaaatttaaaatttcttcaatactgtttccttggtttttacgctaccaaaatacgtttgatttatcgagtcacatcgaaactatcaatgtattaataaatttgtaatgttcattagtcatttaatattaaaatttttaggattacatgtcattattgcgtaatatagttttgcatttcaaagctagtcctattgaactggattctacttgttaggaaaaaagaaatgattagaaatttcataaatcttttacaattttcaatattccatgaatgtctttttgctgtttcaaaatttcatttaaatcaaatttcaagacaatctatatttgctttatagctgcctttagttattaaatttgtactatattcctgatccgataaaattggtggtagataaagattgatttttaacattattaggtttgggctaagtatctactagtctgggtatgtctagcgttacaatgtataacgtatactgcgaataacgtgcgcaaaatggcgattttcgctaagagttacctaaggcccgtccggcgaaacgatcagattttctgcattcattcagtggcgtattttcaagaagttagttaatatattattatgtgtctttatgtaaattttagaatggcttctttatttttgattcaaataatggatatgttaaataatttattagtcgattaaaaatacgctataacctagaccttaagatatataaaattattgttaatttgtccgttaacattttgctatttaataagggccgccgtagctcaggctgtaggatatctgactcgcatgctggtaggccggggttcgaaacccgcgccggcgagaacatctagacatttttaaaaatgtctataggccccaggtcgactcagcctgaataaaattagtactttgggtaaaaccaggggtaataataggcggttgaagcgtagcactgaccctgttacctttcttgtataccgtaggcactagatatagcagactaccctgctataatcccaaagccgctttagcggtataaaacgggagactattataataacagatacagataatagatttttttttaattactgtgatgcatgctgtattctttcagtttcggctcaggaaatattatttgttaacttcctcagaaattgtgtgcagataataagttaatacaatctaaccccaatttttaatatacacaggaatcgacacgtttttttatattatttcataaaaatttttacacacctacttaaaacgagtcttttaatagtgaattagtgatgctgccaaatatttatgaacccaatttatcaaacttaatgttgtacttaggttacatcataatcttaattgtgaacactgactacatatcccttaaatgtaactttatcagtctttccattttttactactgatatacccttgtctatgtcaaaaaatagtataaacttgtgatatatgaaatatagtaattttggattttaatatatttataaatgttcttaaga

SEQ ID NO: 366 - DNA, 5452 bp, Diabrotica virgifera
  SmartBlast Evalue=5E-27; Info=Endonuclease-reverse transcriptase n=1 Tax=Bombyx mori RepID=D5LB38_BOMMO
gcctgttatgtacgaatcatgacattcctgtctgatacagttagtcattattattatttcctggcgtataatattatagtttcttagtattttgtgtacatataagatatggcccgcaaatatcttactgaggccgagttacaggaaataattgttactgctagcgatttttatgatgatatagaagatgaaatagtatcagaaaacgataatgtattgttagatgaagatttaaatgctgaaaacattcattccaggtcatttttgacctggggtaattttttacccccgttggtcatccgtgtaacaaaaaaggttggtcatcggaaggttaaagcaatctcaagcttcaaccacagaatttagcggtgcaaaggcttgttacgatttttttttctcaccgagttaaataaaaataaatgactgttccattaacattaactgttccattaactgttttgttgcatgtataagcacatcaatattttcaaaatatgaatgaaaatgttcatcatcacgccaaaattttcttccaagatactgtgatgccattatattgttatttttggttttcgccaactacttatatgatttccaattaaagctggagaaggttttggtcaaatgtagcttgacaattattttataaattgcggatatcatcacattattttaaggtatccaacgatagctttatcgcattttgtattcatttttgaattatacaaaaacacattttgactaaaagcttcacgtctttttttgattacatttttgataatcttccacgtgcagaccaaagacaaacgaaaaagaaaattctcgtaaaagaatcaaatataagtacactttttggagtatatgtattataatttataactaattcactaatcaactattgtccttttcatgatcatttttcagtgcgtaacaaatgatatgaaaaagggtaagtccgtgataatacacatttatgacatttattctaacatgacattttagttaaatctgacagttgtcacattttattttcaatttggaataaaaacaaatcaaatgtgtttcttgcatttataaaatggtattttctttgatttgtatagtcttataaattatacagattatatttgtaatattattatctaattaaaaaaaatatttttttattatggcgccatctatcgacaactagaataactagaataaatgttataaaaatgtcaccgacgaaatgtaatcaccgacgtgcctttttttctgtcacatacaatttaatgcgttagaaagaaatcgaaaaactgtgacgcactgaaagatgatcatgagaaatactgtataatctgaatttacataatatatcgtattcctaaagtcgaaaatgtaatttttcgactttgggatcggttatttcgaatttggtttgagatatcaaactcgcaagatgatattccttcttcttcttaaagtgcccatccgttctggatgttggcgatcatcatggctatcttgactttgtttaccacagcgcgaaatagttcagcggtagtcgtgttataccactttcgtaaattttgaagccaggaaatgcgtcttcttcccggtcctcttttaccatccgttggagaaggccgtagcatttctcattacatgtcctagatattctaattttttcgttatgatggtcatgagaatttcacactctttccccattctacgcagtacttctacattagtaattcggtcaacccaggatatacgtaagatgcgcctataacaccacatttcgaaagcttcggaccgattcatagatgcaacagttagtgtccacgcttccattccgtagagcagaactgtaaatatgtatcatttcaacagacggtattttgtttttaatgatatgtctagactctagactattgaaaaagggtctcattccaacgaatgctgcttttgcttttattattcactgtttaatttctgttgagtgggtccattggctatttaaattggtgcctagatatgtatattgctccactctttcaatattctgttgtttgattgtaagttgagtgtttagtatgattttcctaaactaggtaaaaaacacattgatttgatacctatatcatatgccataaatcaaaaattcgattttttgactttgaggtcggttgatatcgaaatggtttttaaatttggattcaggagacaaactgcataagaatccatcgtagatcgactcacaagtatttcaggggcggcgatgtacaaacgaacgaatcaacgaacagactttgcgaatttatatacgaaaacgaagttttcgttgaaaataaatgaattcatcgattaagctgtccttagtagcaaagtaatgtaaagcatgtagtgctatcaaacgctgtattgcgtatgccagtggcggctcgtatcactttaagtaggtagtgccagaattcgggcagctgcctaaatttttagtgacgggttcacaatattgtcaaaaaaggtataaaatagaaattaaaaaaaataggtacggatatttttacattatgtaggtatataccatttctggggtgtcaagaaatttaaacatttaaaatgcattcagtgattgatttgacatcatgtccgtccaacaagtaaaatctccaaaatctctcaacttatcgccctttacacaaatatcggaaaactataactaactgaaattcaccagcgacgcgacgtctgtcgtttcatcggcaatcactgcaacacaaagataattttcaatttctttccttatttcctcgtgataaacatctaagatgcactgaaggagttcattttgtgttgttttgaggtacatgcttttaaagatttggaactttgaatatgaaccgaagtcgttgtctaattcggctaacattgaacagttccataaagatgcctctattttctgaattttccttttcgtcgtgatttctcaaaactaactcgaaactccacaaaaccatatagatataatttttaatttgattcaaaacatatcgattcttatccacttcttgttcattgtgtttaattagactatcacgataagctgaatttaactcgggttttattaaaattaaaaattttaaattacttaaaaatataatagtttataataaaaagtttaatcattaaaaatgtaataattataaatacaaaaacgagcgagcgagcgcgtaaaaaaactcgaaaagataatgtaggtactaccctgtacgagaagctttttggatctgatctacgatccactattcactatgatgagcatagtaaaaaatattagatcttcctgccttgtcgagccaggcacgaatagtttcatttaaacgtgtattaaaagtgcaatatagctctatctctgtcacttacatagaatgcccgtaaaatctttctcttttcagccgagccatctaagcttttggcacgatgcgatcatcccgtccgctgtgagtggcgaggattgtactacactgcacagttgccagattttatataatttataaagagaaaagaaatacgcacaaaaaatgaacgggcattaaaacggtttaaagataaaaaatatgtttctgcataaaaattctgcaccggccgccactggcgtatgcagaatatttcgattaaactaaaattccaaaatttcgttctgcattatgcaaaacttgatttatgtttatataaattataaacatgtaaattttggtgctattaaattaagtgtaaaattattaggcatggtaaagttataaaaaaataaccaaatcttttgtttgttaaaattcttagaagtaacaagttaattaactatttaaagttattaataaacaattagaaggtaaagtgaaataaaaccacttctaattcgatttctatgaaaaaagtcaatatatgtggaaaaatttaaaatttcttcaatactgtttccttggtttttacgctaccaaaatacgtttgatttatcgagtcacatcgaaactatcaatgtattaataaatttgtaatgttcattagtcatttaatattaaaatttttaggattacatgtcattattgcgtaatatagttttgcatttcaaagctagtcctattgaactggattctacttgttaggaaaaaagaaatgattagaaatttcataaatcttttacaattttcaatattccatgaatgtctttttgctgtttcaaaatttcatttaaatcaaatttcaagacaatctatatttgctttatagctgcctttagttattaaatttgtactatattcctgatccgataaaattggtggtagataaagattgatttttaacattattaggtttgggctaagtatctactagtctgggtatgtctagcgttacaatgtataacgtatactgcgaataacgtgcgcaaaatggcgattttcgctaagagttacctaaggcccgtccggcgaaacgatcagattttctgcattcattcagtggcgtattttcaagaagttagttaatatattattatgtgtctttatgtaaattttagaatggcttctttatttttgattcaaataatggatatgttaaataatttattagtcgattaaaaatacgctataacctagaccttaagatatataaaattattgttaatttgtccgttaacattttgctatttaataagggccgccgtagctcaggctgtaggatatctgactcgcatgctggtaggccggggttcgaaacccgcgccggcgagaacatctagacatttttaaaaatgtctataggccccaggtcgactcagcctgaataaaattagtactttgggtaaaaccaggggtaataataggcggttgaagcgtagcactgaccctgttacctttcttgtataccgtaggcactagatatagcagactaccctgctataatcccaaagccgctttagcggtataaaacgggagactattataataacagatacagataatagatttttttttaattactgtgatgcatgctgtattctttcagtttcggctcaggaaatattatttgttaacttcctcagaaattgtgtgcagataataagttaatacaatctaaccccaatttttaatatacacaggaatcgacacgtttttttatattatttcataaaaatttttacacacctacttaaaacgagtcttttaatagtgaattagtgatgctgccaaatatttatgaacccaatttatcaaacttaatgttgtacttaggttacatcataatcttaattgtgaacactgactacatatcccttaaatgtaactttatcagtctttccattttttactactgatatacccttgtctatgtcaaaaaatagtataaacttgtgatatatgaaatatagtaattttggattttaatatatttataaatgttcttaaga

SEQ ID NO: 367 - DNA, 5407 bp, Diabrotica virgifera
  SmartBlast Evalue=5E-27; Info=Endonuclease-reverse transcriptase n=1 Tax=Bombyx mori RepID=D5LB38_BOMMO
gcaaatctagtattttgttgatttatggtatacagccagctacaggaagtttattttccttttcgattttgattttattacctccaaagctagaacgaaaagagtttgatctggaattgagcatggagtatactggagtattctggagaatttttttgcaggatctgtcaattatcgtttctttagcacctttctggatgttggcgatcagcatggctatcctaacttcgcttgctgctattcgcaatagtccagttgtcgatgtattgaaccactttcgcaggttttgaagcctagatatcgtagaatatttgtagatataacgtagaaaatacatagcttctgaaaagagacttcatcattatgaactctgatctcgcttttcctatgtgttgttttatttcatttgtgtggtcccactggctgtttatgttagtaccaaggaatgtgtaactgtccaccctgtcaattggttgttggttaaccaaaaactgtgtatttaatatttcgcgcttactgactaccatgtactttgtttttttttcgtattgagatcaactccgtgttctttacttatttatatctgatatgcgcgacattattctttactgtgacaatatacagtgtattgtccttttcatgacatttttcagtgcgtaacaaatgataggaaaaagggtaagtccgtgataatacacatttatgacatttattctaacatgacattttagttaaatctgacagttgtcacattttattttcaatttggaataaaaacaaatcaaatgtgtttcttgcatttataaaatggtattttctttgatttgtatagtcttataaattatacagattatatttgtaatattattatctaattaaaaaaaatatttttttattatggcgccatctatcgacaactagaataactagaataaatgttataaaaatgtcaccgacgaaatgtaatcaccgacgtgcctttttttctgtcacatacaatttaatgcgttagaaagaaatcgaaaaactgtgacgcactgaaagatgatcatgagaaatactgtataatctgaatttacataatatatcgtattcctaaagtcgaaaatgtaatttttcgactttgggatcggttatttcgaatttggtttgagatatcaaactcgcaagatgatattccttcttcttcttaaagtgcccatccgttctggatgttggcgatcatcatggctatcttgactttgtttaccacagcgcgaaatagttcagcggtagtcgtgttataccactttcgtaaattttgaagccaggaaatgcgtcttcttcccggtcctcttttaccatccgttggagaaggccgtagcatttctcattacatgtcctagatattctaattttttcgttatgatggtcatgagaatttcacactctttccccattctacgcagtacttctacattagtaattcggtcaacccaggatatacgtaagatgcgcctataacaccacatttcgaaagcttcggaccgattcatagatgcaacagttagtgtccacgcttccattccgtagagcagaactgtaaatatgtatcatttcaacagacggtattttgtttttaatgatatgtctagactctagactattgaaaaagggtctcattccaacgaatgctgcttttgcttttattattcactgtttaatttctgttgagtgggtccattggctatttaaattggtgcctagatatgtatattgctccactctttcaatattctgttgtttgattgtaagttgagtgtttagtatgattttcctaaactaggtaaaaaacacattgatttgatacctatatcatatgccataaatcaaaaattcgattttttgactttgaggtcggttgatatcgaaatggtttttaaatttggattcaggagacaaactgcataagaatccatcgtagatcgactcacaagtatttcaggggcggcgatgtacaaacgaacgaatcaacgaacagactttgcgaatttatatacgaaaacgaagttttcgttgaaaataaatgaattcatcgattaagctgtccttagtagcaaagtaatgtaaagcatgtagtgctatcaaacgctgtattgcgtatgccagtggcggctcgtatcactttaagtaggtagtgccagaattcgggcagctgcctaaatttttagtgacgggttcacaatattgtcaaaaaaggtataaaatagaaattaaaaaaaataggtacggatatttttacattatgtaggtatataccatttctggggtgtcaagaaatttaaacatttaaaatgcattcagtgattgatttgacatcatgtccgtccaacaagtaaaatctccaaaatctctcaacttatcgccctttacacaaatatcggaaaactataactaactgaaattcaccagcgacgcgacgtctgtcgtttcatcggcaatcactgcaacacaaagataattttcaatttctttccttatttcctcgtgataaacatctaagatgcactgaaggagttcattttgtgttgttttgaggtacatgcttttaaagatttggaactttgaatatgaaccgaagtcgttgtctaattcggctaacattgaacagttccataaagatgcctctattttctgaattttccttttcgtcgtgatttctcaaaactaactcgaaactccacaaaaccatatagatataatttttaatttgattcaaaacatatcgattcttatccacttcttgttcattgtgtttaattagactatcacgataagctgaatttaactcgggttttattaaaattaaaaattttaaattacttaaaaatataatagtttataataaaaagtttaatcattatgtaataaatacaaaaacgagcgagcgagcgcataaaaaaactggaaaatataatgtactaccctgtacgagaatctttttggatctacgatccactattcactcactattcactatgatgagcatagtaaaaaatattagatcttccttgtccttgtcgagcatcttgttgagccaggcacgaatagtctcatttaaacgtgtattaaaagtgcaatatagctctacctctgtcacttatatagaatgcccgtaaaatctttctcttttcagccgagccatctaagcttttggcacgatgcgatcatcccgtccgctgtgagtggcgaggattgtactacactgcacagttgccagattttatataatttataaagagaaaagaaatacgcacaaaaaatgaacgggcattaaaacggtttaaagataaaaaatatgtttctgcataaaaattctgcaccggccgccactggcgtatgcagaatatttcgattaaactaaaattccaaaatttcgttctgcattatgcaaaacttgatttatgtttatataaattataaacatgtaaattttggtgctattaaattaagtgtaaaattattaggcatggtaaagttataaaaaaataaccaaatcttttgtttgttaaaattcttagaagtaacaagttaattaactatttaaagttattaataaacaattagaaggtaaagtgaaataaaaccacttctaattcgatttctatgaaaaaagtcaatatatgtggaaaaatttaaaatttcttcaatactgtttccttggtttttacgctaccaaaatacgtttgatttatcgagtcacatcgaaactatcaatgtattaataaatttgtaatgttcattagtcatttaatattaaaatttttaggattacatgtcattattgcgtaatatagttttgcatttcaaagctagtcctattgaactggattctacttgttaggaaaaaagaaatgattagaaatttcataaatcttttacaattttcaatattccatgaatgtctttttgctgtttcaaaatttcatttaaatcaaatttcaagacaatctatatttgctttatagctgcctttagttattaaatttgtactatattcctgatccgataaaattggtggtagataaagattgatttttaacattattaggtttgggctaagtatctactagtctgggtatgtctagcgttacaatgtataacgtatagtgcgaataacgtgcgcaaaatggcgattttcgctaagagttacctaaggcccgtccggcgaaacgatcggattttctgtattcattcagtggcgtattttcaagaagttagttaatatattattatgtgtctttatgtaaattttagaatggcttctttatttttgattcaaataatggatatgttaaatgatttattagtcgattaaaaatacgctataacctagaccagaggttctcaatctttttgagtcaggtaccaccaaatactttttattatttttggtaccacctaactaaaatacctgtctagctaggtgatctaattaactataattgtgccaatggtggtgctgattttggctgttttgactttgcgtaccacctcaaataatgaaatgtaccaccagtggtacatgtaccagagattgagaaccgctgacctagaccttaagatatataaaattattgttaatttgtccgttaacattttgctatttaataagggccggcgtagctcaggctgtaggatatctgactcgcatgctggtaggccggggttcgaaacccgcgccggcgagaacatctagacatttttaaaaatgtctataggccccaggtcgactcagcctgaataaaattagtactttgggtaaaaccaggggtaataataggcggttgaagcgtagcactgaccctgttacctttcttgtataccgtaggcactagatatagcagactaccctgctataatcccaaagccgctttagcggtataaaacgggagactattataataacagatacagataatagatttttttttaattactgtgatgcatgctgtattctttcagtttcggctcaggaaatattatttgttaacttcctcagaaattgtgtgcagataataagttaatacaatctaaccccaatttttaatatacacaggaatcgacacgtttttttatattatttcataaaaatttttacacacctacttaaaacgagtcttttaatagtgaattagtgatgctgccaaatatttatgaacccaatttatcaaacttaatgttgtacttaggttacatcataatcttaattgtgaacactgactacatatcccttaaatgtaactttatcagtctttccattttttactactgatatacccttgtctatgtcaaaaaatagtataaacttgtgatatatgaaatatagtaattttggattttaatatatttataaatgttcttaaga

SEQ ID NO: 368 - DNA, 8048 bp, Diabrotica virgifera
  SmartBlast Evalue=4E-61; Info=Ubiquitin-conjugating enzyme E2 variant 2 n=4 Tax=Apocrita RepID=E2AGB3_9HYME
aagtgttaactctatctctattctggaaagaattagtcctcacatcttttgtatttaagttgagggaaaaaggtgatttttgatatccaaagagccccgctttgttaatcaatagtaggggataagatttcaatcatccataatattcgaaaatattcaaaatacacttttaaaaattttaagtttgtgagtattttgtaatggcgaccccatcaactggtgttgttgtgcctcgaaactttcgactacttgaagaactagaagccggtcaaaagggtgtttcagatggtactattagctggggcttagaaaatgatgatgatatgacacttacacattggatggggatgataatcgggccccctcgtacaccgtatgaaaataggatgtattctgttaaaattgaatgtggccaaaggtatcctgatgatgcacctactgcaaagtttatctctagaatcaatataaactgtataaacagtaacacaggggtggtcgataacagacaagtcccaatattggctaggtggcaaagggattacactattaaaacggttttgcaagaattacgaagaataatgacacttaaagagaacatgaagctaacacagcctcctgaaggcacttgcttctagcctttgaatcagcataacactcccccagtatcttctgttacaacttgtccattgagtgtcgatacctgcaccacgcaatcatgctgtcttctgtagcggattcaccttactcacaaactatctatggggtgtcttgaactggttcttggaagataacctgtctggtaatgaggacaaactggtgtatttaggttaaggtgtctaatgataagagtattttttaatattactgcttgtacaacttgtttaactctattagaggatgactcatgatcgaacttgtatttttgtaggaaacaaaaagtaatgttgatgtcaattataataaaccatctatgacgcatctcgtatttcaataaaattgaatgaataggcgtttgacacaatattgttcttgtataacccaaagttttaagaatgggtggtcacgattcattcgatatactagatttttgggttgattaaccacttatttgtttttgtatattctactgggcagtagttgacaatttatcggaactgtatttttaaacttttactagtattcactcactttgtgtacgtttttataccaaagatgaaattgtcaactgctgtggtatgaaaaaaatcaatttatgcttaaatacatgttacgctttattatggagaatcagcttcgaaaatctaaaattctaaaagacatttattgaataactacaaggttgtattgatatttagacattttttgaatgtcgtgtgtgtttataaagaagttatcctttattttgtagtagtttcggacaccccttttaacagtcagagagtagatatctatttgtatatcattgattacatatatcataaacattatctaaatcattattttttttgaaaacacagaaattaaaagtaaaggtagaatacaccattttaaaatttgacaatgttatctcaatacattattacattctcaatattcacacacacgcttcactagcactcataggtatttagcatctccttgtttgctgtcataccttggttttacatttaaaacttatatgagaaaagtgatacttagatgagactttactttataagtttaacttttttctttaaagtcttgagtctgatgaaagaatgagtagagatctacactctgatgacccaagttgtaacaaagatggctaaggtgtacagctttataagctatgtagttaagttaacattttagctaaagttattaggttgaaataagtttatatacagtaccagagcatatattccatatatagcagcttatagaaaggtaggaggaactgctaaaaactttgtttgccttaccaatagttttaataatcgagttttaagtcgagatattcacgcaggtggtctaaaatgcccaaatgttatttattatagagtaagcgccactctactagatacattggtaggtacctagttggtatgattattggctaatctggtccgttctcagatgtgactttcatccctgtcatgttactgtcatgaaactattcaaaataattgtttttccatacaaaagaatacattaattaatagtattgttactctgctttaaaataactttattcaagcaccaagcaatattacaatactttaaaactattacaactttaacaaaatgacaactataaacgtcaaacacagctgatctattatttgtcaactttttatgttaatatagggcattccaacatgctgtcaaaagtcaatatgacgactgggaggcaaacataaatgttattctatcagttcttaatttgttttagataattttagttgcgtttctttgtaattttgtttttaaaagaattgatttgacattctcactagaagaattaatctaaaaagataatatgcctaatttctgttgtgttttgaaatgtggaatacgaaattcatgatgaagttcagttttatcggttactatcagtggtatattttaagcgtaaacacgtgtaaaacaactaaataagttatcatctgagagacaaaaacaaacaactaaataagttatgatctgggagacaaaaacaatggttaaatgctacaaaacgtcctataaaatgctaaataattatttccatgttacttacgcttggaaaacgtctaaaccatgtgttctcaaacccctcgaggaaaagtggacctatattatttattttgtcaatcttttgcttgtacctaccactgtgcgtctaggtacctactaacaacattatgtattgtctaccaagaatttatatgcactcatgtttatttattcactgcttaaaaccaaataaagtcgttcaggtacttctacaactaaaaactacacaaaatctacaacaaaatgttcagaaaatacaacttaaaactgttaatacatgtgctgcaaatattataaacagacacaatgtttgacagtttgcctcccaaacgtcagtcttgaaatgccctattcagtttctatacattttctgacgttctaaacgtcactggacatacaaataaacattgcaacaagtgaagggtccaggactataatagctcaatgttcctatggatctagtagggtggcggtggttactgtatagcaatattacagtatttctcatgatcatttttcagtgcgtaacaaatgataggaaaaagggtaagtccgtgataatacacatttatgacatttattctaacatgacattttagttaaatctgacagttgtcacattttattttcaatttggaataaaaacaaatcaaaagtgtttcttgcatttataaaatggtattttctttgatttgtatagtcttataaattatacagattatatttgtaatattattatctaatttaaaaaaaaatttttattatggcgccatctatcgacaactagaataactagaataaatgttataaaaatgtcaccgacgaaatgtaatcaccgacgtgcctttttttctgtcacatacaatttaatgcgttagaaagaaatcgaaaaactgtgacgcactgaaagatgatcatgagaaatactgtataatctgaatttacataatatatcgtattcctaaagtcgaaaatgtaatttttcgactttgggatcggttatttcgaatttggtttgagatatcaaactcgcaagatgatattccttcttcttcttaaagtgcccatccgttctggatgttggcgatcatcatggctatcttgactttgtttaccacagcgcgaaatagttcagcggtagtcgtgttataccactttcgtaaattttgaagccaggaaatgcgtcttcttcccggtcctcttttaccatccgttggagaaggccgtagcatttctcattacatgtcctagatattctaattttttcgttatgatggtcatgagaatttcacactctttccccattctacgcagtacttctacattagtaattcggtcaacccaggatatacgtaagatgcgcctataacaccacatttcgaaagcttcggaccgattcatagatgcaacagttagtgtccacgcttccattccgtagagcagaactgtaaatatgtatcatttcaacagacggtattttgtttttaatgatatgtctagactctagactattgaaaaagggtctcattccaacgaatgctgcttttgcttttattattcactgtttaatttctgttgagtgggtccattggctatttaaattggtgcctagatatgtatattgctccactctttcaatattctgttgtttgattgtaagttgagtgtttagtatgattttcctaaactaggtaaaaaacacattgatttgatacctatatcatatgccataaatcaaaaattcgattttttgactttgaggtcggttgatatcgaaatggtttttaaatttggattcaggagacaaactgcataagaatccatcgtagatcgactcacaagtatttcaggggcggcgatgtacaaacgaacgaatcaacgaacagactttgcgaatttatatacgaaaacgaagttttcgttgaaaataaatgaattcatcgattaagctgtccttagtagcaaagtaatgtaaagcatgtagtgctatcaaacgctgtattgcgtatgccagtggcggctcgtatcactttaagtaggtagtgccagaattcgggcagctgcctaaatttttagtgacgggttcacaatattgtcaaaaaaggtataaaatagaaattaaaaaaaataggtacggatatttttacattatgtaggtatataccatttctggggtgtcaagaaatttaaacatttaaaatgcattcagtgattgatttgacatcatgtccgtccaacaagtaaaatctccaaaatctctcaacttatcgccctttacacaaatatcggaaaactataactaactgaaattcaccagcgacgcgacgtctgtcgtttcatcggcaatcactgcaacacaaagataattttcaatttctttccttatttcctcgtgataaacatctaagatgcactgaaggagttcattttgtgttgttttgaggtacatgcttttaaagatttggaactttgaatatgaaccgaagtcgttgtctaattcggctaacattgaacagttccataaagatgcctctattttctgaattttccttttcgtcgtgatttctcaaaactaactcgaaactccacaaaaccatatagatataatttttaatttgattcaaaacatatcgattcttatccacttcttgttcattgtgtttaattagactatcacgataagctgaatttaactcgggttttattaaaattaaaaattttaaattacttaaaaatataatagtttataataaaaagtttaatcattaaaaatgtaataattataaatacaaaaacgagcgagcgagcgcgtaaaaaaactcgaaaagataatgtaggtactaccctgtacgagaagctttttggatctgatctacgatccactattcactatgatgagcatagtaaaaaatattagatcttcctgccttgtcgagccaggcacgaatagtttcatttaaacgtgtattaaaagtgcaatatagctctatctctgtcacttacatagaatgcccgtaaaatctttctcttttcagccgagccatctaagcttttggcacgatgcgatcatcccgtccgctgtctgtgagtggcgagggttgtactacactgcacagttgccagattttatataatttataaagagaaaagaaatacgcacaaaaaatgaacgggcattaaaacggtttaaagataaaaaaaaaatatgtttctgcataaaaataaggtagtgtcatggcactacctcaccggccgccactggcgtatgcagaatatttcaaataaactaaaattccagaatttcgttctgcattatacaaaacttgatttatgtttatataaattataaacatgtaaattttggtgctattaaattaagtgtaaaattattaggcatggtaaagttataaaaaaataaccaaatcttttgtttgttaaaattcttagaagtaacaagttaattaactatttaaagttattaataaacaattagaaggtaaagtgaaataaaaccacttctaattcgatttctatgaaaaaagtcaatatatgtggaaaaatttaaaatttcttcaatactgtttccttggtttttacgctaccaaaatacgtttgatttatcgagtcacatcgaaactatcaatgtattaataaatttgtaatgttcattagtcatttaatattaaaatttttaggattacatgtcattattgcgtaatatagttttgcatttcaaagctagtcctattgaactggattctacttgttaggaaaaaagaaatgattagaaatttcataaatcttttacaattttcaatattccatgaatgtctttttgctgtttcaaaatttcatttaaatcaaatttcaagacaatctatatttgctttatagctgcctttagttattaaatttgtactatattcctgatccgataaaattggtggtagataaagattgatttttaacattattaggtttgggctaagtatctactagtctgggtatgtctagcgttacaatgtataacgtatagtgcgaataacgtgcgcaaaatggcgattttcgctaagagttacctaaggcccgtccggcgaaacgatcggattttctgtattcattcagtggcgtattttcaagaagttagttaatatattattatgtgtctttatgtaaattttagaatggcttctttatttttgattcaaataatggatatgttaaatgatttattagtcgattaaaaatacgctataacctagaccagaggttctcaatctttttgagtcaggtaccaccaaatactttttattatttttggtaccacctaactaaaatacctgtctagctaggtgatctaattaactataattgtgccaatggtggtgctgattttggctgttttgactttgcgtaccacctcaaataatgaaatgtaccaccagtggtacatgtaccagagattgagaaccgctgacctagaccttaagatatataaaattattgttaatttgtccgttaacattttgctatttaataagggccggcgtagctcaggctgtaggatatctgactcgcatgctggtaggccggggttcgaaacccgcgccggcgagaacatctagacatttttaaaaatgtctataggccccaggtcgactcagcctgaataaaattagtactttgggtaaaaccaggggtaataataggcggttgaagcgtagcactgaccctgttacctttcttgtataccgtaggcactagatatagcagactaccctgctataatcccaaagccgctttagcggtataaaacgggagactattataataacagatacagataatagatttttttttaattactgtgatgcatgctgtattctttcagtttcggctcaggaaatattatttgttaacttcctcagaaattgtgtgcagataataagttaatacaatctaaccccaatttttaatatacacaggaatcgacacgtttttttatattatttcataaaaatttttacacacctacttaaaacgagtcttttaatagtgaattagtgatgctgccaaatatttatgaacccaatttatcaaacttaatgttgtacttaggttacatcataatcttaattgtgaacactgactacatatcccttaaatgtaactttatcagtctttccattttttactactgatatacccttgtctatgtcaaaaaatagtataaacttgtgatatatgaaatatagtaattttggattttaatatatttataaatgttcttaaga

SEQ ID NO: 369 - DNA, 5401 bp, Diabrotica virgifera
  SmartBlast Evalue=5E-27; Info=Endonuclease-reverse transcriptase n=1 Tax=Bombyx mori RepID=D5LB38_BOMMO
gcaaatctagtattttgttgatttatggtatacagccagctacaggaagtttattttccttttcgattttgattttattacctccaaagctagaacgaaaagagtttgatctggaattgagcatggagtatactggagtattctggagaatttttttgcaggatctgtcaattatcgtttctttagcacctttctggatgttggcgatcagcatggctatcctaacttcgcttgctgctattcgcaatagtccagttgtcgatgtattgaaccactttcgcaggttttgaagcctagatatcgtagaatatttgtagatataacgtagaaaatacatagcttctgaaaagagacttcatcattatgaactctgatctcgcttttcctatgtgttgttttatttcatttgtgtggtcccactggctgtttatgttagtaccaaggaatgtgtaactgtccaccctgtcaattggttgttggttaaccaaaaactgtgtatttaatatttcgcgcttactgactaccatgtactttgtttttttttcgtattgagatcaactccgtgttctttacttatttatatctgatatgcgcgacattattctttactgtgacaatatacagtgtattgtccttttcatgacatttttcagtgcgtaacaaatgataggaaaaagggtaagtccgtgataatacacatttatgacatttattctaacatgacattttagttaaatctgacagttgtcacattttattttcaatttggaataaaaacaaatcaaatgtgtttcttgcatttataaaatggtattttctttgatttgtatagtcttataaattatacagattatatttgtaatattattatctaattaaaaaaaatatttttttattatggcgccatctatcgacaactagaataactagaataaatgttataaaaatgtcaccgacgaaatgtaatcaccgacgtgcctttttttctgtcacatacaatttaatgcgttagaaagaaatcgaaaaactgtgacgcactgaaagatgatcatgagaaatactgtataatctgaatttacataatatatcgtattcctaaagtcgaaaatgtaatttttcgactttgggatcggttatttcgaatttggtttgagatatcaaactcgcaagatgatattccttcttcttcttaaagtgcccatccgttctggatgttggcgatcatcatggctatcttgactttgtttaccacagcgcgaaatagttcagcggtagtcgtgttataccactttcgtaaattttgaagccaggaaatgcgtcttcttcccggtcctcttttaccatccgttggagaaggccgtagcatttctcattacatgtcctagatattctaattttttcgttatgatggtcatgagaatttcacactctttccccattctacgcagtacttctacattagtaattcggtcaacccaggatatacgtaagatgcgcctataacaccacatttcgaaagcttcggaccgattcatagatgcaacagttagtgtccacgcttccattccgtagagcagaactgtaaatatgtatcatttcaacagacggtattttgtttttaatgatatgtctagactctagactattgaaaaagggtctcattccaacgaatgctgcttttgcttttattattcactgtttaatttctgttgagtgggtccattggctatttaaattggtgcctagatatgtatattgctccactctttcaatattctgttgtttgattgtaagttgagtgtttagtatgattttcctaaactaggtaaaaaacacattgatttgatacctatatcatatgccataaatcaaaaattcgattttttgactttgaggtcggttgatatcgaaatggtttttaaatttggattcaggagacaaactgcataagaatccatcgtagatcgactcacaagtatttcaggggcggcgatgtacaaacgaacgaatcaacgaacagactttgcgaatttatatacgaaaacgaagttttcgttgaaaataaatgaattcatcgattaagctgtccttagtagcaaagtaatgtaaagcatgtagtgctatcaaacgctgtattgcgtatgccagtggcggctcgtatcactttaagtaggtagtgccagaattcgggcagctgcctaaatttttagtgacgggttcacaatattgtcaaaaaaggtataaaatagaaattaaaaaaaataggtacggatatttttacattatgtaggtatataccatttctggggtgtcaagaaatttaaacatttaaaatgcattcagtgattgatttgacatcatgtccgtccaacaagtaaaatctccaaaatctctcaacttatcgccctttacacaaatatcggaaaactataactaactgaaattcaccagcgacgcgacgtctgtcgtttcatcggcaatcactgcaacacaaagataattttcaatttctttccttatttcctcgtgataaacatctaagatgcactgaaggagttcattttgtgttgttttgaggtacatgcttttaaagatttggaactttgaatatgaaccgaagtcgttgtctaattcggctaacattgaacagttccataaagatgcctctattttctgaattttccttttcgtcgtgatttctcaaaactaactcgaaactccacaaaaccatatagatataatttttaatttgattcaaaacatatcgattcttatccacttcttgttcattgtgtttaattagactatcacgataagctgaatttaactcgggttttattaaaattaaaaattttaaattacttaaaaatataatagtttataataaaaagtttaatcattaaaaatgtaataattataaatacaaaaacgagcgagcgagcgcgtaaaaaaactcgaaaagataatgtaggtactaccctgtacgagaagctttttggatctgatctacgatccactattcactatgatgagcatagtaaaaaatattagatcttcctgccttgtcgagccaggcacgaatagtttcatttaaacgtgtattaaaagtgcaatatagctctatctctgtcacttacatagaatgcccgtaaaatctttctcttttcagccgagccatctaagcttttggcacgatgcgatcatcccgtccgctgtgagtggcgaggattgtactacactgcacagttgccagattttatataatttataaagagaaaagaaatacgcacaaaaaatgaacgggcattaaaacggtttaaagataaaaaatatgtttctgcataaaaattctgcaccggccgccactggcgtatgcagaatatttcgattaaactaaaattccaaaatttcgttctgcattatgcaaaacttgatttatgtttatataaattataaacatgtaaattttggtgctattaaattaagtgtaaaattattaggcatggtaaagttataaaaaaataaccaaatcttttgtttgttaaaattcttagaagtaacaagttaattaactatttaaagttattaataaacaattagaaggtaaagtgaaataaaaccacttctaattcgatttctatgaaaaaagtcaatatatgtggaaaaatttaaaatttcttcaatactgtttccttggtttttacgctaccaaaatacgtttgatttatcgagtcacatcgaaactatcaatgtattaataaatttgtaatgttcattagtcatttaatattaaaatttttaggattacatgtcattattgcgtaatatagttttgcatttcaaagctagtcctattgaactggattctacttgttaggaaaaaagaaatgattagaaatttcataaatcttttacaattttcaatattccatgaatgtctttttgctgtttcaaaatttcatttaaatcaaatttcaagacaatctatatttgctttatagctgcctttagttattaaatttgtactatattcctgatccgataaaattggtggtagataaagattgatttttaacattattaggtttgggctaagtatctactagtctgggtatgtctagcgttacaatgtataacgtatagtgcgaataacgtgcgcaaaatggcgattttcgctaagagttacctaaggcccgtccggcgaaacgatcggattttctgtattcattcagtggcgtattttcaagaagttagttaatatattattatgtgtctttatgtaaattttagaatggcttctttatttttgattcaaataatggatatgttaaatgatttattagtcgattaaaaatacgctataacctagaccagaggttctcaatctttttgagtcaggtaccaccaaatactttttattatttttggtaccacctaactaaaatacctgtctagctaggtgatctaattaactataattgtgccaatggtggtgctgattttggctgttttgactttgcgtaccacctcaaataatgaaatgtaccaccagtggtacatgtaccagagattgagaaccgctgacctagaccttaagatatataaaattattgttaatttgtccgttaacattttgctatttaataagggccggcgtagctcaggctgtaggatatctgactcgcatgctggtaggccggggttcgaaacccgcgccggcgagaacatctagacatttttaaaaatgtctataggccccaggtcgactcagcctgaataaaattagtactttgggtaaaaccaggggtaataataggcggttgaagcgtagcactgaccctgttacctttcttgtataccgtaggcactagatatagcagactaccctgctataatcccaaagccgctttagcggtataaaacgggagactattataataacagatacagataatagatttttttttaattactgtgatgcatgctgtattctttcagtttcggctcaggaaatattatttgttaacttcctcagaaattgtgtgcagataataagttaatacaatctaaccccaatttttaatatacacaggaatcgacacgtttttttatattatttcataaaaatttttacacacctacttaaaacgagtcttttaatagtgaattagtgatgctgccaaatatttatgaacccaatttatcaaacttaatgttgtacttaggttacatcataatcttaattgtgaacactgactacatatcccttaaatgtaactttatcagtctttccattttttactactgatatacccttgtctatgtcaaaaaatagtataaacttgtgatatatgaaatatagtaattttggattttaatatatttataaatgttcttaaga

SEQ ID NO: 370 - DNA, 5214 bp, Diabrotica virgifera
  SmartBlast Evalue=5E-27; Info=Endonuclease-reverse transcriptase n=1 Tax=Bombyx mori RepID=D5LB38_BOMMO
gcaaatctagtattttgttgatttatggtatacagccagctacaggaagtttattttccttttcgattttgattttattacctccaaagctagaacgaaaagagtttgatctggaattgagcatggagtatactggagtattctggagaatttttttgcaggatctgtcaattatcgtttctttagcacctttctggatgttggcgatcagcatggctatcctaacttcgcttgctgctattcgcaatagtccagttgtcgatgtattgaaccactttcgcaggttttgaagcctagatatcgtagaatatttgtagatataacgtagaaaatacatagcttctgaaaagagacttcatcattatgaactctgatctcgcttttcctatgtgttgttttatttcatttgtgtggtcccactggctgtttatgttagtaccaaggaatgtgtaactgtccaccctgtcaattggttgttggttaaccaaaaactgtgtatttaatatttcgcgcttactgactaccatgtactttgtttttttttcgtattgagatcaactccgtgttctttacttatttatatctgatatgcgcgacattattctttactgtgacaatatacagtgtattgtccttttcatgacatttttcagtgcgtaacaaatgataggaaaaagggtaagtccgtgataatacacatttatgacatttattctaacatgacattttagttaaatctgacagttgtcacattttattttcaatttggaataaaaacaaatcaaatgtgtttcttgcatttataaaatggtattttctttgatttgtatagtcttataaattatacagattatatttgtaatattattatctaattaaaaaaaatatttttttattatggcgccatctatcgacaactagaataactagaataaatgttataaaaatgtcaccgacgaaatgtaatcaccgacgtgcctttttttctgtcacatacaatttaatgcgttagaaagaaatcgaaaaactgtgacgcactgaaagatgatcatgagaaatactgtataatctgaatttacataatatatcgtattcctaaagtcgaaaatgtaatttttcgactttgggatcggttatttcgaatttggtttgagatatcaaactcgcaagatgatattccttcttcttcttaaagtgcccatccgttctggatgttggcgatcatcatggctatcttgactttgtttaccacagcgcgaaatagttcagcggtagtcgtgttataccactttcgtaaattttgaagccaggaaatgcgtcttcttcccggtcctcttttaccatccgttggagaaggccgtagcatttctcattacatgtcctagatattctaattttttcgttatgatggtcatgagaatttcacactctttccccattctacgcagtacttctacattagtaattcggtcaacccaggatatacgtaagatgcgcctataacaccacatttcgaaagcttcggaccgattcatagatgcaacagttagtgtccacgcttccattccgtagagcagaactgtaaatatgtatcatttcaacagacggtattttgtttttaatgatatgtctagactctagactattgaaaaagggtctcattccaacgaatgctgcttttgcttttattattcactgtttaatttctgttgagtgggtccattggctatttaaattggtgcctagatatgtatattgctccactctttcaatattctgttgtttgattgtaagttgagtgtttagtatgattttcctaaactaggtaaaaaacacattgatttgatacctatatcatatgccataaatcaaaaattcgattttttgactttgaggtcggttgatatcgaaatggtttttaaatttggattcaggagacaaactgcataagaatccatcgtagatcgactcacaagtatttcaggggcggcgatgtacaaacgaacgaatcaacgaacagactttgcgaatttatatacgaaaacgaagttttcgttgaaaataaatgaattcatcgattaagctgtccttagtagcaaagtaatgtaaagcatgtagtgctatcaaacgctgtattgcgtatgccagtggcggctcgtatcactttaagtaggtagtgccagaattcgggcagctgcctaaatttttagtgacgggttcacaatattgtcaaaaaaggtataaaatagaaattaaaaaaaataggtacggatatttttacattatgtaggtatataccatttctggggtgtcaagaaatttaaacatttaaaatgcattcagtgattgatttgacatcatgtccgtccaacaagtaaaatctccaaaatctctcaacttatcgccctttacacaaatatcggaaaactataactaactgaaattcaccagcgacgcgacgtctgtcgtttcatcggcaatcactgcaacacaaagataattttcaatttctttccttatttcctcgtgataaacatctaagatgcactgaaggagttcattttgtgttgttttgaggtacatgcttttaaagatttggaactttgaatatgaaccgaagtcgttgtctaattcggctaacattgaacagttccataaagatgcctctattttctgaattttccttttcgtcgtgatttctcaaaactaactcgaaactccacaaaaccatatagatataatttttaatttgattcaaaacatatcgattcttatccacttcttgttcattgtgtttaattagactatcacgataagctgaatttaactcgggttttattaaaattaaaaattttaaattacttaaaaatataatagtttataataaaaagtttaatcattatgtaataaatacaaaaacgagcgagcgagcgcataaaaaaactggaaaatataatgtactaccctgtacgagaatctttttggatctacgatccactattcactcactattcactatgatgagcatagtaaaaaatattagatcttccttgtccttgtcgagcatcttgttgagccaggcacgaatagtctcatttaaacgtgtattaaaagtgcaatatagctctacctctgtcacttatatagaatgcccgtaaaatctttctcttttcagccgagccatctaagcttttggcacgatgcgatcatcccgtccgctgtctgtgagtggcgagggttgtactacactgcacagttgccagattttatataatttataaagagaaaagaaatacgcacaaaaaatgaacgggcattaaaacggtttaaagataaaaaaaaaatatgtttctgcataaaaataaggtagtgtcatggcactacctcaccggccgccactggcgtatgcagaatatttcaaataaactaaaattccagaatttcgttctgcattatacaaaacttgatttatgtttatataaattataaacatgtaaattttggtgctattaaattaagtgtaaaattattaggcatggtaaagttataaaaaaataaccaaatcttttgtttgttaaaattcttagaagtaacaagttaattaactatttaaagttattaataaacaattagaaggtaaagtgaaataaaaccacttctaattcgatttctatgaaaaaagtcaatatatgtggaaaaatttaaaatttcttcaatactgtttccttggtttttacgctaccaaaatacgtttgatttatcgagtcacatcgaaactatcaatgtattaataaatttgtaatgttcattagtcatttaatattaaaatttttaggattacatgtcattattgcgtaatatagttttgcatttcaaagctagtcctattgaactggattctacttgttaggaaaaaagaaatgattagaaatttcataaatcttttacaattttcaatattccatgaatgtctttttgctgtttcaaaatttcatttaaatcaaatttcaagacaatctatatttgctttatagctgcctttagttattaaatttgtactatattcctgatccgataaaattggtggtagataaagattgatttttaacattattaggtttgggctaagtatctactagtctgggtatgtctagcgttacaatgtataacgtatactgcgaataacgtgcgcaaaatggcgattttcgctaagagttacctaaggcccgtccggcgaaacgatcagattttctgcattcattcagtggcgtattttcaagaagttagttaatatattattatgtgtctttatgtaaattttagaatggcttctttatttttgattcaaataatggatatgttaaataatttattagtcgattaaaaatacgctataacctagaccttaagatatataaaattattgttaatttgtccgttaacattttgctatttaataagggccgccgtagctcaggctgtaggatatctgactcgcatgctggtaggccggggttcgaaacccgcgccggcgagaacatctagacatttttaaaaatgtctataggccccaggtcgactcagcctgaataaaattagtactttgggtaaaaccaggggtaataataggcggttgaagcgtagcactgaccctgttacctttcttgtataccgtaggcactagatatagcagactaccctgctataatcccaaagccgctttagcggtataaaacgggagactattataataacagatacagataatagatttttttttaattactgtgatgcatgctgtattctttcagtttcggctcaggaaatattatttgttaacttcctcagaaattgtgtgcagataataagttaatacaatctaaccccaatttttaatatacacaggaatcgacacgtttttttatattatttcataaaaatttttacacacctacttaaaacgagtcttttaatagtgaattagtgatgctgccaaatatttatgaacccaatttatcaaacttaatgttgtacttaggttacatcataatcttaattgtgaacactgactacatatcccttaaatgtaactttatcagtctttccattttttactactgatatacccttgtctatgtcaaaaaatagtataaacttgtgatatatgaaatatagtaattttggattttaatatatttataaatgttcttaaga

SEQ ID NO: 371 - DNA, 5208 bp, Diabrotica virgifera
  SmartBlast Evalue=5E-27; Info=Endonuclease-reverse transcriptase n=1 Tax=Bombyx mori RepID=D5LB38_BOMMO
gcaaatctagtattttgttgatttatggtatacagccagctacaggaagtttattttccttttcgattttgattttattacctccaaagctagaacgaaaagagtttgatctggaattgagcatggagtatactggagtattctggagaatttttttgcaggatctgtcaattatcgtttctttagcacctttctggatgttggcgatcagcatggctatcctaacttcgcttgctgctattcgcaatagtccagttgtcgatgtattgaaccactttcgcaggttttgaagcctagatatcgtagaatatttgtagatataacgtagaaaatacatagcttctgaaaagagacttcatcattatgaactctgatctcgcttttcctatgtgttgttttatttcatttgtgtggtcccactggctgtttatgttagtaccaaggaatgtgtaactgtccaccctgtcaattggttgttggttaaccaaaaactgtgtatttaatatttcgcgcttactgactaccatgtactttgtttttttttcgtattgagatcaactccgtgttctttacttatttatatctgatatgcgcgacattattctttactgtgacaatatacagtgtattgtccttttcatgacatttttcagtgcgtaacaaatgataggaaaaagggtaagtccgtgataatacacatttatgacatttattctaacatgacattttagttaaatctgacagttgtcacattttattttcaatttggaataaaaacaaatcaaatgtgtttcttgcatttataaaatggtattttctttgatttgtatagtcttataaattatacagattatatttgtaatattattatctaattaaaaaaaatatttttttattatggcgccatctatcgacaactagaataactagaataaatgttataaaaatgtcaccgacgaaatgtaatcaccgacgtgcctttttttctgtcacatacaatttaatgcgttagaaagaaatcgaaaaactgtgacgcactgaaagatgatcatgagaaatactgtataatctgaatttacataatatatcgtattcctaaagtcgaaaatgtaatttttcgactttgggatcggttatttcgaatttggtttgagatatcaaactcgcaagatgatattccttcttcttcttaaagtgcccatccgttctggatgttggcgatcatcatggctatcttgactttgtttaccacagcgcgaaatagttcagcggtagtcgtgttataccactttcgtaaattttgaagccaggaaatgcgtcttcttcccggtcctcttttaccatccgttggagaaggccgtagcatttctcattacatgtcctagatattctaattttttcgttatgatggtcatgagaatttcacactctttccccattctacgcagtacttctacattagtaattcggtcaacccaggatatacgtaagatgcgcctataacaccacatttcgaaagcttcggaccgattcatagatgcaacagttagtgtccacgcttccattccgtagagcagaactgtaaatatgtatcatttcaacagacggtattttgtttttaatgatatgtctagactctagactattgaaaaagggtctcattccaacgaatgctgcttttgcttttattattcactgtttaatttctgttgagtgggtccattggctatttaaattggtgcctagatatgtatattgctccactctttcaatattctgttgtttgattgtaagttgagtgtttagtatgattttcctaaactaggtaaaaaacacattgatttgatacctatatcatatgccataaatcaaaaattcgattttttgactttgaggtcggttgatatcgaaatggtttttaaatttggattcaggagacaaactgcataagaatccatcgtagatcgactcacaagtatttcaggggcggcgatgtacaaacgaacgaatcaacgaacagactttgcgaatttatatacgaaaacgaagttttcgttgaaaataaatgaattcatcgattaagctgtccttagtagcaaagtaatgtaaagcatgtagtgctatcaaacgctgtattgcgtatgccagtggcggctcgtatcactttaagtaggtagtgccagaattcgggcagctgcctaaatttttagtgacgggttcacaatattgtcaaaaaaggtataaaatagaaattaaaaaaaataggtacggatatttttacattatgtaggtatataccatttctggggtgtcaagaaatttaaacatttaaaatgcattcagtgattgatttgacatcatgtccgtccaacaagtaaaatctccaaaatctctcaacttatcgccctttacacaaatatcggaaaactataactaactgaaattcaccagcgacgcgacgtctgtcgtttcatcggcaatcactgcaacacaaagataattttcaatttctttccttatttcctcgtgataaacatctaagatgcactgaaggagttcattttgtgttgttttgaggtacatgcttttaaagatttggaactttgaatatgaaccgaagtcgttgtctaattcggctaacattgaacagttccataaagatgcctctattttctgaattttccttttcgtcgtgatttctcaaaactaactcgaaactccacaaaaccatatagatataatttttaatttgattcaaaacatatcgattcttatccacttcttgttcattgtgtttaattagactatcacgataagctgaatttaactcgggttttattaaaattaaaaattttaaattacttaaaaatataatagtttataataaaaagtttaatcattaaaaatgtaataattataaatacaaaaacgagcgagcgagcgcgtaaaaaaactcgaaaagataatgtaggtactaccctgtacgagaagctttttggatctgatctacgatccactattcactatgatgagcatagtaaaaaatattagatcttcctgccttgtcgagccaggcacgaatagtttcatttaaacgtgtattaaaagtgcaatatagctctatctctgtcacttacatagaatgcccgtaaaatctttctcttttcagccgagccatctaagcttttggcacgatgcgatcatcccgtccgctgtctgtgagtggcgagggttgtactacactgcacagttgccagattttatataatttataaagagaaaagaaatacgcacaaaaaatgaacgggcattaaaacggtttaaagataaaaaaaaaatatgtttctgcataaaaataaggtagtgtcatggcactacctcaccggccgccactggcgtatgcagaatatttcaaataaactaaaattccagaatttcgttctgcattatacaaaacttgatttatgtttatataaattataaacatgtaaattttggtgctattaaattaagtgtaaaattattaggcatggtaaagttataaaaaaataaccaaatcttttgtttgttaaaattcttagaagtaacaagttaattaactatttaaagttattaataaacaattagaaggtaaagtgaaataaaaccacttctaattcgatttctatgaaaaaagtcaatatatgtggaaaaatttaaaatttcttcaatactgtttccttggtttttacgctaccaaaatacgtttgatttatcgagtcacatcgaaactatcaatgtattaataaatttgtaatgttcattagtcatttaatattaaaatttttaggattacatgtcattattgcgtaatatagttttgcatttcaaagctagtcctattgaactggattctacttgttaggaaaaaagaaatgattagaaatttcataaatcttttacaattttcaatattccatgaatgtctttttgctgtttcaaaatttcatttaaatcaaatttcaagacaatctatatttgctttatagctgcctttagttattaaatttgtactatattcctgatccgataaaattggtggtagataaagattgatttttaacattattaggtttgggctaagtatctactagtctgggtatgtctagcgttacaatgtataacgtatactgcgaataacgtgcgcaaaatggcgattttcgctaagagttacctaaggcccgtccggcgaaacgatcagattttctgcattcattcagtggcgtattttcaagaagttagttaatatattattatgtgtctttatgtaaattttagaatggcttctttatttttgattcaaataatggatatgttaaataatttattagtcgattaaaaatacgctataacctagaccttaagatatataaaattattgttaatttgtccgttaacattttgctatttaataagggccgccgtagctcaggctgtaggatatctgactcgcatgctggtaggccggggttcgaaacccgcgccggcgagaacatctagacatttttaaaaatgtctataggccccaggtcgactcagcctgaataaaattagtactttgggtaaaaccaggggtaataataggcggttgaagcgtagcactgaccctgttacctttcttgtataccgtaggcactagatatagcagactaccctgctataatcccaaagccgctttagcggtataaaacgggagactattataataacagatacagataatagatttttttttaattactgtgatgcatgctgtattctttcagtttcggctcaggaaatattatttgttaacttcctcagaaattgtgtgcagataataagttaatacaatctaaccccaatttttaatatacacaggaatcgacacgtttttttatattatttcataaaaatttttacacacctacttaaaacgagtcttttaatagtgaattagtgatgctgccaaatatttatgaacccaatttatcaaacttaatgttgtacttaggttacatcataatcttaattgtgaacactgactacatatcccttaaatgtaactttatcagtctttccattttttactactgatatacccttgtctatgtcaaaaaatagtataaacttgtgatatatgaaatatagtaattttggattttaatatatttataaatgttcttaaga

SEQ ID NO: 372 - DNA, 5187 bp, Diabrotica virgifera
  SmartBlast Evalue=5E-27; Info=Endonuclease-reverse transcriptase n=1 Tax=Bombyx mori RepID=D5LB38_BOMMO
gcaaatctagtattttgttgatttatggtatacagccagctacaggaagtttattttccttttcgattttgattttattacctccaaagctagaacgaaaagagtttgatctggaattgagcatggagtatactggagtattctggagaatttttttgcaggatctgtcaattatcgtttctttagcacctttctggatgttggcgatcagcatggctatcctaacttcgcttgctgctattcgcaatagtccagttgtcgatgtattgaaccactttcgcaggttttgaagcctagatatcgtagaatatttgtagatataacgtagaaaatacatagcttctgaaaagagacttcatcattatgaactctgatctcgcttttcctatgtgttgttttatttcatttgtgtggtcccactggctgtttatgttagtaccaaggaatgtgtaactgtccaccctgtcaattggttgttggttaaccaaaaactgtgtatttaatatttcgcgcttactgactaccatgtactttgtttttttttcgtattgagatcaactccgtgttctttacttatttatatctgatatgcgcgacattattctttactgtgacaatatacagtgtattgtccttttcatgacatttttcagtgcgtaacaaatgataggaaaaagggtaagtccgtgataatacacatttatgacatttattctaacatgacattttagttaaatctgacagttgtcacattttattttcaatttggaataaaaacaaatcaaatgtgtttcttgcatttataaaatggtattttctttgatttgtatagtcttataaattatacagattatatttgtaatattattatctaattaaaaaaaatatttttttattatggcgccatctatcgacaactagaataactagaataaatgttataaaaatgtcaccgacgaaatgtaatcaccgacgtgcctttttttctgtcacatacaatttaatgcgttagaaagaaatcgaaaaactgtgacgcactgaaagatgatcatgagaaatactgtataatctgaatttacataatatatcgtattcctaaagtcgaaaatgtaatttttcgactttgggatcggttatttcgaatttggtttgagatatcaaactcgcaagatgatattccttcttcttcttaaagtgcccatccgttctggatgttggcgatcatcatggctatcttgactttgtttaccacagcgcgaaatagttcagcggtagtcgtgttataccactttcgtaaattttgaagccaggaaatgcgtcttcttcccggtcctcttttaccatccgttggagaaggccgtagcatttctcattacatgtcctagatattctaattttttcgttatgatggtcatgagaatttcacactctttccccattctacgcagtacttctacattagtaattcggtcaacccaggatatacgtaagatgcgcctataacaccacatttcgaaagcttcggaccgattcatagatgcaacagttagtgtccacgcttccattccgtagagcagaactgtaaatatgtatcatttcaacagacggtattttgtttttaatgatatgtctagactctagactattgaaaaagggtctcattccaacgaatgctgcttttgcttttattattcactgtttaatttctgttgagtgggtccattggctatttaaattggtgcctagatatgtatattgctccactctttcaatattctgttgtttgattgtaagttgagtgtttagtatgattttcctaaactaggtaaaaaacacattgatttgatacctatatcatatgccataaatcaaaaattcgattttttgactttgaggtcggttgatatcgaaatggtttttaaatttggattcaggagacaaactgcataagaatccatcgtagatcgactcacaagtatttcaggggcggcgatgtacaaacgaacgaatcaacgaacagactttgcgaatttatatacgaaaacgaagttttcgttgaaaataaatgaattcatcgattaagctgtccttagtagcaaagtaatgtaaagcatgtagtgctatcaaacgctgtattgcgtatgccagtggcggctcgtatcactttaagtaggtagtgccagaattcgggcagctgcctaaatttttagtgacgggttcacaatattgtcaaaaaaggtataaaatagaaattaaaaaaaataggtacggatatttttacattatgtaggtatataccatttctggggtgtcaagaaatttaaacatttaaaatgcattcagtgattgatttgacatcatgtccgtccaacaagtaaaatctccaaaatctctcaacttatcgccctttacacaaatatcggaaaactataactaactgaaattcaccagcgacgcgacgtctgtcgtttcatcggcaatcactgcaacacaaagataattttcaatttctttccttatttcctcgtgataaacatctaagatgcactgaaggagttcattttgtgttgttttgaggtacatgcttttaaagatttggaactttgaatatgaaccgaagtcgttgtctaattcggctaacattgaacagttccataaagatgcctctattttctgaattttccttttcgtcgtgatttctcaaaactaactcgaaactccacaaaaccatatagatataatttttaatttgattcaaaacatatcgattcttatccacttcttgttcattgtgtttaattagactatcacgataagctgaatttaactcgggttttattaaaattaaaaattttaaattacttaaaaatataatagtttataataaaaagtttaatcattatgtaataaatacaaaaacgagcgagcgagcgcataaaaaaactggaaaatataatgtactaccctgtacgagaatctttttggatctacgatccactattcactcactattcactatgatgagcatagtaaaaaatattagatcttccttgtccttgtcgagcatcttgttgagccaggcacgaatagtctcatttaaacgtgtattaaaagtgcaatatagctctacctctgtcacttatatagaatgcccgtaaaatctttctcttttcagccgagccatctaagcttttggcacgatgcgatcatcccgtccgctgtgagtggcgaggattgtactacactgcacagttgccagattttatataatttataaagagaaaagaaatacgcacaaaaaatgaacgggcattaaaacggtttaaagataaaaaatatgtttctgcataaaaattctgcaccggccgccactggcgtatgcagaatatttcgattaaactaaaattccaaaatttcgttctgcattatgcaaaacttgatttatgtttatataaattataaacatgtaaattttggtgctattaaattaagtgtaaaattattaggcatggtaaagttataaaaaaataaccaaatcttttgtttgttaaaattcttagaagtaacaagttaattaactatttaaagttattaataaacaattagaaggtaaagtgaaataaaaccacttctaattcgatttctatgaaaaaagtcaatatatgtggaaaaatttaaaatttcttcaatactgtttccttggtttttacgctaccaaaatacgtttgatttatcgagtcacatcgaaactatcaatgtattaataaatttgtaatgttcattagtcatttaatattaaaatttttaggattacatgtcattattgcgtaatatagttttgcatttcaaagctagtcctattgaactggattctacttgttaggaaaaaagaaatgattagaaatttcataaatcttttacaattttcaatattccatgaatgtctttttgctgtttcaaaatttcatttaaatcaaatttcaagacaatctatatttgctttatagctgcctttagttattaaatttgtactatattcctgatccgataaaattggtggtagataaagattgatttttaacattattaggtttgggctaagtatctactagtctgggtatgtctagcgttacaatgtataacgtatactgcgaataacgtgcgcaaaatggcgattttcgctaagagttacctaaggcccgtccggcgaaacgatcagattttctgcattcattcagtggcgtattttcaagaagttagttaatatattattatgtgtctttatgtaaattttagaatggcttctttatttttgattcaaataatggatatgttaaataatttattagtcgattaaaaatacgctataacctagaccttaagatatataaaattattgttaatttgtccgttaacattttgctatttaataagggccgccgtagctcaggctgtaggatatctgactcgcatgctggtaggccggggttcgaaacccgcgccggcgagaacatctagacatttttaaaaatgtctataggccccaggtcgactcagcctgaataaaattagtactttgggtaaaaccaggggtaataataggcggttgaagcgtagcactgaccctgttacctttcttgtataccgtaggcactagatatagcagactaccctgctataatcccaaagccgctttagcggtataaaacgggagactattataataacagatacagataatagatttttttttaattactgtgatgcatgctgtattctttcagtttcggctcaggaaatattatttgttaacttcctcagaaattgtgtgcagataataagttaatacaatctaaccccaatttttaatatacacaggaatcgacacgtttttttatattatttcataaaaatttttacacacctacttaaaacgagtcttttaatagtgaattagtgatgctgccaaatatttatgaacccaatttatcaaacttaatgttgtacttaggttacatcataatcttaattgtgaacactgactacatatcccttaaatgtaactttatcagtctttccattttttactactgatatacccttgtctatgtcaaaaaatagtataaacttgtgatatatgaaatatagtaattttggattttaatatatttataaatgttcttaaga

SEQ ID NO: 373 - DNA, 5181 bp, Diabrotica virgifera
  SmartBlast Evalue=5E-27; Info=Endonuclease-reverse transcriptase n=1 Tax=Bombyx mori RepID=D5LB38_BOMMO
gcaaatctagtattttgttgatttatggtatacagccagctacaggaagtttattttccttttcgattttgattttattacctccaaagctagaacgaaaagagtttgatctggaattgagcatggagtatactggagtattctggagaatttttttgcaggatctgtcaattatcgtttctttagcacctttctggatgttggcgatcagcatggctatcctaacttcgcttgctgctattcgcaatagtccagttgtcgatgtattgaaccactttcgcaggttttgaagcctagatatcgtagaatatttgtagatataacgtagaaaatacatagcttctgaaaagagacttcatcattatgaactctgatctcgcttttcctatgtgttgttttatttcatttgtgtggtcccactggctgtttatgttagtaccaaggaatgtgtaactgtccaccctgtcaattggttgttggttaaccaaaaactgtgtatttaatatttcgcgcttactgactaccatgtactttgtttttttttcgtattgagatcaactccgtgttctttacttatttatatctgatatgcgcgacattattctttactgtgacaatatacagtgtattgtccttttcatgacatttttcagtgcgtaacaaatgataggaaaaagggtaagtccgtgataatacacatttatgacatttattctaacatgacattttagttaaatctgacagttgtcacattttattttcaatttggaataaaaacaaatcaaatgtgtttcttgcatttataaaatggtattttctttgatttgtatagtcttataaattatacagattatatttgtaatattattatctaattaaaaaaaatatttttttattatggcgccatctatcgacaactagaataactagaataaatgttataaaaatgtcaccgacgaaatgtaatcaccgacgtgcctttttttctgtcacatacaatttaatgcgttagaaagaaatcgaaaaactgtgacgcactgaaagatgatcatgagaaatactgtataatctgaatttacataatatatcgtattcctaaagtcgaaaatgtaatttttcgactttgggatcggttatttcgaatttggtttgagatatcaaactcgcaagatgatattccttcttcttcttaaagtgcccatccgttctggatgttggcgatcatcatggctatcttgactttgtttaccacagcgcgaaatagttcagcggtagtcgtgttataccactttcgtaaattttgaagccaggaaatgcgtcttcttcccggtcctcttttaccatccgttggagaaggccgtagcatttctcattacatgtcctagatattctaattttttcgttatgatggtcatgagaatttcacactctttccccattctacgcagtacttctacattagtaattcggtcaacccaggatatacgtaagatgcgcctataacaccacatttcgaaagcttcggaccgattcatagatgcaacagttagtgtccacgcttccattccgtagagcagaactgtaaatatgtatcatttcaacagacggtattttgtttttaatgatatgtctagactctagactattgaaaaagggtctcattccaacgaatgctgcttttgcttttattattcactgtttaatttctgttgagtgggtccattggctatttaaattggtgcctagatatgtatattgctccactctttcaatattctgttgtttgattgtaagttgagtgtttagtatgattttcctaaactaggtaaaaaacacattgatttgatacctatatcatatgccataaatcaaaaattcgattttttgactttgaggtcggttgatatcgaaatggtttttaaatttggattcaggagacaaactgcataagaatccatcgtagatcgactcacaagtatttcaggggcggcgatgtacaaacgaacgaatcaacgaacagactttgcgaatttatatacgaaaacgaagttttcgttgaaaataaatgaattcatcgattaagctgtccttagtagcaaagtaatgtaaagcatgtagtgctatcaaacgctgtattgcgtatgccagtggcggctcgtatcactttaagtaggtagtgccagaattcgggcagctgcctaaatttttagtgacgggttcacaatattgtcaaaaaaggtataaaatagaaattaaaaaaaataggtacggatatttttacattatgtaggtatataccatttctggggtgtcaagaaatttaaacatttaaaatgcattcagtgattgatttgacatcatgtccgtccaacaagtaaaatctccaaaatctctcaacttatcgccctttacacaaatatcggaaaactataactaactgaaattcaccagcgacgcgacgtctgtcgtttcatcggcaatcactgcaacacaaagataattttcaatttctttccttatttcctcgtgataaacatctaagatgcactgaaggagttcattttgtgttgttttgaggtacatgcttttaaagatttggaactttgaatatgaaccgaagtcgttgtctaattcggctaacattgaacagttccataaagatgcctctattttctgaattttccttttcgtcgtgatttctcaaaactaactcgaaactccacaaaaccatatagatataatttttaatttgattcaaaacatatcgattcttatccacttcttgttcattgtgtttaattagactatcacgataagctgaatttaactcgggttttattaaaattaaaaattttaaattacttaaaaatataatagtttataataaaaagtttaatcattaaaaatgtaataattataaatacaaaaacgagcgagcgagcgcgtaaaaaaactcgaaaagataatgtaggtactaccctgtacgagaagctttttggatctgatctacgatccactattcactatgatgagcatagtaaaaaatattagatcttcctgccttgtcgagccaggcacgaatagtttcatttaaacgtgtattaaaagtgcaatatagctctatctctgtcacttacatagaatgcccgtaaaatctttctcttttcagccgagccatctaagcttttggcacgatgcgatcatcccgtccgctgtgagtggcgaggattgtactacactgcacagttgccagattttatataatttataaagagaaaagaaatacgcacaaaaaatgaacgggcattaaaacggtttaaagataaaaaatatgtttctgcataaaaattctgcaccggccgccactggcgtatgcagaatatttcgattaaactaaaattccaaaatttcgttctgcattatgcaaaacttgatttatgtttatataaattataaacatgtaaattttggtgctattaaattaagtgtaaaattattaggcatggtaaagttataaaaaaataaccaaatcttttgtttgttaaaattcttagaagtaacaagttaattaactatttaaagttattaataaacaattagaaggtaaagtgaaataaaaccacttctaattcgatttctatgaaaaaagtcaatatatgtggaaaaatttaaaatttcttcaatactgtttccttggtttttacgctaccaaaatacgtttgatttatcgagtcacatcgaaactatcaatgtattaataaatttgtaatgttcattagtcatttaatattaaaatttttaggattacatgtcattattgcgtaatatagttttgcatttcaaagctagtcctattgaactggattctacttgttaggaaaaaagaaatgattagaaatttcataaatcttttacaattttcaatattccatgaatgtctttttgctgtttcaaaatttcatttaaatcaaatttcaagacaatctatatttgctttatagctgcctttagttattaaatttgtactatattcctgatccgataaaattggtggtagataaagattgatttttaacattattaggtttgggctaagtatctactagtctgggtatgtctagcgttacaatgtataacgtatactgcgaataacgtgcgcaaaatggcgattttcgctaagagttacctaaggcccgtccggcgaaacgatcagattttctgcattcattcagtggcgtattttcaagaagttagttaatatattattatgtgtctttatgtaaattttagaatggcttctttatttttgattcaaataatggatatgttaaataatttattagtcgattaaaaatacgctataacctagaccttaagatatataaaattattgttaatttgtccgttaacattttgctatttaataagggccgccgtagctcaggctgtaggatatctgactcgcatgctggtaggccggggttcgaaacccgcgccggcgagaacatctagacatttttaaaaatgtctataggccccaggtcgactcagcctgaataaaattagtactttgggtaaaaccaggggtaataataggcggttgaagcgtagcactgaccctgttacctttcttgtataccgtaggcactagatatagcagactaccctgctataatcccaaagccgctttagcggtataaaacgggagactattataataacagatacagataatagatttttttttaattactgtgatgcatgctgtattctttcagtttcggctcaggaaatattatttgttaacttcctcagaaattgtgtgcagataataagttaatacaatctaaccccaatttttaatatacacaggaatcgacacgtttttttatattatttcataaaaatttttacacacctacttaaaacgagtcttttaatagtgaattagtgatgctgccaaatatttatgaacccaatttatcaaacttaatgttgtacttaggttacatcataatcttaattgtgaacactgactacatatcccttaaatgtaactttatcagtctttccattttttactactgatatacccttgtctatgtcaaaaaatagtataaacttgtgatatatgaaatatagtaattttggattttaatatatttataaatgttcttaaga

SEQ ID NO: 374 - DNA, 4808 bp, Diabrotica virgifera
  SmartBlast Evalue=4E-27; Info=Endonuclease-reverse transcriptase n=1 Tax=Bombyx mori RepID=D5LB38_BOMMO
tattgtccttttcatgacatttttcagtgcgtaacaaatgataggaaaaagggtaagtccgtgataatacacatttatgacatttattctaacatgacattttagttaaatctgacagttgtcacattttattttcaatttggaataaaaacaaatcaaatgtgtttcttgcatttataaaatggtattttctttgatttgtatagtcttataaattatacagattatatttgtaatattattatctaattaaaaaaaatatttttttattatggcgccatctatcgacaactagaataactagaataaatgttataaaaatgtcaccgacgaaatgtaatcaccgacgtgcctttttttctgtcacatacaatttaatgcgttagaaagaaatcgaaaaactgtgacgcactgaaagatgatcatgagaaatactgtataatctgaatttacataatatatcgtattcctaaagtcgaaaatgtaatttttcgactttgggatcggttatttcgaatttggtttgagatatcaaactcgcaagatgatattccttcttcttcttaaagtgcccatccgttctggatgttggcgatcatcatggctatcttgactttgtttaccacagcgcgaaatagttcagcggtagtcgtgttataccactttcgtaaattttgaagccaggaaatgcgtcttcttcccggtcctcttttaccatccgttggagaaggccgtagcatttctcattacatgtcctagatattctaattttttcgttatgatggtcatgagaatttcacactctttccccattctacgcagtacttctacattagtaattcggtcaacccaggatatacgtaagatgcgcctataacaccacatttcgaaagcttcggaccgattcatagatgcaacagttagtgtccacgcttccattccgtagagcagaactgtaaatatgtatcatttcaacagacggtattttgtttttaatgatatgtctagactctagactattgaaaaagggtctcattccaacgaatgctgcttttgcttttattattcactgtttaatttctgttgagtgggtccattggctatttaaattggtgcctagatatgtatattgctccactctttcaatattctgttgtttgattgtaagttgagtgtttagtatgattttcctaaactaggtaaaaaacacattgatttgatacctatatcatatgccataaatcaaaaattcgattttttgactttgaggtcggttgatatcgaaatggtttttaaatttggattcaggagacaaactgcataagaatccatcgtagatcgactcacaagtatttcaggggcggcgatgtacaaacgaacgaatcaacgaacagactttgcgaatttatatacgaaaacgaagttttcgttgaaaataaatgaattcatcgattaagctgtccttagtagcaaagtaatgtaaagcatgtagtgctatcaaacgctgtattgcgtatgccagtggcggctcgtatcactttaagtaggtagtgccagaattcgggcagctgcctaaatttttagtgacgggttcacaatattgtcaaaaaaggtataaaatagaaattaaaaaaaataggtacggatatttttacattatgtaggtatataccatttctggggtgtcaagaaatttaaacatttaaaatgcattcagtgattgatttgacatcatgtccgtccaacaagtaaaatctccaaaatctctcaacttatcgccctttacacaaatatcggaaaactataactaactgaaattcaccagcgacgcgacgtctgtcgtttcatcggcaatcactgcaacacaaagataattttcaatttctttccttatttcctcgtgataaacatctaagatgcactgaaggagttcattttgtgttgttttgaggtacatgcttttaaagatttggaactttgaatatgaaccgaagtcgttgtctaattcggctaacattgaacagttccataaagatgcctctattttctgaattttccttttcgtcgtgatttctcaaaactaactcgaaactccacaaaaccatatagatataatttttaatttgattcaaaacatatcgattcttatccacttcttgttcattgtgtttaattagactatcacgataagctgaatttaactcgggttttattaaaattaaaaattttaaattacttaaaaatataatagtttataataaaaagtttaatcattatgtaataaatacaaaaacgagcgagcgagcgcataaaaaaactggaaaatataatgtactaccctgtacgagaatctttttggatctacgatccactattcactcactattcactatgatgagcatagtaaaaaatattagatcttccttgtccttgtcgagcatcttgttgagccaggcacgaatagtctcatttaaacgtgtattaaaagtgcaatatagctctacctctgtcacttatatagaatgcccgtaaaatctttctcttttcagccgagccatctaagcttttggcacgatgcgatcatcccgtccgctgtctgtgagtggcgagggttgtactacactgcacagttgccagattttatataatttataaagagaaaagaaatacgcacaaaaaatgaacgggcattaaaacggtttaaagataaaaaaaaaatatgtttctgcataaaaataaggtagtgtcatggcactacctcaccggccgccactggcgtatgcagaatatttcaaataaactaaaattccagaatttcgttctgcattatacaaaacttgatttatgtttatataaattataaacatgtaaattttggtgctattaaattaagtgtaaaattattaggcatggtaaagttataaaaaaataaccaaatcttttgtttgttaaaattcttagaagtaacaagttaattaactatttaaagttattaataaacaattagaaggtaaagtgaaataaaaccacttctaattcgatttctatgaaaaaagtcaatatatgtggaaaaatttaaaatttcttcaatactgtttccttggtttttacgctaccaaaatacgtttgatttatcgagtcacatcgaaactatcaatgtattaataaatttgtaatgttcattagtcatttaatattaaaatttttaggattacatgtcattattgcgtaatatagttttgcatttcaaagctagtcctattgaactggattctacttgttaggaaaaaagaaatgattagaaatttcataaatcttttacaattttcaatattccatgaatgtctttttgctgtttcaaaatttcatttaaatcaaatttcaagacaatctatatttgctttatagctgcctttagttattaaatttgtactatattcctgatccgataaaattggtggtagataaagattgatttttaacattattaggtttgggctaagtatctactagtctgggtatgtctagcgttacaatgtataacgtatagtgcgaataacgtgcgcaaaatggcgattttcgctaagagttacctaaggcccgtccggcgaaacgatcggattttctgtattcattcagtggcgtattttcaagaagttagttaatatattattatgtgtctttatgtaaattttagaatggcttctttatttttgattcaaataatggatatgttaaatgatttattagtcgattaaaaatacgctataacctagaccagaggttctcaatctttttgagtcaggtaccaccaaatactttttattatttttggtaccacctaactaaaatacctgtctagctaggtgatctaattaactataattgtgccaatggtggtgctgattttggctgttttgactttgcgtaccacctcaaataatgaaatgtaccaccagtggtacatgtaccagagattgagaaccgctgacctagaccttaagatatataaaattattgttaatttgtccgttaacattttgctatttaataagggccggcgtagctcaggctgtaggatatctgactcgcatgctggtaggccggggttcgaaacccgcgccggcgagaacatctagacatttttaaaaatgtctataggccccaggtcgactcagcctgaataaaattagtactttgggtaaaaccaggggtaataataggcggttgaagcgtagcactgaccctgttacctttcttgtataccgtaggcactagatatagcagactaccctgctataatcccaaagccgctttagcggtataaaacgggagactattataataacagatacagataatagatttttttttaattactgtgatgcatgctgtattctttcagtttcggctcaggaaatattatttgttaacttcctcagaaattgtgtgcagataataagttaatacaatctaaccccaatttttaatatacacaggaatcgacacgtttttttatattatttcataaaaatttttacacacctacttaaaacgagtcttttaatagtgaattagtgatgctgccaaatatttatgaacccaatttatcaaacttaatgttgtacttaggttacatcataatcttaattgtgaacactgactacatatcccttaaatgtaactttatcagtctttccattttttactactgatatacccttgtctatgtcaaaaaatagtataaacttgtgatatatgaaatatagtaattttggattttaatatatttataaatgttcttaaga

SEQ ID NO: 375 - DNA, 4802 bp, Diabrotica virgifera
  SmartBlast Evalue=4E-27; Info=Endonuclease-reverse transcriptase n=1 Tax=Bombyx mori RepID=D5LB38_BOMMO
tattgtccttttcatgacatttttcagtgcgtaacaaatgataggaaaaagggtaagtccgtgataatacacatttatgacatttattctaacatgacattttagttaaatctgacagttgtcacattttattttcaatttggaataaaaacaaatcaaatgtgtttcttgcatttataaaatggtattttctttgatttgtatagtcttataaattatacagattatatttgtaatattattatctaattaaaaaaaatatttttttattatggcgccatctatcgacaactagaataactagaataaatgttataaaaatgtcaccgacgaaatgtaatcaccgacgtgcctttttttctgtcacatacaatttaatgcgttagaaagaaatcgaaaaactgtgacgcactgaaagatgatcatgagaaatactgtataatctgaatttacataatatatcgtattcctaaagtcgaaaatgtaatttttcgactttgggatcggttatttcgaatttggtttgagatatcaaactcgcaagatgatattccttcttcttcttaaagtgcccatccgttctggatgttggcgatcatcatggctatcttgactttgtttaccacagcgcgaaatagttcagcggtagtcgtgttataccactttcgtaaattttgaagccaggaaatgcgtcttcttcccggtcctcttttaccatccgttggagaaggccgtagcatttctcattacatgtcctagatattctaattttttcgttatgatggtcatgagaatttcacactctttccccattctacgcagtacttctacattagtaattcggtcaacccaggatatacgtaagatgcgcctataacaccacatttcgaaagcttcggaccgattcatagatgcaacagttagtgtccacgcttccattccgtagagcagaactgtaaatatgtatcatttcaacagacggtattttgtttttaatgatatgtctagactctagactattgaaaaagggtctcattccaacgaatgctgcttttgcttttattattcactgtttaatttctgttgagtgggtccattggctatttaaattggtgcctagatatgtatattgctccactctttcaatattctgttgtttgattgtaagttgagtgtttagtatgattttcctaaactaggtaaaaaacacattgatttgatacctatatcatatgccataaatcaaaaattcgattttttgactttgaggtcggttgatatcgaaatggtttttaaatttggattcaggagacaaactgcataagaatccatcgtagatcgactcacaagtatttcaggggcggcgatgtacaaacgaacgaatcaacgaacagactttgcgaatttatatacgaaaacgaagttttcgttgaaaataaatgaattcatcgattaagctgtccttagtagcaaagtaatgtaaagcatgtagtgctatcaaacgctgtattgcgtatgccagtggcggctcgtatcactttaagtaggtagtgccagaattcgggcagctgcctaaatttttagtgacgggttcacaatattgtcaaaaaaggtataaaatagaaattaaaaaaaataggtacggatatttttacattatgtaggtatataccatttctggggtgtcaagaaatttaaacatttaaaatgcattcagtgattgatttgacatcatgtccgtccaacaagtaaaatctccaaaatctctcaacttatcgccctttacacaaatatcggaaaactataactaactgaaattcaccagcgacgcgacgtctgtcgtttcatcggcaatcactgcaacacaaagataattttcaatttctttccttatttcctcgtgataaacatctaagatgcactgaaggagttcattttgtgttgttttgaggtacatgcttttaaagatttggaactttgaatatgaaccgaagtcgttgtctaattcggctaacattgaacagttccataaagatgcctctattttctgaattttccttttcgtcgtgatttctcaaaactaactcgaaactccacaaaaccatatagatataatttttaatttgattcaaaacatatcgattcttatccacttcttgttcattgtgtttaattagactatcacgataagctgaatttaactcgggttttattaaaattaaaaattttaaattacttaaaaatataatagtttataataaaaagtttaatcattaaaaatgtaataattataaatacaaaaacgagcgagcgagcgcgtaaaaaaactcgaaaagataatgtaggtactaccctgtacgagaagctttttggatctgatctacgatccactattcactatgatgagcatagtaaaaaatattagatcttcctgccttgtcgagccaggcacgaatagtttcatttaaacgtgtattaaaagtgcaatatagctctatctctgtcacttacatagaatgcccgtaaaatctttctcttttcagccgagccatctaagcttttggcacgatgcgatcatcccgtccgctgtctgtgagtggcgagggttgtactacactgcacagttgccagattttatataatttataaagagaaaagaaatacgcacaaaaaatgaacgggcattaaaacggtttaaagataaaaaaaaaatatgtttctgcataaaaataaggtagtgtcatggcactacctcaccggccgccactggcgtatgcagaatatttcaaataaactaaaattccagaatttcgttctgcattatacaaaacttgatttatgtttatataaattataaacatgtaaattttggtgctattaaattaagtgtaaaattattaggcatggtaaagttataaaaaaataaccaaatcttttgtttgttaaaattcttagaagtaacaagttaattaactatttaaagttattaataaacaattagaaggtaaagtgaaataaaaccacttctaattcgatttctatgaaaaaagtcaatatatgtggaaaaatttaaaatttcttcaatactgtttccttggtttttacgctaccaaaatacgtttgatttatcgagtcacatcgaaactatcaatgtattaataaatttgtaatgttcattagtcatttaatattaaaatttttaggattacatgtcattattgcgtaatatagttttgcatttcaaagctagtcctattgaactggattctacttgttaggaaaaaagaaatgattagaaatttcataaatcttttacaattttcaatattccatgaatgtctttttgctgtttcaaaatttcatttaaatcaaatttcaagacaatctatatttgctttatagctgcctttagttattaaatttgtactatattcctgatccgataaaattggtggtagataaagattgatttttaacattattaggtttgggctaagtatctactagtctgggtatgtctagcgttacaatgtataacgtatagtgcgaataacgtgcgcaaaatggcgattttcgctaagagttacctaaggcccgtccggcgaaacgatcggattttctgtattcattcagtggcgtattttcaagaagttagttaatatattattatgtgtctttatgtaaattttagaatggcttctttatttttgattcaaataatggatatgttaaatgatttattagtcgattaaaaatacgctataacctagaccagaggttctcaatctttttgagtcaggtaccaccaaatactttttattatttttggtaccacctaactaaaatacctgtctagctaggtgatctaattaactataattgtgccaatggtggtgctgattttggctgttttgactttgcgtaccacctcaaataatgaaatgtaccaccagtggtacatgtaccagagattgagaaccgctgacctagaccttaagatatataaaattattgttaatttgtccgttaacattttgctatttaataagggccggcgtagctcaggctgtaggatatctgactcgcatgctggtaggccggggttcgaaacccgcgccggcgagaacatctagacatttttaaaaatgtctataggccccaggtcgactcagcctgaataaaattagtactttgggtaaaaccaggggtaataataggcggttgaagcgtagcactgaccctgttacctttcttgtataccgtaggcactagatatagcagactaccctgctataatcccaaagccgctttagcggtataaaacgggagactattataataacagatacagataatagatttttttttaattactgtgatgcatgctgtattctttcagtttcggctcaggaaatattatttgttaacttcctcagaaattgtgtgcagataataagttaatacaatctaaccccaatttttaatatacacaggaatcgacacgtttttttatattatttcataaaaatttttacacacctacttaaaacgagtcttttaatagtgaattagtgatgctgccaaatatttatgaacccaatttatcaaacttaatgttgtacttaggttacatcataatcttaattgtgaacactgactacatatcccttaaatgtaactttatcagtctttccattttttactactgatatacccttgtctatgtcaaaaaatagtataaacttgtgatatatgaaatatagtaattttggattttaatatatttataaatgttcttaaga

SEQ ID NO: 376 - DNA, 4781 bp, Diabrotica virgifera
  SmartBlast Evalue=4E-27; Info=Endonuclease-reverse transcriptase n=1 Tax=Bombyx mori RepID=D5LB38_BOMMO
tattgtccttttcatgacatttttcagtgcgtaacaaatgataggaaaaagggtaagtccgtgataatacacatttatgacatttattctaacatgacattttagttaaatctgacagttgtcacattttattttcaatttggaataaaaacaaatcaaatgtgtttcttgcatttataaaatggtattttctttgatttgtatagtcttataaattatacagattatatttgtaatattattatctaattaaaaaaaatatttttttattatggcgccatctatcgacaactagaataactagaataaatgttataaaaatgtcaccgacgaaatgtaatcaccgacgtgcctttttttctgtcacatacaatttaatgcgttagaaagaaatcgaaaaactgtgacgcactgaaagatgatcatgagaaatactgtataatctgaatttacataatatatcgtattcctaaagtcgaaaatgtaatttttcgactttgggatcggttatttcgaatttggtttgagatatcaaactcgcaagatgatattccttcttcttcttaaagtgcccatccgttctggatgttggcgatcatcatggctatcttgactttgtttaccacagcgcgaaatagttcagcggtagtcgtgttataccactttcgtaaattttgaagccaggaaatgcgtcttcttcccggtcctcttttaccatccgttggagaaggccgtagcatttctcattacatgtcctagatattctaattttttcgttatgatggtcatgagaatttcacactctttccccattctacgcagtacttctacattagtaattcggtcaacccaggatatacgtaagatgcgcctataacaccacatttcgaaagcttcggaccgattcatagatgcaacagttagtgtccacgcttccattccgtagagcagaactgtaaatatgtatcatttcaacagacggtattttgtttttaatgatatgtctagactctagactattgaaaaagggtctcattccaacgaatgctgcttttgcttttattattcactgtttaatttctgttgagtgggtccattggctatttaaattggtgcctagatatgtatattgctccactctttcaatattctgttgtttgattgtaagttgagtgtttagtatgattttcctaaactaggtaaaaaacacattgatttgatacctatatcatatgccataaatcaaaaattcgattttttgactttgaggtcggttgatatcgaaatggtttttaaatttggattcaggagacaaactgcataagaatccatcgtagatcgactcacaagtatttcaggggcggcgatgtacaaacgaacgaatcaacgaacagactttgcgaatttatatacgaaaacgaagttttcgttgaaaataaatgaattcatcgattaagctgtccttagtagcaaagtaatgtaaagcatgtagtgctatcaaacgctgtattgcgtatgccagtggcggctcgtatcactttaagtaggtagtgccagaattcgggcagctgcctaaatttttagtgacgggttcacaatattgtcaaaaaaggtataaaatagaaattaaaaaaaataggtacggatatttttacattatgtaggtatataccatttctggggtgtcaagaaatttaaacatttaaaatgcattcagtgattgatttgacatcatgtccgtccaacaagtaaaatctccaaaatctctcaacttatcgccctttacacaaatatcggaaaactataactaactgaaattcaccagcgacgcgacgtctgtcgtttcatcggcaatcactgcaacacaaagataattttcaatttctttccttatttcctcgtgataaacatctaagatgcactgaaggagttcattttgtgttgttttgaggtacatgcttttaaagatttggaactttgaatatgaaccgaagtcgttgtctaattcggctaacattgaacagttccataaagatgcctctattttctgaattttccttttcgtcgtgatttctcaaaactaactcgaaactccacaaaaccatatagatataatttttaatttgattcaaaacatatcgattcttatccacttcttgttcattgtgtttaattagactatcacgataagctgaatttaactcgggttttattaaaattaaaaattttaaattacttaaaaatataatagtttataataaaaagtttaatcattatgtaataaatacaaaaacgagcgagcgagcgcataaaaaaactggaaaatataatgtactaccctgtacgagaatctttttggatctacgatccactattcactcactattcactatgatgagcatagtaaaaaatattagatcttccttgtccttgtcgagcatcttgttgagccaggcacgaatagtctcatttaaacgtgtattaaaagtgcaatatagctctacctctgtcacttatatagaatgcccgtaaaatctttctcttttcagccgagccatctaagcttttggcacgatgcgatcatcccgtccgctgtgagtggcgaggattgtactacactgcacagttgccagattttatataatttataaagagaaaagaaatacgcacaaaaaatgaacgggcattaaaacggtttaaagataaaaaatatgtttctgcataaaaattctgcaccggccgccactggcgtatgcagaatatttcgattaaactaaaattccaaaatttcgttctgcattatgcaaaacttgatttatgtttatataaattataaacatgtaaattttggtgctattaaattaagtgtaaaattattaggcatggtaaagttataaaaaaataaccaaatcttttgtttgttaaaattcttagaagtaacaagttaattaactatttaaagttattaataaacaattagaaggtaaagtgaaataaaaccacttctaattcgatttctatgaaaaaagtcaatatatgtggaaaaatttaaaatttcttcaatactgtttccttggtttttacgctaccaaaatacgtttgatttatcgagtcacatcgaaactatcaatgtattaataaatttgtaatgttcattagtcatttaatattaaaatttttaggattacatgtcattattgcgtaatatagttttgcatttcaaagctagtcctattgaactggattctacttgttaggaaaaaagaaatgattagaaatttcataaatcttttacaattttcaatattccatgaatgtctttttgctgtttcaaaatttcatttaaatcaaatttcaagacaatctatatttgctttatagctgcctttagttattaaatttgtactatattcctgatccgataaaattggtggtagataaagattgatttttaacattattaggtttgggctaagtatctactagtctgggtatgtctagcgttacaatgtataacgtatagtgcgaataacgtgcgcaaaatggcgattttcgctaagagttacctaaggcccgtccggcgaaacgatcggattttctgtattcattcagtggcgtattttcaagaagttagttaatatattattatgtgtctttatgtaaattttagaatggcttctttatttttgattcaaataatggatatgttaaatgatttattagtcgattaaaaatacgctataacctagaccagaggttctcaatctttttgagtcaggtaccaccaaatactttttattatttttggtaccacctaactaaaatacctgtctagctaggtgatctaattaactataattgtgccaatggtggtgctgattttggctgttttgactttgcgtaccacctcaaataatgaaatgtaccaccagtggtacatgtaccagagattgagaaccgctgacctagaccttaagatatataaaattattgttaatttgtccgttaacattttgctatttaataagggccggcgtagctcaggctgtaggatatctgactcgcatgctggtaggccggggttcgaaacccgcgccggcgagaacatctagacatttttaaaaatgtctataggccccaggtcgactcagcctgaataaaattagtactttgggtaaaaccaggggtaataataggcggttgaagcgtagcactgaccctgttacctttcttgtataccgtaggcactagatatagcagactaccctgctataatcccaaagccgctttagcggtataaaacgggagactattataataacagatacagataatagatttttttttaattactgtgatgcatgctgtattctttcagtttcggctcaggaaatattatttgttaacttcctcagaaattgtgtgcagataataagttaatacaatctaaccccaatttttaatatacacaggaatcgacacgtttttttatattatttcataaaaatttttacacacctacttaaaacgagtcttttaatagtgaattagtgatgctgccaaatatttatgaacccaatttatcaaacttaatgttgtacttaggttacatcataatcttaattgtgaacactgactacatatcccttaaatgtaactttatcagtctttccattttttactactgatatacccttgtctatgtcaaaaaatagtataaacttgtgatatatgaaatatagtaattttggattttaatatatttataaatgttcttaaga

SEQ ID NO: 377 - DNA, 4775 bp, Diabrotica virgifera
  SmartBlast Evalue=4E-27; Info=Endonuclease-reverse transcriptase n=1 Tax=Bombyx mori RepID=D5LB38_BOMMO
tattgtccttttcatgacatttttcagtgcgtaacaaatgataggaaaaagggtaagtccgtgataatacacatttatgacatttattctaacatgacattttagttaaatctgacagttgtcacattttattttcaatttggaataaaaacaaatcaaatgtgtttcttgcatttataaaatggtattttctttgatttgtatagtcttataaattatacagattatatttgtaatattattatctaattaaaaaaaatatttttttattatggcgccatctatcgacaactagaataactagaataaatgttataaaaatgtcaccgacgaaatgtaatcaccgacgtgcctttttttctgtcacatacaatttaatgcgttagaaagaaatcgaaaaactgtgacgcactgaaagatgatcatgagaaatactgtataatctgaatttacataatatatcgtattcctaaagtcgaaaatgtaatttttcgactttgggatcggttatttcgaatttggtttgagatatcaaactcgcaagatgatattccttcttcttcttaaagtgcccatccgttctggatgttggcgatcatcatggctatcttgactttgtttaccacagcgcgaaatagttcagcggtagtcgtgttataccactttcgtaaattttgaagccaggaaatgcgtcttcttcccggtcctcttttaccatccgttggagaaggccgtagcatttctcattacatgtcctagatattctaattttttcgttatgatggtcatgagaatttcacactctttccccattctacgcagtacttctacattagtaattcggtcaacccaggatatacgtaagatgcgcctataacaccacatttcgaaagcttcggaccgattcatagatgcaacagttagtgtccacgcttccattccgtagagcagaactgtaaatatgtatcatttcaacagacggtattttgtttttaatgatatgtctagactctagactattgaaaaagggtctcattccaacgaatgctgcttttgcttttattattcactgtttaatttctgttgagtgggtccattggctatttaaattggtgcctagatatgtatattgctccactctttcaatattctgttgtttgattgtaagttgagtgtttagtatgattttcctaaactaggtaaaaaacacattgatttgatacctatatcatatgccataaatcaaaaattcgattttttgactttgaggtcggttgatatcgaaatggtttttaaatttggattcaggagacaaactgcataagaatccatcgtagatcgactcacaagtatttcaggggcggcgatgtacaaacgaacgaatcaacgaacagactttgcgaatttatatacgaaaacgaagttttcgttgaaaataaatgaattcatcgattaagctgtccttagtagcaaagtaatgtaaagcatgtagtgctatcaaacgctgtattgcgtatgccagtggcggctcgtatcactttaagtaggtagtgccagaattcgggcagctgcctaaatttttagtgacgggttcacaatattgtcaaaaaaggtataaaatagaaattaaaaaaaataggtacggatatttttacattatgtaggtatataccatttctggggtgtcaagaaatttaaacatttaaaatgcattcagtgattgatttgacatcatgtccgtccaacaagtaaaatctccaaaatctctcaacttatcgccctttacacaaatatcggaaaactataactaactgaaattcaccagcgacgcgacgtctgtcgtttcatcggcaatcactgcaacacaaagataattttcaatttctttccttatttcctcgtgataaacatctaagatgcactgaaggagttcattttgtgttgttttgaggtacatgcttttaaagatttggaactttgaatatgaaccgaagtcgttgtctaattcggctaacattgaacagttccataaagatgcctctattttctgaattttccttttcgtcgtgatttctcaaaactaactcgaaactccacaaaaccatatagatataatttttaatttgattcaaaacatatcgattcttatccacttcttgttcattgtgtttaattagactatcacgataagctgaatttaactcgggttttattaaaattaaaaattttaaattacttaaaaatataatagtttataataaaaagtttaatcattaaaaatgtaataattataaatacaaaaacgagcgagcgagcgcgtaaaaaaactcgaaaagataatgtaggtactaccctgtacgagaagctttttggatctgatctacgatccactattcactatgatgagcatagtaaaaaatattagatcttcctgccttgtcgagccaggcacgaatagtttcatttaaacgtgtattaaaagtgcaatatagctctatctctgtcacttacatagaatgcccgtaaaatctttctcttttcagccgagccatctaagcttttggcacgatgcgatcatcccgtccgctgtgagtggcgaggattgtactacactgcacagttgccagattttatataatttataaagagaaaagaaatacgcacaaaaaatgaacgggcattaaaacggtttaaagataaaaaatatgtttctgcataaaaattctgcaccggccgccactggcgtatgcagaatatttcgattaaactaaaattccaaaatttcgttctgcattatgcaaaacttgatttatgtttatataaattataaacatgtaaattttggtgctattaaattaagtgtaaaattattaggcatggtaaagttataaaaaaataaccaaatcttttgtttgttaaaattcttagaagtaacaagttaattaactatttaaagttattaataaacaattagaaggtaaagtgaaataaaaccacttctaattcgatttctatgaaaaaagtcaatatatgtggaaaaatttaaaatttcttcaatactgtttccttggtttttacgctaccaaaatacgtttgatttatcgagtcacatcgaaactatcaatgtattaataaatttgtaatgttcattagtcatttaatattaaaatttttaggattacatgtcattattgcgtaatatagttttgcatttcaaagctagtcctattgaactggattctacttgttaggaaaaaagaaatgattagaaatttcataaatcttttacaattttcaatattccatgaatgtctttttgctgtttcaaaatttcatttaaatcaaatttcaagacaatctatatttgctttatagctgcctttagttattaaatttgtactatattcctgatccgataaaattggtggtagataaagattgatttttaacattattaggtttgggctaagtatctactagtctgggtatgtctagcgttacaatgtataacgtatagtgcgaataacgtgcgcaaaatggcgattttcgctaagagttacctaaggcccgtccggcgaaacgatcggattttctgtattcattcagtggcgtattttcaagaagttagttaatatattattatgtgtctttatgtaaattttagaatggcttctttatttttgattcaaataatggatatgttaaatgatttattagtcgattaaaaatacgctataacctagaccagaggttctcaatctttttgagtcaggtaccaccaaatactttttattatttttggtaccacctaactaaaatacctgtctagctaggtgatctaattaactataattgtgccaatggtggtgctgattttggctgttttgactttgcgtaccacctcaaataatgaaatgtaccaccagtggtacatgtaccagagattgagaaccgctgacctagaccttaagatatataaaattattgttaatttgtccgttaacattttgctatttaataagggccggcgtagctcaggctgtaggatatctgactcgcatgctggtaggccggggttcgaaacccgcgccggcgagaacatctagacatttttaaaaatgtctataggccccaggtcgactcagcctgaataaaattagtactttgggtaaaaccaggggtaataataggcggttgaagcgtagcactgaccctgttacctttcttgtataccgtaggcactagatatagcagactaccctgctataatcccaaagccgctttagcggtataaaacgggagactattataataacagatacagataatagatttttttttaattactgtgatgcatgctgtattctttcagtttcggctcaggaaatattatttgttaacttcctcagaaattgtgtgcagataataagttaatacaatctaaccccaatttttaatatacacaggaatcgacacgtttttttatattatttcataaaaatttttacacacctacttaaaacgagtcttttaatagtgaattagtgatgctgccaaatatttatgaacccaatttatcaaacttaatgttgtacttaggttacatcataatcttaattgtgaacactgactacatatcccttaaatgtaactttatcagtctttccattttttactactgatatacccttgtctatgtcaaaaaatagtataaacttgtgatatatgaaatatagtaattttggattttaatatatttataaatgttcttaaga

SEQ ID NO: 378 - DNA, 4588 bp, Diabrotica virgifera
  SmartBlast Evalue=4E-27; Info=Endonuclease-reverse transcriptase n=1 Tax=Bombyx mori RepID=D5LB38_BOMMO
tattgtccttttcatgacatttttcagtgcgtaacaaatgataggaaaaagggtaagtccgtgataatacacatttatgacatttattctaacatgacattttagttaaatctgacagttgtcacattttattttcaatttggaataaaaacaaatcaaatgtgtttcttgcatttataaaatggtattttctttgatttgtatagtcttataaattatacagattatatttgtaatattattatctaattaaaaaaaatatttttttattatggcgccatctatcgacaactagaataactagaataaatgttataaaaatgtcaccgacgaaatgtaatcaccgacgtgcctttttttctgtcacatacaatttaatgcgttagaaagaaatcgaaaaactgtgacgcactgaaagatgatcatgagaaatactgtataatctgaatttacataatatatcgtattcctaaagtcgaaaatgtaatttttcgactttgggatcggttatttcgaatttggtttgagatatcaaactcgcaagatgatattccttcttcttcttaaagtgcccatccgttctggatgttggcgatcatcatggctatcttgactttgtttaccacagcgcgaaatagttcagcggtagtcgtgttataccactttcgtaaattttgaagccaggaaatgcgtcttcttcccggtcctcttttaccatccgttggagaaggccgtagcatttctcattacatgtcctagatattctaattttttcgttatgatggtcatgagaatttcacactctttccccattctacgcagtacttctacattagtaattcggtcaacccaggatatacgtaagatgcgcctataacaccacatttcgaaagcttcggaccgattcatagatgcaacagttagtgtccacgcttccattccgtagagcagaactgtaaatatgtatcatttcaacagacggtattttgtttttaatgatatgtctagactctagactattgaaaaagggtctcattccaacgaatgctgcttttgcttttattattcactgtttaatttctgttgagtgggtccattggctatttaaattggtgcctagatatgtatattgctccactctttcaatattctgttgtttgattgtaagttgagtgtttagtatgattttcctaaactaggtaaaaaacacattgatttgatacctatatcatatgccataaatcaaaaattcgattttttgactttgaggtcggttgatatcgaaatggtttttaaatttggattcaggagacaaactgcataagaatccatcgtagatcgactcacaagtatttcaggggcggcgatgtacaaacgaacgaatcaacgaacagactttgcgaatttatatacgaaaacgaagttttcgttgaaaataaatgaattcatcgattaagctgtccttagtagcaaagtaatgtaaagcatgtagtgctatcaaacgctgtattgcgtatgccagtggcggctcgtatcactttaagtaggtagtgccagaattcgggcagctgcctaaatttttagtgacgggttcacaatattgtcaaaaaaggtataaaatagaaattaaaaaaaataggtacggatatttttacattatgtaggtatataccatttctggggtgtcaagaaatttaaacatttaaaatgcattcagtgattgatttgacatcatgtccgtccaacaagtaaaatctccaaaatctctcaacttatcgccctttacacaaatatcggaaaactataactaactgaaattcaccagcgacgcgacgtctgtcgtttcatcggcaatcactgcaacacaaagataattttcaatttctttccttatttcctcgtgataaacatctaagatgcactgaaggagttcattttgtgttgttttgaggtacatgcttttaaagatttggaactttgaatatgaaccgaagtcgttgtctaattcggctaacattgaacagttccataaagatgcctctattttctgaattttccttttcgtcgtgatttctcaaaactaactcgaaactccacaaaaccatatagatataatttttaatttgattcaaaacatatcgattcttatccacttcttgttcattgtgtttaattagactatcacgataagctgaatttaactcgggttttattaaaattaaaaattttaaattacttaaaaatataatagtttataataaaaagtttaatcattatgtaataaatacaaaaacgagcgagcgagcgcataaaaaaactggaaaatataatgtactaccctgtacgagaatctttttggatctacgatccactattcactcactattcactatgatgagcatagtaaaaaatattagatcttccttgtccttgtcgagcatcttgttgagccaggcacgaatagtctcatttaaacgtgtattaaaagtgcaatatagctctacctctgtcacttatatagaatgcccgtaaaatctttctcttttcagccgagccatctaagcttttggcacgatgcgatcatcccgtccgctgtctgtgagtggcgagggttgtactacactgcacagttgccagattttatataatttataaagagaaaagaaatacgcacaaaaaatgaacgggcattaaaacggtttaaagataaaaaaaaaatatgtttctgcataaaaataaggtagtgtcatggcactacctcaccggccgccactggcgtatgcagaatatttcaaataaactaaaattccagaatttcgttctgcattatacaaaacttgatttatgtttatataaattataaacatgtaaattttggtgctattaaattaagtgtaaaattattaggcatggtaaagttataaaaaaataaccaaatcttttgtttgttaaaattcttagaagtaacaagttaattaactatttaaagttattaataaacaattagaaggtaaagtgaaataaaaccacttctaattcgatttctatgaaaaaagtcaatatatgtggaaaaatttaaaatttcttcaatactgtttccttggtttttacgctaccaaaatacgtttgatttatcgagtcacatcgaaactatcaatgtattaataaatttgtaatgttcattagtcatttaatattaaaatttttaggattacatgtcattattgcgtaatatagttttgcatttcaaagctagtcctattgaactggattctacttgttaggaaaaaagaaatgattagaaatttcataaatcttttacaattttcaatattccatgaatgtctttttgctgtttcaaaatttcatttaaatcaaatttcaagacaatctatatttgctttatagctgcctttagttattaaatttgtactatattcctgatccgataaaattggtggtagataaagattgatttttaacattattaggtttgggctaagtatctactagtctgggtatgtctagcgttacaatgtataacgtatactgcgaataacgtgcgcaaaatggcgattttcgctaagagttacctaaggcccgtccggcgaaacgatcagattttctgcattcattcagtggcgtattttcaagaagttagttaatatattattatgtgtctttatgtaaattttagaatggcttctttatttttgattcaaataatggatatgttaaataatttattagtcgattaaaaatacgctataacctagaccttaagatatataaaattattgttaatttgtccgttaacattttgctatttaataagggccgccgtagctcaggctgtaggatatctgactcgcatgctggtaggccggggttcgaaacccgcgccggcgagaacatctagacatttttaaaaatgtctataggccccaggtcgactcagcctgaataaaattagtactttgggtaaaaccaggggtaataataggcggttgaagcgtagcactgaccctgttacctttcttgtataccgtaggcactagatatagcagactaccctgctataatcccaaagccgctttagcggtataaaacgggagactattataataacagatacagataatagatttttttttaattactgtgatgcatgctgtattctttcagtttcggctcaggaaatattatttgttaacttcctcagaaattgtgtgcagataataagttaatacaatctaaccccaatttttaatatacacaggaatcgacacgtttttttatattatttcataaaaatttttacacacctacttaaaacgagtcttttaatagtgaattagtgatgctgccaaatatttatgaacccaatttatcaaacttaatgttgtacttaggttacatcataatcttaattgtgaacactgactacatatcccttaaatgtaactttatcagtctttccattttttactactgatatacccttgtctatgtcaaaaaatagtataaacttgtgatatatgaaatatagtaattttggattttaatatatttataaatgttcttaaga

SEQ ID NO: 379 - DNA, 8027 bp, Diabrotica virgifera
  SmartBlast Evalue=4E-61; Info=Ubiquitin-conjugating enzyme E2 variant 2 n=4 Tax=Apocrita RepID=E2AGB3_9HYME
aagtgttaactctatctctattctggaaagaattagtcctcacatcttttgtatttaagttgagggaaaaaggtgatttttgatatccaaagagccccgctttgttaatcaatagtaggggataagatttcaatcatccataatattcgaaaatattcaaaatacacttttaaaaattttaagtttgtgagtattttgtaatggcgaccccatcaactggtgttgttgtgcctcgaaactttcgactacttgaagaactagaagccggtcaaaagggtgtttcagatggtactattagctggggcttagaaaatgatgatgatatgacacttacacattggatggggatgataatcgggccccctcgtacaccgtatgaaaataggatgtattctgttaaaattgaatgtggccaaaggtatcctgatgatgcacctactgcaaagtttatctctagaatcaatataaactgtataaacagtaacacaggggtggtcgataacagacaagtcccaatattggctaggtggcaaagggattacactattaaaacggttttgcaagaattacgaagaataatgacacttaaagagaacatgaagctaacacagcctcctgaaggcacttgcttctagcctttgaatcagcataacactcccccagtatcttctgttacaacttgtccattgagtgtcgatacctgcaccacgcaatcatgctgtcttctgtagcggattcaccttactcacaaactatctatggggtgtcttgaactggttcttggaagataacctgtctggtaatgaggacaaactggtgtatttaggttaaggtgtctaatgataagagtattttttaatattactgcttgtacaacttgtttaactctattagaggatgactcatgatcgaacttgtatttttgtaggaaacaaaaagtaatgttgatgtcaattataataaaccatctatgacgcatctcgtatttcaataaaattgaatgaataggcgtttgacacaatattgttcttgtataacccaaagttttaagaatgggtggtcacgattcattcgatatactagatttttgggttgattaaccacttatttgtttttgtatattctactgggcagtagttgacaatttatcggaactgtatttttaaacttttactagtattcactcactttgtgtacgtttttataccaaagatgaaattgtcaactgctgtggtatgaaaaaaatcaatttatgcttaaatacatgttacgctttattatggagaatcagcttcgaaaatctaaaattctaaaagacatttattgaataactacaaggttgtattgatatttagacattttttgaatgtcgtgtgtgtttataaagaagttatcctttattttgtagtagtttcggacaccccttttaacagtcagagagtagatatctatttgtatatcattgattacatatatcataaacattatctaaatcattattttttttgaaaacacagaaattaaaagtaaaggtagaatacaccattttaaaatttgacaatgttatctcaatacattattacattctcaatattcacacacacgcttcactagcactcataggtatttagcatctccttgtttgctgtcataccttggttttacatttaaaacttatatgagaaaagtgatacttagatgagactttactttataagtttaacttttttctttaaagtcttgagtctgatgaaagaatgagtagagatctacactctgatgacccaagttgtaacaaagatggctaaggtgtacagctttataagctatgtagttaagttaacattttagctaaagttattaggttgaaataagtttatatacagtaccagagcatatattccatatatagcagcttatagaaaggtaggaggaactgctaaaaactttgtttgccttaccaatagttttaataatcgagttttaagtcgagatattcacgcaggtggtctaaaatgcccaaatgttatttattatagagtaagcgccactctactagatacattggtaggtacctagttggtatgattattggctaatctggtccgttctcagatgtgactttcatccctgtcatgttactgtcatgaaactattcaaaataattgtttttccatacaaaagaatacattaattaatagtattgttactctgctttaaaataactttattcaagcaccaagcaatattacaatactttaaaactattacaactttaacaaaatgacaactataaacgtcaaacacagctgatctattatttgtcaactttttatgttaatatagggcattccaacatgctgtcaaaagtcaatatgacgactgggaggcaaacataaatgttattctatcagttcttaatttgttttagataattttagttgcgtttctttgtaattttgtttttaaaagaattgatttgacattctcactagaagaattaatctaaaaagataatatgcctaatttctgttgtgttttgaaatgtggaatacgaaattcatgatgaagttcagttttatcggttactatcagtggtatattttaagcgtaaacacgtgtaaaacaactaaataagttatcatctgagagacaaaaacaaacaactaaataagttatgatctgggagacaaaaacaatggttaaatgctacaaaacgtcctataaaatgctaaataattatttccatgttacttacgcttggaaaacgtctaaaccatgtgttctcaaacccctcgaggaaaagtggacctatattatttattttgtcaatcttttgcttgtacctaccactgtgcgtctaggtacctactaacaacattatgtattgtctaccaagaatttatatgcactcatgtttatttattcactgcttaaaaccaaataaagtcgttcaggtacttctacaactaaaaactacacaaaatctacaacaaaatgttcagaaaatacaacttaaaactgttaatacatgtgctgcaaatattataaacagacacaatgtttgacagtttgcctcccaaacgtcagtcttgaaatgccctattcagtttctatacattttctgacgttctaaacgtcactggacatacaaataaacattgcaacaagtgaagggtccaggactataatagctcaatgttcctatggatctagtagggtggcggtggttactgtatagcaatattacagtatttctcatgatcatttttcagtgcgtaacaaatgataggaaaaagggtaagtccgtgataatacacatttatgacatttattctaacatgacattttagttaaatctgacagttgtcacattttattttcaatttggaataaaaacaaatcaaaagtgtttcttgcatttataaaatggtattttctttgatttgtatagtcttataaattatacagattatatttgtaatattattatctaatttaaaaaaaaatttttattatggcgccatctatcgacaactagaataactagaataaatgttataaaaatgtcaccgacgaaatgtaatcaccgacgtgcctttttttctgtcacatacaatttaatgcgttagaaagaaatcgaaaaactgtgacgcactgaaagatgatcatgagaaatactgtataatctgaatttacataatatatcgtattcctaaagtcgaaaatgtaatttttcgactttgggatcggttatttcgaatttggtttgagatatcaaactcgcaagatgatattccttcttcttcttaaagtgcccatccgttctggatgttggcgatcatcatggctatcttgactttgtttaccacagcgcgaaatagttcagcggtagtcgtgttataccactttcgtaaattttgaagccaggaaatgcgtcttcttcccggtcctcttttaccatccgttggagaaggccgtagcatttctcattacatgtcctagatattctaattttttcgttatgatggtcatgagaatttcacactctttccccattctacgcagtacttctacattagtaattcggtcaacccaggatatacgtaagatgcgcctataacaccacatttcgaaagcttcggaccgattcatagatgcaacagttagtgtccacgcttccattccgtagagcagaactgtaaatatgtatcatttcaacagacggtattttgtttttaatgatatgtctagactctagactattgaaaaagggtctcattccaacgaatgctgcttttgcttttattattcactgtttaatttctgttgagtgggtccattggctatttaaattggtgcctagatatgtatattgctccactctttcaatattctgttgtttgattgtaagttgagtgtttagtatgattttcctaaactaggtaaaaaacacattgatttgatacctatatcatatgccataaatcaaaaattcgattttttgactttgaggtcggttgatatcgaaatggtttttaaatttggattcaggagacaaactgcataagaatccatcgtagatcgactcacaagtatttcaggggcggcgatgtacaaacgaacgaatcaacgaacagactttgcgaatttatatacgaaaacgaagttttcgttgaaaataaatgaattcatcgattaagctgtccttagtagcaaagtaatgtaaagcatgtagtgctatcaaacgctgtattgcgtatgccagtggcggctcgtatcactttaagtaggtagtgccagaattcgggcagctgcctaaatttttagtgacgggttcacaatattgtcaaaaaaggtataaaatagaaattaaaaaaaataggtacggatatttttacattatgtaggtatataccatttctggggtgtcaagaaatttaaacatttaaaatgcattcagtgattgatttgacatcatgtccgtccaacaagtaaaatctccaaaatctctcaacttatcgccctttacacaaatatcggaaaactataactaactgaaattcaccagcgacgcgacgtctgtcgtttcatcggcaatcactgcaacacaaagataattttcaatttctttccttatttcctcgtgataaacatctaagatgcactgaaggagttcattttgtgttgttttgaggtacatgcttttaaagatttggaactttgaatatgaaccgaagtcgttgtctaattcggctaacattgaacagttccataaagatgcctctattttctgaattttccttttcgtcgtgatttctcaaaactaactcgaaactccacaaaaccatatagatataatttttaatttgattcaaaacatatcgattcttatccacttcttgttcattgtgtttaattagactatcacgataagctgaatttaactcgggttttattaaaattaaaaattttaaattacttaaaaatataatagtttataataaaaagtttaatcattatgtaataaatacaaaaacgagcgagcgagcgcataaaaaaactggaaaatataatgtactaccctgtacgagaatctttttggatctacgatccactattcactcactattcactatgatgagcatagtaaaaaatattagatcttccttgtccttgtcgagcatcttgttgagccaggcacgaatagtctcatttaaacgtgtattaaaagtgcaatatagctctacctctgtcacttatatagaatgcccgtaaaatctttctcttttcagccgagccatctaagcttttggcacgatgcgatcatcccgtccgctgtgagtggcgaggattgtactacactgcacagttgccagattttatataatttataaagagaaaagaaatacgcacaaaaaatgaacgggcattaaaacggtttaaagataaaaaatatgtttctgcataaaaattctgcaccggccgccactggcgtatgcagaatatttcgattaaactaaaattccaaaatttcgttctgcattatgcaaaacttgatttatgtttatataaattataaacatgtaaattttggtgctattaaattaagtgtaaaattattaggcatggtaaagttataaaaaaataaccaaatcttttgtttgttaaaattcttagaagtaacaagttaattaactatttaaagttattaataaacaattagaaggtaaagtgaaataaaaccacttctaattcgatttctatgaaaaaagtcaatatatgtggaaaaatttaaaatttcttcaatactgtttccttggtttttacgctaccaaaatacgtttgatttatcgagtcacatcgaaactatcaatgtattaataaatttgtaatgttcattagtcatttaatattaaaatttttaggattacatgtcattattgcgtaatatagttttgcatttcaaagctagtcctattgaactggattctacttgttaggaaaaaagaaatgattagaaatttcataaatcttttacaattttcaatattccatgaatgtctttttgctgtttcaaaatttcatttaaatcaaatttcaagacaatctatatttgctttatagctgcctttagttattaaatttgtactatattcctgatccgataaaattggtggtagataaagattgatttttaacattattaggtttgggctaagtatctactagtctgggtatgtctagcgttacaatgtataacgtatagtgcgaataacgtgcgcaaaatggcgattttcgctaagagttacctaaggcccgtccggcgaaacgatcggattttctgtattcattcagtggcgtattttcaagaagttagttaatatattattatgtgtctttatgtaaattttagaatggcttctttatttttgattcaaataatggatatgttaaatgatttattagtcgattaaaaatacgctataacctagaccagaggttctcaatctttttgagtcaggtaccaccaaatactttttattatttttggtaccacctaactaaaatacctgtctagctaggtgatctaattaactataattgtgccaatggtggtgctgattttggctgttttgactttgcgtaccacctcaaataatgaaatgtaccaccagtggtacatgtaccagagattgagaaccgctgacctagaccttaagatatataaaattattgttaatttgtccgttaacattttgctatttaataagggccggcgtagctcaggctgtaggatatctgactcgcatgctggtaggccggggttcgaaacccgcgccggcgagaacatctagacatttttaaaaatgtctataggccccaggtcgactcagcctgaataaaattagtactttgggtaaaaccaggggtaataataggcggttgaagcgtagcactgaccctgttacctttcttgtataccgtaggcactagatatagcagactaccctgctataatcccaaagccgctttagcggtataaaacgggagactattataataacagatacagataatagatttttttttaattactgtgatgcatgctgtattctttcagtttcggctcaggaaatattatttgttaacttcctcagaaattgtgtgcagataataagttaatacaatctaaccccaatttttaatatacacaggaatcgacacgtttttttatattatttcataaaaatttttacacacctacttaaaacgagtcttttaatagtgaattagtgatgctgccaaatatttatgaacccaatttatcaaacttaatgttgtacttaggttacatcataatcttaattgtgaacactgactacatatcccttaaatgtaactttatcagtctttccattttttactactgatatacccttgtctatgtcaaaaaatagtataaacttgtgatatatgaaatatagtaattttggattttaatatatttataaatgttcttaaga

SEQ ID NO: 380 - DNA, 4582 bp, Diabrotica virgifera
  SmartBlast Evalue=4E-27; Info=Endonuclease-reverse transcriptase n=1 Tax=Bombyx mori RepID=D5LB38_BOMMO
tattgtccttttcatgacatttttcagtgcgtaacaaatgataggaaaaagggtaagtccgtgataatacacatttatgacatttattctaacatgacattttagttaaatctgacagttgtcacattttattttcaatttggaataaaaacaaatcaaatgtgtttcttgcatttataaaatggtattttctttgatttgtatagtcttataaattatacagattatatttgtaatattattatctaattaaaaaaaatatttttttattatggcgccatctatcgacaactagaataactagaataaatgttataaaaatgtcaccgacgaaatgtaatcaccgacgtgcctttttttctgtcacatacaatttaatgcgttagaaagaaatcgaaaaactgtgacgcactgaaagatgatcatgagaaatactgtataatctgaatttacataatatatcgtattcctaaagtcgaaaatgtaatttttcgactttgggatcggttatttcgaatttggtttgagatatcaaactcgcaagatgatattccttcttcttcttaaagtgcccatccgttctggatgttggcgatcatcatggctatcttgactttgtttaccacagcgcgaaatagttcagcggtagtcgtgttataccactttcgtaaattttgaagccaggaaatgcgtcttcttcccggtcctcttttaccatccgttggagaaggccgtagcatttctcattacatgtcctagatattctaattttttcgttatgatggtcatgagaatttcacactctttccccattctacgcagtacttctacattagtaattcggtcaacccaggatatacgtaagatgcgcctataacaccacatttcgaaagcttcggaccgattcatagatgcaacagttagtgtccacgcttccattccgtagagcagaactgtaaatatgtatcatttcaacagacggtattttgtttttaatgatatgtctagactctagactattgaaaaagggtctcattccaacgaatgctgcttttgcttttattattcactgtttaatttctgttgagtgggtccattggctatttaaattggtgcctagatatgtatattgctccactctttcaatattctgttgtttgattgtaagttgagtgtttagtatgattttcctaaactaggtaaaaaacacattgatttgatacctatatcatatgccataaatcaaaaattcgattttttgactttgaggtcggttgatatcgaaatggtttttaaatttggattcaggagacaaactgcataagaatccatcgtagatcgactcacaagtatttcaggggcggcgatgtacaaacgaacgaatcaacgaacagactttgcgaatttatatacgaaaacgaagttttcgttgaaaataaatgaattcatcgattaagctgtccttagtagcaaagtaatgtaaagcatgtagtgctatcaaacgctgtattgcgtatgccagtggcggctcgtatcactttaagtaggtagtgccagaattcgggcagctgcctaaatttttagtgacgggttcacaatattgtcaaaaaaggtataaaatagaaattaaaaaaaataggtacggatatttttacattatgtaggtatataccatttctggggtgtcaagaaatttaaacatttaaaatgcattcagtgattgatttgacatcatgtccgtccaacaagtaaaatctccaaaatctctcaacttatcgccctttacacaaatatcggaaaactataactaactgaaattcaccagcgacgcgacgtctgtcgtttcatcggcaatcactgcaacacaaagataattttcaatttctttccttatttcctcgtgataaacatctaagatgcactgaaggagttcattttgtgttgttttgaggtacatgcttttaaagatttggaactttgaatatgaaccgaagtcgttgtctaattcggctaacattgaacagttccataaagatgcctctattttctgaattttccttttcgtcgtgatttctcaaaactaactcgaaactccacaaaaccatatagatataatttttaatttgattcaaaacatatcgattcttatccacttcttgttcattgtgtttaattagactatcacgataagctgaatttaactcgggttttattaaaattaaaaattttaaattacttaaaaatataatagtttataataaaaagtttaatcattaaaaatgtaataattataaatacaaaaacgagcgagcgagcgcgtaaaaaaactcgaaaagataatgtaggtactaccctgtacgagaagctttttggatctgatctacgatccactattcactatgatgagcatagtaaaaaatattagatcttcctgccttgtcgagccaggcacgaatagtttcatttaaacgtgtattaaaagtgcaatatagctctatctctgtcacttacatagaatgcccgtaaaatctttctcttttcagccgagccatctaagcttttggcacgatgcgatcatcccgtccgctgtctgtgagtggcgagggttgtactacactgcacagttgccagattttatataatttataaagagaaaagaaatacgcacaaaaaatgaacgggcattaaaacggtttaaagataaaaaaaaaatatgtttctgcataaaaataaggtagtgtcatggcactacctcaccggccgccactggcgtatgcagaatatttcaaataaactaaaattccagaatttcgttctgcattatacaaaacttgatttatgtttatataaattataaacatgtaaattttggtgctattaaattaagtgtaaaattattaggcatggtaaagttataaaaaaataaccaaatcttttgtttgttaaaattcttagaagtaacaagttaattaactatttaaagttattaataaacaattagaaggtaaagtgaaataaaaccacttctaattcgatttctatgaaaaaagtcaatatatgtggaaaaatttaaaatttcttcaatactgtttccttggtttttacgctaccaaaatacgtttgatttatcgagtcacatcgaaactatcaatgtattaataaatttgtaatgttcattagtcatttaatattaaaatttttaggattacatgtcattattgcgtaatatagttttgcatttcaaagctagtcctattgaactggattctacttgttaggaaaaaagaaatgattagaaatttcataaatcttttacaattttcaatattccatgaatgtctttttgctgtttcaaaatttcatttaaatcaaatttcaagacaatctatatttgctttatagctgcctttagttattaaatttgtactatattcctgatccgataaaattggtggtagataaagattgatttttaacattattaggtttgggctaagtatctactagtctgggtatgtctagcgttacaatgtataacgtatactgcgaataacgtgcgcaaaatggcgattttcgctaagagttacctaaggcccgtccggcgaaacgatcagattttctgcattcattcagtggcgtattttcaagaagttagttaatatattattatgtgtctttatgtaaattttagaatggcttctttatttttgattcaaataatggatatgttaaataatttattagtcgattaaaaatacgctataacctagaccttaagatatataaaattattgttaatttgtccgttaacattttgctatttaataagggccgccgtagctcaggctgtaggatatctgactcgcatgctggtaggccggggttcgaaacccgcgccggcgagaacatctagacatttttaaaaatgtctataggccccaggtcgactcagcctgaataaaattagtactttgggtaaaaccaggggtaataataggcggttgaagcgtagcactgaccctgttacctttcttgtataccgtaggcactagatatagcagactaccctgctataatcccaaagccgctttagcggtataaaacgggagactattataataacagatacagataatagatttttttttaattactgtgatgcatgctgtattctttcagtttcggctcaggaaatattatttgttaacttcctcagaaattgtgtgcagataataagttaatacaatctaaccccaatttttaatatacacaggaatcgacacgtttttttatattatttcataaaaatttttacacacctacttaaaacgagtcttttaatagtgaattagtgatgctgccaaatatttatgaacccaatttatcaaacttaatgttgtacttaggttacatcataatcttaattgtgaacactgactacatatcccttaaatgtaactttatcagtctttccattttttactactgatatacccttgtctatgtcaaaaaatagtataaacttgtgatatatgaaatatagtaattttggattttaatatatttataaatgttcttaaga

SEQ ID NO: 381 - DNA, 4561 bp, Diabrotica virgifera
  SmartBlast Evalue=4E-27; Info=Endonuclease-reverse transcriptase n=1 Tax=Bombyx mori RepID=D5LB38_BOMMO
tattgtccttttcatgacatttttcagtgcgtaacaaatgataggaaaaagggtaagtccgtgataatacacatttatgacatttattctaacatgacattttagttaaatctgacagttgtcacattttattttcaatttggaataaaaacaaatcaaatgtgtttcttgcatttataaaatggtattttctttgatttgtatagtcttataaattatacagattatatttgtaatattattatctaattaaaaaaaatatttttttattatggcgccatctatcgacaactagaataactagaataaatgttataaaaatgtcaccgacgaaatgtaatcaccgacgtgcctttttttctgtcacatacaatttaatgcgttagaaagaaatcgaaaaactgtgacgcactgaaagatgatcatgagaaatactgtataatctgaatttacataatatatcgtattcctaaagtcgaaaatgtaatttttcgactttgggatcggttatttcgaatttggtttgagatatcaaactcgcaagatgatattccttcttcttcttaaagtgcccatccgttctggatgttggcgatcatcatggctatcttgactttgtttaccacagcgcgaaatagttcagcggtagtcgtgttataccactttcgtaaattttgaagccaggaaatgcgtcttcttcccggtcctcttttaccatccgttggagaaggccgtagcatttctcattacatgtcctagatattctaattttttcgttatgatggtcatgagaatttcacactctttccccattctacgcagtacttctacattagtaattcggtcaacccaggatatacgtaagatgcgcctataacaccacatttcgaaagcttcggaccgattcatagatgcaacagttagtgtccacgcttccattccgtagagcagaactgtaaatatgtatcatttcaacagacggtattttgtttttaatgatatgtctagactctagactattgaaaaagggtctcattccaacgaatgctgcttttgcttttattattcactgtttaatttctgttgagtgggtccattggctatttaaattggtgcctagatatgtatattgctccactctttcaatattctgttgtttgattgtaagttgagtgtttagtatgattttcctaaactaggtaaaaaacacattgatttgatacctatatcatatgccataaatcaaaaattcgattttttgactttgaggtcggttgatatcgaaatggtttttaaatttggattcaggagacaaactgcataagaatccatcgtagatcgactcacaagtatttcaggggcggcgatgtacaaacgaacgaatcaacgaacagactttgcgaatttatatacgaaaacgaagttttcgttgaaaataaatgaattcatcgattaagctgtccttagtagcaaagtaatgtaaagcatgtagtgctatcaaacgctgtattgcgtatgccagtggcggctcgtatcactttaagtaggtagtgccagaattcgggcagctgcctaaatttttagtgacgggttcacaatattgtcaaaaaaggtataaaatagaaattaaaaaaaataggtacggatatttttacattatgtaggtatataccatttctggggtgtcaagaaatttaaacatttaaaatgcattcagtgattgatttgacatcatgtccgtccaacaagtaaaatctccaaaatctctcaacttatcgccctttacacaaatatcggaaaactataactaactgaaattcaccagcgacgcgacgtctgtcgtttcatcggcaatcactgcaacacaaagataattttcaatttctttccttatttcctcgtgataaacatctaagatgcactgaaggagttcattttgtgttgttttgaggtacatgcttttaaagatttggaactttgaatatgaaccgaagtcgttgtctaattcggctaacattgaacagttccataaagatgcctctattttctgaattttccttttcgtcgtgatttctcaaaactaactcgaaactccacaaaaccatatagatataatttttaatttgattcaaaacatatcgattcttatccacttcttgttcattgtgtttaattagactatcacgataagctgaatttaactcgggttttattaaaattaaaaattttaaattacttaaaaatataatagtttataataaaaagtttaatcattatgtaataaatacaaaaacgagcgagcgagcgcataaaaaaactggaaaatataatgtactaccctgtacgagaatctttttggatctacgatccactattcactcactattcactatgatgagcatagtaaaaaatattagatcttccttgtccttgtcgagcatcttgttgagccaggcacgaatagtctcatttaaacgtgtattaaaagtgcaatatagctctacctctgtcacttatatagaatgcccgtaaaatctttctcttttcagccgagccatctaagcttttggcacgatgcgatcatcccgtccgctgtgagtggcgaggattgtactacactgcacagttgccagattttatataatttataaagagaaaagaaatacgcacaaaaaatgaacgggcattaaaacggtttaaagataaaaaatatgtttctgcataaaaattctgcaccggccgccactggcgtatgcagaatatttcgattaaactaaaattccaaaatttcgttctgcattatgcaaaacttgatttatgtttatataaattataaacatgtaaattttggtgctattaaattaagtgtaaaattattaggcatggtaaagttataaaaaaataaccaaatcttttgtttgttaaaattcttagaagtaacaagttaattaactatttaaagttattaataaacaattagaaggtaaagtgaaataaaaccacttctaattcgatttctatgaaaaaagtcaatatatgtggaaaaatttaaaatttcttcaatactgtttccttggtttttacgctaccaaaatacgtttgatttatcgagtcacatcgaaactatcaatgtattaataaatttgtaatgttcattagtcatttaatattaaaatttttaggattacatgtcattattgcgtaatatagttttgcatttcaaagctagtcctattgaactggattctacttgttaggaaaaaagaaatgattagaaatttcataaatcttttacaattttcaatattccatgaatgtctttttgctgtttcaaaatttcatttaaatcaaatttcaagacaatctatatttgctttatagctgcctttagttattaaatttgtactatattcctgatccgataaaattggtggtagataaagattgatttttaacattattaggtttgggctaagtatctactagtctgggtatgtctagcgttacaatgtataacgtatactgcgaataacgtgcgcaaaatggcgattttcgctaagagttacctaaggcccgtccggcgaaacgatcagattttctgcattcattcagtggcgtattttcaagaagttagttaatatattattatgtgtctttatgtaaattttagaatggcttctttatttttgattcaaataatggatatgttaaataatttattagtcgattaaaaatacgctataacctagaccttaagatatataaaattattgttaatttgtccgttaacattttgctatttaataagggccgccgtagctcaggctgtaggatatctgactcgcatgctggtaggccggggttcgaaacccgcgccggcgagaacatctagacatttttaaaaatgtctataggccccaggtcgactcagcctgaataaaattagtactttgggtaaaaccaggggtaataataggcggttgaagcgtagcactgaccctgttacctttcttgtataccgtaggcactagatatagcagactaccctgctataatcccaaagccgctttagcggtataaaacgggagactattataataacagatacagataatagatttttttttaattactgtgatgcatgctgtattctttcagtttcggctcaggaaatattatttgttaacttcctcagaaattgtgtgcagataataagttaatacaatctaaccccaatttttaatatacacaggaatcgacacgtttttttatattatttcataaaaatttttacacacctacttaaaacgagtcttttaatagtgaattagtgatgctgccaaatatttatgaacccaatttatcaaacttaatgttgtacttaggttacatcataatcttaattgtgaacactgactacatatcccttaaatgtaactttatcagtctttccattttttactactgatatacccttgtctatgtcaaaaaatagtataaacttgtgatatatgaaatatagtaattttggattttaatatatttataaatgttcttaaga

SEQ ID NO: 382 - DNA, 4555 bp, Diabrotica virgifera
  SmartBlast Evalue=4E-27; Info=Endonuclease-reverse transcriptase n=1 Tax=Bombyx mori RepID=D5LB38_BOMMO
tattgtccttttcatgacatttttcagtgcgtaacaaatgataggaaaaagggtaagtccgtgataatacacatttatgacatttattctaacatgacattttagttaaatctgacagttgtcacattttattttcaatttggaataaaaacaaatcaaatgtgtttcttgcatttataaaatggtattttctttgatttgtatagtcttataaattatacagattatatttgtaatattattatctaattaaaaaaaatatttttttattatggcgccatctatcgacaactagaataactagaataaatgttataaaaatgtcaccgacgaaatgtaatcaccgacgtgcctttttttctgtcacatacaatttaatgcgttagaaagaaatcgaaaaactgtgacgcactgaaagatgatcatgagaaatactgtataatctgaatttacataatatatcgtattcctaaagtcgaaaatgtaatttttcgactttgggatcggttatttcgaatttggtttgagatatcaaactcgcaagatgatattccttcttcttcttaaagtgcccatccgttctggatgttggcgatcatcatggctatcttgactttgtttaccacagcgcgaaatagttcagcggtagtcgtgttataccactttcgtaaattttgaagccaggaaatgcgtcttcttcccggtcctcttttaccatccgttggagaaggccgtagcatttctcattacatgtcctagatattctaattttttcgttatgatggtcatgagaatttcacactctttccccattctacgcagtacttctacattagtaattcggtcaacccaggatatacgtaagatgcgcctataacaccacatttcgaaagcttcggaccgattcatagatgcaacagttagtgtccacgcttccattccgtagagcagaactgtaaatatgtatcatttcaacagacggtattttgtttttaatgatatgtctagactctagactattgaaaaagggtctcattccaacgaatgctgcttttgcttttattattcactgtttaatttctgttgagtgggtccattggctatttaaattggtgcctagatatgtatattgctccactctttcaatattctgttgtttgattgtaagttgagtgtttagtatgattttcctaaactaggtaaaaaacacattgatttgatacctatatcatatgccataaatcaaaaattcgattttttgactttgaggtcggttgatatcgaaatggtttttaaatttggattcaggagacaaactgcataagaatccatcgtagatcgactcacaagtatttcaggggcggcgatgtacaaacgaacgaatcaacgaacagactttgcgaatttatatacgaaaacgaagttttcgttgaaaataaatgaattcatcgattaagctgtccttagtagcaaagtaatgtaaagcatgtagtgctatcaaacgctgtattgcgtatgccagtggcggctcgtatcactttaagtaggtagtgccagaattcgggcagctgcctaaatttttagtgacgggttcacaatattgtcaaaaaaggtataaaatagaaattaaaaaaaataggtacggatatttttacattatgtaggtatataccatttctggggtgtcaagaaatttaaacatttaaaatgcattcagtgattgatttgacatcatgtccgtccaacaagtaaaatctccaaaatctctcaacttatcgccctttacacaaatatcggaaaactataactaactgaaattcaccagcgacgcgacgtctgtcgtttcatcggcaatcactgcaacacaaagataattttcaatttctttccttatttcctcgtgataaacatctaagatgcactgaaggagttcattttgtgttgttttgaggtacatgcttttaaagatttggaactttgaatatgaaccgaagtcgttgtctaattcggctaacattgaacagttccataaagatgcctctattttctgaattttccttttcgtcgtgatttctcaaaactaactcgaaactccacaaaaccatatagatataatttttaatttgattcaaaacatatcgattcttatccacttcttgttcattgtgtttaattagactatcacgataagctgaatttaactcgggttttattaaaattaaaaattttaaattacttaaaaatataatagtttataataaaaagtttaatcattaaaaatgtaataattataaatacaaaaacgagcgagcgagcgcgtaaaaaaactcgaaaagataatgtaggtactaccctgtacgagaagctttttggatctgatctacgatccactattcactatgatgagcatagtaaaaaatattagatcttcctgccttgtcgagccaggcacgaatagtttcatttaaacgtgtattaaaagtgcaatatagctctatctctgtcacttacatagaatgcccgtaaaatctttctcttttcagccgagccatctaagcttttggcacgatgcgatcatcccgtccgctgtgagtggcgaggattgtactacactgcacagttgccagattttatataatttataaagagaaaagaaatacgcacaaaaaatgaacgggcattaaaacggtttaaagataaaaaatatgtttctgcataaaaattctgcaccggccgccactggcgtatgcagaatatttcgattaaactaaaattccaaaatttcgttctgcattatgcaaaacttgatttatgtttatataaattataaacatgtaaattttggtgctattaaattaagtgtaaaattattaggcatggtaaagttataaaaaaataaccaaatcttttgtttgttaaaattcttagaagtaacaagttaattaactatttaaagttattaataaacaattagaaggtaaagtgaaataaaaccacttctaattcgatttctatgaaaaaagtcaatatatgtggaaaaatttaaaatttcttcaatactgtttccttggtttttacgctaccaaaatacgtttgatttatcgagtcacatcgaaactatcaatgtattaataaatttgtaatgttcattagtcatttaatattaaaatttttaggattacatgtcattattgcgtaatatagttttgcatttcaaagctagtcctattgaactggattctacttgttaggaaaaaagaaatgattagaaatttcataaatcttttacaattttcaatattccatgaatgtctttttgctgtttcaaaatttcatttaaatcaaatttcaagacaatctatatttgctttatagctgcctttagttattaaatttgtactatattcctgatccgataaaattggtggtagataaagattgatttttaacattattaggtttgggctaagtatctactagtctgggtatgtctagcgttacaatgtataacgtatactgcgaataacgtgcgcaaaatggcgattttcgctaagagttacctaaggcccgtccggcgaaacgatcagattttctgcattcattcagtggcgtattttcaagaagttagttaatatattattatgtgtctttatgtaaattttagaatggcttctttatttttgattcaaataatggatatgttaaataatttattagtcgattaaaaatacgctataacctagaccttaagatatataaaattattgttaatttgtccgttaacattttgctatttaataagggccgccgtagctcaggctgtaggatatctgactcgcatgctggtaggccggggttcgaaacccgcgccggcgagaacatctagacatttttaaaaatgtctataggccccaggtcgactcagcctgaataaaattagtactttgggtaaaaccaggggtaataataggcggttgaagcgtagcactgaccctgttacctttcttgtataccgtaggcactagatatagcagactaccctgctataatcccaaagccgctttagcggtataaaacgggagactattataataacagatacagataatagatttttttttaattactgtgatgcatgctgtattctttcagtttcggctcaggaaatattatttgttaacttcctcagaaattgtgtgcagataataagttaatacaatctaaccccaatttttaatatacacaggaatcgacacgtttttttatattatttcataaaaatttttacacacctacttaaaacgagtcttttaatagtgaattagtgatgctgccaaatatttatgaacccaatttatcaaacttaatgttgtacttaggttacatcataatcttaattgtgaacactgactacatatcccttaaatgtaactttatcagtctttccattttttactactgatatacccttgtctatgtcaaaaaatagtataaacttgtgatatatgaaatatagtaattttggattttaatatatttataaatgttcttaaga

SEQ ID NO: 383 - DNA, 4317 bp, Diabrotica virgifera
  SmartBlast Evalue=9E-36; Info=Endonuclease-reverse transcriptase n=1 Tax=Bombyx mori RepID=D5LB38_BOMMO
tacattgattttcattcctttggtttttagattagtaggtttccattctcttcttaagtgcatatccgttccggatgttggcgatcatcatggctatcttgactttgtttaccgcagcgcggaacagttcagtggtagtggtgttataccactttcgtaaattttgaagccaggaaatgacgtcttcttcccggtcctcttttaccatttaccttcccttggagaatcagttggagaaggccgtaacgttcttgatttctcattacatgtcctagatattctaattttttcgttatgatggtcatgagaatttcacactctttccccattttacgcagtacttctacattagtaattcggtcaacccaggatatacgtaagatgcgcctataacaccacatttcgaaagcttcggaccgattcatagatgcaacagttagtgtccacgcttccattccgtaaagcagaactgtgaacatgtagcatttcaacagacggtattttgtttttaatgatatgtctagactattgaaaatgggtctcattctaacgaatgctgcttttgcttttattattcactgtttaatttctgttgagtggtcccattggctatttaaattggtgcctagatatgtatatggctacactctttcaatattctgttgtttgattgtaagttgagcgtttagtatgattttcctaaactaggtaaaaaacacattgatttgatacctatatcatatgcaataaatcaaaaattcgattttttgactttgaggtcggttgatatcgaaatggtttttaaatttggattcaggagacaaactgcataagaatccatcgtagatcgactcacaagtatttcaggggcggcgatgtacaaacgaacgaatcaacgaacagactttgcgaatttatatacgaaaacgaagttttcgttgaaaataaatgaattcatcgattaagctgtccttagtagcaaagtaatgtaaagcatgtagtgctatcaaacgctgtattgcgtatgccagtggcggctcgtatcactttaagtaggtagtgccagaattcgggcagctgcctaaatttttagtgacgggttcacaatattgtcaaaaaaggtataaaatagaaattaaaaaaaataggtacggatatttttacattatgtaggtatataccatttctggggtgtcaagaaatttaaacatttaaaatgcattcagtgattgatttgacatcatgtccgtccaacaagtaaaatctccaaaatctctcaacttatcgccctttacacaaatatcggaaaactataactaactgaaattcaccagcgacgcgacgtctgtcgtttcatcggcaatcactgcaacacaaagataattttcaatttctttccttatttcctcgtgataaacatctaagatgcactgaaggagttcattttgtgttgttttgaggtacatgcttttaaagatttggaactttgaatatgaaccgaagtcgttgtctaattcggctaacattgaacagttccataaagatgcctctattttctgaattttccttttcgtcgtgatttctcaaaactaactcgaaactccacaaaaccatatagatataatttttaatttgattcaaaacatatcgattcttatccacttcttgttcattgtgtttaattagactatcacgataagctgaatttaactcgggttttattaaaattaaaaattttaaattacttaaaaatataatagtttataataaaaagtttaatcattatgtaataaatacaaaaacgagcgagcgagcgcataaaaaaactggaaaatataatgtactaccctgtacgagaatctttttggatctacgatccactattcactcactattcactatgatgagcatagtaaaaaatattagatcttccttgtccttgtcgagcatcttgttgagccaggcacgaatagtctcatttaaacgtgtattaaaagtgcaatatagctctacctctgtcacttatatagaatgcccgtaaaatctttctcttttcagccgagccatctaagcttttggcacgatgcgatcatcccgtccgctgtctgtgagtggcgagggttgtactacactgcacagttgccagattttatataatttataaagagaaaagaaatacgcacaaaaaatgaacgggcattaaaacggtttaaagataaaaaaaaaatatgtttctgcataaaaataaggtagtgtcatggcactacctcaccggccgccactggcgtatgcagaatatttcaaataaactaaaattccagaatttcgttctgcattatacaaaacttgatttatgtttatataaattataaacatgtaaattttggtgctattaaattaagtgtaaaattattaggcatggtaaagttataaaaaaataaccaaatcttttgtttgttaaaattcttagaagtaacaagttaattaactatttaaagttattaataaacaattagaaggtaaagtgaaataaaaccacttctaattcgatttctatgaaaaaagtcaatatatgtggaaaaatttaaaatttcttcaatactgtttccttggtttttacgctaccaaaatacgtttgatttatcgagtcacatcgaaactatcaatgtattaataaatttgtaatgttcattagtcatttaatattaaaatttttaggattacatgtcattattgcgtaatatagttttgcatttcaaagctagtcctattgaactggattctacttgttaggaaaaaagaaatgattagaaatttcataaatcttttacaattttcaatattccatgaatgtctttttgctgtttcaaaatttcatttaaatcaaatttcaagacaatctatatttgctttatagctgcctttagttattaaatttgtactatattcctgatccgataaaattggtggtagataaagattgatttttaacattattaggtttgggctaagtatctactagtctgggtatgtctagcgttacaatgtataacgtatagtgcgaataacgtgcgcaaaatggcgattttcgctaagagttacctaaggcccgtccggcgaaacgatcggattttctgtattcattcagtggcgtattttcaagaagttagttaatatattattatgtgtctttatgtaaattttagaatggcttctttatttttgattcaaataatggatatgttaaatgatttattagtcgattaaaaatacgctataacctagaccagaggttctcaatctttttgagtcaggtaccaccaaatactttttattatttttggtaccacctaactaaaatacctgtctagctaggtgatctaattaactataattgtgccaatggtggtgctgattttggctgttttgactttgcgtaccacctcaaataatgaaatgtaccaccagtggtacatgtaccagagattgagaaccgctgacctagaccttaagatatataaaattattgttaatttgtccgttaacattttgctatttaataagggccggcgtagctcaggctgtaggatatctgactcgcatgctggtaggccggggttcgaaacccgcgccggcgagaacatctagacatttttaaaaatgtctataggccccaggtcgactcagcctgaataaaattagtactttgggtaaaaccaggggtaataataggcggttgaagcgtagcactgaccctgttacctttcttgtataccgtaggcactagatatagcagactaccctgctataatcccaaagccgctttagcggtataaaacgggagactattataataacagatacagataatagatttttttttaattactgtgatgcatgctgtattctttcagtttcggctcaggaaatattatttgttaacttcctcagaaattgtgtgcagataataagttaatacaatctaaccccaatttttaatatacacaggaatcgacacgtttttttatattatttcataaaaatttttacacacctacttaaaacgagtcttttaatagtgaattagtgatgctgccaaatatttatgaacccaatttatcaaacttaatgttgtacttaggttacatcataatcttaattgtgaacactgactacatatcccttaaatgtaactttatcagtctttccattttttactactgatatacccttgtctatgtcaaaaaatagtataaacttgtgatatatgaaatatagtaattttggattttaatatatttataaatgttcttaaga

SEQ ID NO: 384 - DNA, 4311 bp, Diabrotica virgifera
  SmartBlast Evalue=9E-36; Info=Endonuclease-reverse transcriptase n=1 Tax=Bombyx mori RepID=D5LB38_BOMMO
tacattgattttcattcctttggtttttagattagtaggtttccattctcttcttaagtgcatatccgttccggatgttggcgatcatcatggctatcttgactttgtttaccgcagcgcggaacagttcagtggtagtggtgttataccactttcgtaaattttgaagccaggaaatgacgtcttcttcccggtcctcttttaccatttaccttcccttggagaatcagttggagaaggccgtaacgttcttgatttctcattacatgtcctagatattctaattttttcgttatgatggtcatgagaatttcacactctttccccattttacgcagtacttctacattagtaattcggtcaacccaggatatacgtaagatgcgcctataacaccacatttcgaaagcttcggaccgattcatagatgcaacagttagtgtccacgcttccattccgtaaagcagaactgtgaacatgtagcatttcaacagacggtattttgtttttaatgatatgtctagactattgaaaatgggtctcattctaacgaatgctgcttttgcttttattattcactgtttaatttctgttgagtggtcccattggctatttaaattggtgcctagatatgtatatggctacactctttcaatattctgttgtttgattgtaagttgagcgtttagtatgattttcctaaactaggtaaaaaacacattgatttgatacctatatcatatgcaataaatcaaaaattcgattttttgactttgaggtcggttgatatcgaaatggtttttaaatttggattcaggagacaaactgcataagaatccatcgtagatcgactcacaagtatttcaggggcggcgatgtacaaacgaacgaatcaacgaacagactttgcgaatttatatacgaaaacgaagttttcgttgaaaataaatgaattcatcgattaagctgtccttagtagcaaagtaatgtaaagcatgtagtgctatcaaacgctgtattgcgtatgccagtggcggctcgtatcactttaagtaggtagtgccagaattcgggcagctgcctaaatttttagtgacgggttcacaatattgtcaaaaaaggtataaaatagaaattaaaaaaaataggtacggatatttttacattatgtaggtatataccatttctggggtgtcaagaaatttaaacatttaaaatgcattcagtgattgatttgacatcatgtccgtccaacaagtaaaatctccaaaatctctcaacttatcgccctttacacaaatatcggaaaactataactaactgaaattcaccagcgacgcgacgtctgtcgtttcatcggcaatcactgcaacacaaagataattttcaatttctttccttatttcctcgtgataaacatctaagatgcactgaaggagttcattttgtgttgttttgaggtacatgcttttaaagatttggaactttgaatatgaaccgaagtcgttgtctaattcggctaacattgaacagttccataaagatgcctctattttctgaattttccttttcgtcgtgatttctcaaaactaactcgaaactccacaaaaccatatagatataatttttaatttgattcaaaacatatcgattcttatccacttcttgttcattgtgtttaattagactatcacgataagctgaatttaactcgggttttattaaaattaaaaattttaaattacttaaaaatataatagtttataataaaaagtttaatcattaaaaatgtaataattataaatacaaaaacgagcgagcgagcgcgtaaaaaaactcgaaaagataatgtaggtactaccctgtacgagaagctttttggatctgatctacgatccactattcactatgatgagcatagtaaaaaatattagatcttcctgccttgtcgagccaggcacgaatagtttcatttaaacgtgtattaaaagtgcaatatagctctatctctgtcacttacatagaatgcccgtaaaatctttctcttttcagccgagccatctaagcttttggcacgatgcgatcatcccgtccgctgtctgtgagtggcgagggttgtactacactgcacagttgccagattttatataatttataaagagaaaagaaatacgcacaaaaaatgaacgggcattaaaacggtttaaagataaaaaaaaaatatgtttctgcataaaaataaggtagtgtcatggcactacctcaccggccgccactggcgtatgcagaatatttcaaataaactaaaattccagaatttcgttctgcattatacaaaacttgatttatgtttatataaattataaacatgtaaattttggtgctattaaattaagtgtaaaattattaggcatggtaaagttataaaaaaataaccaaatcttttgtttgttaaaattcttagaagtaacaagttaattaactatttaaagttattaataaacaattagaaggtaaagtgaaataaaaccacttctaattcgatttctatgaaaaaagtcaatatatgtggaaaaatttaaaatttcttcaatactgtttccttggtttttacgctaccaaaatacgtttgatttatcgagtcacatcgaaactatcaatgtattaataaatttgtaatgttcattagtcatttaatattaaaatttttaggattacatgtcattattgcgtaatatagttttgcatttcaaagctagtcctattgaactggattctacttgttaggaaaaaagaaatgattagaaatttcataaatcttttacaattttcaatattccatgaatgtctttttgctgtttcaaaatttcatttaaatcaaatttcaagacaatctatatttgctttatagctgcctttagttattaaatttgtactatattcctgatccgataaaattggtggtagataaagattgatttttaacattattaggtttgggctaagtatctactagtctgggtatgtctagcgttacaatgtataacgtatagtgcgaataacgtgcgcaaaatggcgattttcgctaagagttacctaaggcccgtccggcgaaacgatcggattttctgtattcattcagtggcgtattttcaagaagttagttaatatattattatgtgtctttatgtaaattttagaatggcttctttatttttgattcaaataatggatatgttaaatgatttattagtcgattaaaaatacgctataacctagaccagaggttctcaatctttttgagtcaggtaccaccaaatactttttattatttttggtaccacctaactaaaatacctgtctagctaggtgatctaattaactataattgtgccaatggtggtgctgattttggctgttttgactttgcgtaccacctcaaataatgaaatgtaccaccagtggtacatgtaccagagattgagaaccgctgacctagaccttaagatatataaaattattgttaatttgtccgttaacattttgctatttaataagggccggcgtagctcaggctgtaggatatctgactcgcatgctggtaggccggggttcgaaacccgcgccggcgagaacatctagacatttttaaaaatgtctataggccccaggtcgactcagcctgaataaaattagtactttgggtaaaaccaggggtaataataggcggttgaagcgtagcactgaccctgttacctttcttgtataccgtaggcactagatatagcagactaccctgctataatcccaaagccgctttagcggtataaaacgggagactattataataacagatacagataatagatttttttttaattactgtgatgcatgctgtattctttcagtttcggctcaggaaatattatttgttaacttcctcagaaattgtgtgcagataataagttaatacaatctaaccccaatttttaatatacacaggaatcgacacgtttttttatattatttcataaaaatttttacacacctacttaaaacgagtcttttaatagtgaattagtgatgctgccaaatatttatgaacccaatttatcaaacttaatgttgtacttaggttacatcataatcttaattgtgaacactgactacatatcccttaaatgtaactttatcagtctttccattttttactactgatatacccttgtctatgtcaaaaaatagtataaacttgtgatatatgaaatatagtaattttggattttaatatatttataaatgttcttaaga

SEQ ID NO: 385 - DNA, 4290 bp, Diabrotica virgifera
  SmartBlast Evalue=9E-36; Info=Endonuclease-reverse transcriptase n=1 Tax=Bombyx mori RepID=D5LB38_BOMMO
tacattgattttcattcctttggtttttagattagtaggtttccattctcttcttaagtgcatatccgttccggatgttggcgatcatcatggctatcttgactttgtttaccgcagcgcggaacagttcagtggtagtggtgttataccactttcgtaaattttgaagccaggaaatgacgtcttcttcccggtcctcttttaccatttaccttcccttggagaatcagttggagaaggccgtaacgttcttgatttctcattacatgtcctagatattctaattttttcgttatgatggtcatgagaatttcacactctttccccattttacgcagtacttctacattagtaattcggtcaacccaggatatacgtaagatgcgcctataacaccacatttcgaaagcttcggaccgattcatagatgcaacagttagtgtccacgcttccattccgtaaagcagaactgtgaacatgtagcatttcaacagacggtattttgtttttaatgatatgtctagactattgaaaatgggtctcattctaacgaatgctgcttttgcttttattattcactgtttaatttctgttgagtggtcccattggctatttaaattggtgcctagatatgtatatggctacactctttcaatattctgttgtttgattgtaagttgagcgtttagtatgattttcctaaactaggtaaaaaacacattgatttgatacctatatcatatgcaataaatcaaaaattcgattttttgactttgaggtcggttgatatcgaaatggtttttaaatttggattcaggagacaaactgcataagaatccatcgtagatcgactcacaagtatttcaggggcggcgatgtacaaacgaacgaatcaacgaacagactttgcgaatttatatacgaaaacgaagttttcgttgaaaataaatgaattcatcgattaagctgtccttagtagcaaagtaatgtaaagcatgtagtgctatcaaacgctgtattgcgtatgccagtggcggctcgtatcactttaagtaggtagtgccagaattcgggcagctgcctaaatttttagtgacgggttcacaatattgtcaaaaaaggtataaaatagaaattaaaaaaaataggtacggatatttttacattatgtaggtatataccatttctggggtgtcaagaaatttaaacatttaaaatgcattcagtgattgatttgacatcatgtccgtccaacaagtaaaatctccaaaatctctcaacttatcgccctttacacaaatatcggaaaactataactaactgaaattcaccagcgacgcgacgtctgtcgtttcatcggcaatcactgcaacacaaagataattttcaatttctttccttatttcctcgtgataaacatctaagatgcactgaaggagttcattttgtgttgttttgaggtacatgcttttaaagatttggaactttgaatatgaaccgaagtcgttgtctaattcggctaacattgaacagttccataaagatgcctctattttctgaattttccttttcgtcgtgatttctcaaaactaactcgaaactccacaaaaccatatagatataatttttaatttgattcaaaacatatcgattcttatccacttcttgttcattgtgtttaattagactatcacgataagctgaatttaactcgggttttattaaaattaaaaattttaaattacttaaaaatataatagtttataataaaaagtttaatcattatgtaataaatacaaaaacgagcgagcgagcgcataaaaaaactggaaaatataatgtactaccctgtacgagaatctttttggatctacgatccactattcactcactattcactatgatgagcatagtaaaaaatattagatcttccttgtccttgtcgagcatcttgttgagccaggcacgaatagtctcatttaaacgtgtattaaaagtgcaatatagctctacctctgtcacttatatagaatgcccgtaaaatctttctcttttcagccgagccatctaagcttttggcacgatgcgatcatcccgtccgctgtgagtggcgaggattgtactacactgcacagttgccagattttatataatttataaagagaaaagaaatacgcacaaaaaatgaacgggcattaaaacggtttaaagataaaaaatatgtttctgcataaaaattctgcaccggccgccactggcgtatgcagaatatttcgattaaactaaaattccaaaatttcgttctgcattatgcaaaacttgatttatgtttatataaattataaacatgtaaattttggtgctattaaattaagtgtaaaattattaggcatggtaaagttataaaaaaataaccaaatcttttgtttgttaaaattcttagaagtaacaagttaattaactatttaaagttattaataaacaattagaaggtaaagtgaaataaaaccacttctaattcgatttctatgaaaaaagtcaatatatgtggaaaaatttaaaatttcttcaatactgtttccttggtttttacgctaccaaaatacgtttgatttatcgagtcacatcgaaactatcaatgtattaataaatttgtaatgttcattagtcatttaatattaaaatttttaggattacatgtcattattgcgtaatatagttttgcatttcaaagctagtcctattgaactggattctacttgttaggaaaaaagaaatgattagaaatttcataaatcttttacaattttcaatattccatgaatgtctttttgctgtttcaaaatttcatttaaatcaaatttcaagacaatctatatttgctttatagctgcctttagttattaaatttgtactatattcctgatccgataaaattggtggtagataaagattgatttttaacattattaggtttgggctaagtatctactagtctgggtatgtctagcgttacaatgtataacgtatagtgcgaataacgtgcgcaaaatggcgattttcgctaagagttacctaaggcccgtccggcgaaacgatcggattttctgtattcattcagtggcgtattttcaagaagttagttaatatattattatgtgtctttatgtaaattttagaatggcttctttatttttgattcaaataatggatatgttaaatgatttattagtcgattaaaaatacgctataacctagaccagaggttctcaatctttttgagtcaggtaccaccaaatactttttattatttttggtaccacctaactaaaatacctgtctagctaggtgatctaattaactataattgtgccaatggtggtgctgattttggctgttttgactttgcgtaccacctcaaataatgaaatgtaccaccagtggtacatgtaccagagattgagaaccgctgacctagaccttaagatatataaaattattgttaatttgtccgttaacattttgctatttaataagggccggcgtagctcaggctgtaggatatctgactcgcatgctggtaggccggggttcgaaacccgcgccggcgagaacatctagacatttttaaaaatgtctataggccccaggtcgactcagcctgaataaaattagtactttgggtaaaaccaggggtaataataggcggttgaagcgtagcactgaccctgttacctttcttgtataccgtaggcactagatatagcagactaccctgctataatcccaaagccgctttagcggtataaaacgggagactattataataacagatacagataatagatttttttttaattactgtgatgcatgctgtattctttcagtttcggctcaggaaatattatttgttaacttcctcagaaattgtgtgcagataataagttaatacaatctaaccccaatttttaatatacacaggaatcgacacgtttttttatattatttcataaaaatttttacacacctacttaaaacgagtcttttaatagtgaattagtgatgctgccaaatatttatgaacccaatttatcaaacttaatgttgtacttaggttacatcataatcttaattgtgaacactgactacatatcccttaaatgtaactttatcagtctttccattttttactactgatatacccttgtctatgtcaaaaaatagtataaacttgtgatatatgaaatatagtaattttggattttaatatatttataaatgttcttaaga

SEQ ID NO: 386 - DNA, 4284 bp, Diabrotica virgifera
  SmartBlast Evalue=9E-36; Info=Endonuclease-reverse transcriptase n=1 Tax=Bombyx mori RepID=D5LB38_BOMMO
tacattgattttcattcctttggtttttagattagtaggtttccattctcttcttaagtgcatatccgttccggatgttggcgatcatcatggctatcttgactttgtttaccgcagcgcggaacagttcagtggtagtggtgttataccactttcgtaaattttgaagccaggaaatgacgtcttcttcccggtcctcttttaccatttaccttcccttggagaatcagttggagaaggccgtaacgttcttgatttctcattacatgtcctagatattctaattttttcgttatgatggtcatgagaatttcacactctttccccattttacgcagtacttctacattagtaattcggtcaacccaggatatacgtaagatgcgcctataacaccacatttcgaaagcttcggaccgattcatagatgcaacagttagtgtccacgcttccattccgtaaagcagaactgtgaacatgtagcatttcaacagacggtattttgtttttaatgatatgtctagactattgaaaatgggtctcattctaacgaatgctgcttttgcttttattattcactgtttaatttctgttgagtggtcccattggctatttaaattggtgcctagatatgtatatggctacactctttcaatattctgttgtttgattgtaagttgagcgtttagtatgattttcctaaactaggtaaaaaacacattgatttgatacctatatcatatgcaataaatcaaaaattcgattttttgactttgaggtcggttgatatcgaaatggtttttaaatttggattcaggagacaaactgcataagaatccatcgtagatcgactcacaagtatttcaggggcggcgatgtacaaacgaacgaatcaacgaacagactttgcgaatttatatacgaaaacgaagttttcgttgaaaataaatgaattcatcgattaagctgtccttagtagcaaagtaatgtaaagcatgtagtgctatcaaacgctgtattgcgtatgccagtggcggctcgtatcactttaagtaggtagtgccagaattcgggcagctgcctaaatttttagtgacgggttcacaatattgtcaaaaaaggtataaaatagaaattaaaaaaaataggtacggatatttttacattatgtaggtatataccatttctggggtgtcaagaaatttaaacatttaaaatgcattcagtgattgatttgacatcatgtccgtccaacaagtaaaatctccaaaatctctcaacttatcgccctttacacaaatatcggaaaactataactaactgaaattcaccagcgacgcgacgtctgtcgtttcatcggcaatcactgcaacacaaagataattttcaatttctttccttatttcctcgtgataaacatctaagatgcactgaaggagttcattttgtgttgttttgaggtacatgcttttaaagatttggaactttgaatatgaaccgaagtcgttgtctaattcggctaacattgaacagttccataaagatgcctctattttctgaattttccttttcgtcgtgatttctcaaaactaactcgaaactccacaaaaccatatagatataatttttaatttgattcaaaacatatcgattcttatccacttcttgttcattgtgtttaattagactatcacgataagctgaatttaactcgggttttattaaaattaaaaattttaaattacttaaaaatataatagtttataataaaaagtttaatcattaaaaatgtaataattataaatacaaaaacgagcgagcgagcgcgtaaaaaaactcgaaaagataatgtaggtactaccctgtacgagaagctttttggatctgatctacgatccactattcactatgatgagcatagtaaaaaatattagatcttcctgccttgtcgagccaggcacgaatagtttcatttaaacgtgtattaaaagtgcaatatagctctatctctgtcacttacatagaatgcccgtaaaatctttctcttttcagccgagccatctaagcttttggcacgatgcgatcatcccgtccgctgtgagtggcgaggattgtactacactgcacagttgccagattttatataatttataaagagaaaagaaatacgcacaaaaaatgaacgggcattaaaacggtttaaagataaaaaatatgtttctgcataaaaattctgcaccggccgccactggcgtatgcagaatatttcgattaaactaaaattccaaaatttcgttctgcattatgcaaaacttgatttatgtttatataaattataaacatgtaaattttggtgctattaaattaagtgtaaaattattaggcatggtaaagttataaaaaaataaccaaatcttttgtttgttaaaattcttagaagtaacaagttaattaactatttaaagttattaataaacaattagaaggtaaagtgaaataaaaccacttctaattcgatttctatgaaaaaagtcaatatatgtggaaaaatttaaaatttcttcaatactgtttccttggtttttacgctaccaaaatacgtttgatttatcgagtcacatcgaaactatcaatgtattaataaatttgtaatgttcattagtcatttaatattaaaatttttaggattacatgtcattattgcgtaatatagttttgcatttcaaagctagtcctattgaactggattctacttgttaggaaaaaagaaatgattagaaatttcataaatcttttacaattttcaatattccatgaatgtctttttgctgtttcaaaatttcatttaaatcaaatttcaagacaatctatatttgctttatagctgcctttagttattaaatttgtactatattcctgatccgataaaattggtggtagataaagattgatttttaacattattaggtttgggctaagtatctactagtctgggtatgtctagcgttacaatgtataacgtatagtgcgaataacgtgcgcaaaatggcgattttcgctaagagttacctaaggcccgtccggcgaaacgatcggattttctgtattcattcagtggcgtattttcaagaagttagttaatatattattatgtgtctttatgtaaattttagaatggcttctttatttttgattcaaataatggatatgttaaatgatttattagtcgattaaaaatacgctataacctagaccagaggttctcaatctttttgagtcaggtaccaccaaatactttttattatttttggtaccacctaactaaaatacctgtctagctaggtgatctaattaactataattgtgccaatggtggtgctgattttggctgttttgactttgcgtaccacctcaaataatgaaatgtaccaccagtggtacatgtaccagagattgagaaccgctgacctagaccttaagatatataaaattattgttaatttgtccgttaacattttgctatttaataagggccggcgtagctcaggctgtaggatatctgactcgcatgctggtaggccggggttcgaaacccgcgccggcgagaacatctagacatttttaaaaatgtctataggccccaggtcgactcagcctgaataaaattagtactttgggtaaaaccaggggtaataataggcggttgaagcgtagcactgaccctgttacctttcttgtataccgtaggcactagatatagcagactaccctgctataatcccaaagccgctttagcggtataaaacgggagactattataataacagatacagataatagatttttttttaattactgtgatgcatgctgtattctttcagtttcggctcaggaaatattatttgttaacttcctcagaaattgtgtgcagataataagttaatacaatctaaccccaatttttaatatacacaggaatcgacacgtttttttatattatttcataaaaatttttacacacctacttaaaacgagtcttttaatagtgaattagtgatgctgccaaatatttatgaacccaatttatcaaacttaatgttgtacttaggttacatcataatcttaattgtgaacactgactacatatcccttaaatgtaactttatcagtctttccattttttactactgatatacccttgtctatgtcaaaaaatagtataaacttgtgatatatgaaatatagtaattttggattttaatatatttataaatgttcttaaga

SEQ ID NO: 387 - DNA, 4306 bp, Diabrotica virgifera
  SmartBlast Evalue=1E-42; Info=27 kDa hemolymph protein n=1 Tax= Harpegnathos saltator RepID=E2C9D0_9HYME
tgctgtcgaggtgtaagtacgtgtagttttacaatttttgttcaggagtgagaagtggaacttttcttttaaatttttgctgtttaatttaatacctagtatcaaaatgaatattattcaacgagctgtgatatttttcatcgtaatagtatgtatccagtgccaatcatcattaaatgacctagatgctgacaaaataaaaagtaaaatagagaaaggtctaggagatttaaacatagacattccagatgtagatttaaattctacgagtatgccaaatgcagaggatatagaaaaagtgcttagagaaaaatgcgagaagaatggagcaactgacgcagtagatttgataaaggaagaacaagaaaacgctcgtatttgcatagaaaaatacgttaattttacaaccatagaagaggaactggaagagaagaaaaagacaggttctatggatgaagtattctcaaaatactgtaagaaatggccagatattaagggatgtttcgataaggccgtttctatttcaagatcgtgtatggataaaaaagaagaagacgcctttaatagaacgctggatattataaacgatttgcaagaatttatgtgttacaaggatggagatagattagccatgtttgttgctgaaggtggcgtcgaatgtatgtcagagagaaaagatggtgtacaagaatgtgtaaataaaacccttggctcaagaatccctgatgcagatgatctttctgttacaaatttaccagttatgctttttacggatagagattgcgatgatttcgaagaagtcagagaatgtgttaaccatgaactagagaagtgcaaggatagtacccccgcaaacatcgtggacgcattcttcaaattcttaaagaaacaactaccttgtaaaggaagtctagcacagaagagcaccaaaccaaattcagcttgggccatatctagcagttcgatacttttggctatttcctttttgtacgtcaggctgtattaaactttttaaatttttacagtgggtgagcggataattcttacgcatctacagttactatgccataactataattttttatcagtagtgagatttacgtttagtaaatatattctgaagcattgagttctttatatatagttgtgagaacttattatctgcacaaagaaaacatttaaacaattaaattttttatttaagattgaaattaggcaaataggtatatcaaacctataacaaagtgaaaggattaaatccaaaaacaagctgagaatacgagcattatcataacggaaattttgtttacggttagcaaaaatcatctctatattactatatttaaatgcaatatatgtctaacctgaatttacataatatatcgtattcctaaagtcgaaaatgtaatttttcgactttgggattggttatttcgaatttggttcgagatatcgaattcgcaagatgatattccttcttcttcttaaagtgcctatccgttctggatgttggcgatcatcatggctatcttgactctgtttaccagagcgcggaatagttcagcggtattcgtgttataccactttcgtaaattttgaagctaggaaatgcgtcttcttcccggtcctcttttaccatctgttggagaaggtcgtagcattcttgatttctcattacatgtcctagatattctaattttttcgttatgatggtcatgagaatttcacactctttccccattttacgcagtacttctacattagtaattcggtcaacccaggatatacgtaagatgcgcctataacaccacatttcgaaagcttcggaccgattcatagatgcaacagttagtgtccacgcttccattccgtaaagcagaactgtgaacatgtagcatttcaacagacggtattttgtttttaatgatatgtctagactattgaaaatgggtctcattctaacgaatgctgcttttgcttttattattcactgtttaatttctgttgagtggtcccattggctatttaaattggtgcctagatatgtatatggctacactctttcaatattctgttgtttgattgtaagttgagcgtttagtatgattttcctaaactaggtaaaaaacacattgatttgatacctatatcatatgcaataaatcaaaaattcgattttttgactttgaggtcggttgatatcgaaatggtttttaaatttggattcaggagacaaactgcataagaatccatcgtagatcgactcacaagtatttcaggggcggcgatgtacaaacgaacgaatcaacgaacagactttgcgaatttatatacgaaaacgaagttttcgttgaaaataaatgaattcatcgattaagctgtccttagtagcaaagtaatgtaaagcatgtagtgctatcaaacgctgtattgcgtatgccagtggcggctcgtatcactttaagtaggtagtgccagaattcgggcagctgcctaaatttttagtgacgggttcacaatattgtcaaaaaaggtataaaatagaaattaaaaaaaataggtacggatatttttacattatgtaggtatataccatttctggggtgtcaagaaatttaaacatttaaaatgcattcagtgattgatttgacatcatgtccgtccaacaagtaaaatctccaaaatctctcaacttatcgccctttacacaaatatcggaaaactataactaactgaaattcaccagcgacgcgacgtctgtcgtttcatcggcaatcactgcaacacaaagataattttcaatttctttccttatttcctcgtgataaacatctaagatgcactgaaggagttcattttgtgttgttttgaggtacatgcttttaaagatttggaactttgaatatgaaccgaagtcgttgtctaattcggctaacattgaacagttccataaagatgcctctattttctgaattttccttttcgtcgtgatttctcaaaactaactcgaaactccacaaaaccatatagatataatttttaatttgattcaaaacatatcgattcttatccacttcttgttcattgtgtttaattagactatcacgataagctgaatttaactcgggttttattaaaattaaaaattttaaattacttaaaaatataatagtttataataaaaagtttaatcattatgtaataaatacaaaaacgagcgagcgagcgcataaaaaaactggaaaatataatgtactaccctgtacgagaatctttttggatctacgatccactattcactcactattcactatgatgagcatagtaaaaaatattagatcttccttgtccttgtcgagcatcttgttgagccaggcacgaatagtctcatttaaacgtgtattaaaagtgcaatatagctctacctctgtcacttatatagaatgcccgtaaaatctttctcttttcagccgagccatctaagatttcggcacgatcatcccggccgctgtgagtggcgacggttgtattacactacacagttgccagattttatataatttataaagagaaaagaaatacgcacaaacaaatgaacgggcattaagacggtttaatgataaaaaaatatgtttctgcataaaaataagatagtgccatgactccatggcactacctcaccggccgccactgacttatacaggtagtcttcggtctgcttttctttttttccgggggttgccattccactctcggctttgggagtcgatgtttctccattctttttacattgccactccaacaaagttgtttttcctggatttcttctattatgtttgttttcctattcattgtatatcgtactcgttcattcgttatgtgtgagactctagagatgcaggccgatcttcgccagaagtccatttccagtgcgagcaacttatgttccgttcccttattctccatatatttatatccatatagtaccacactttttaagatgctattatatagctgtgttttcttttcttctgatatggttttttgaccaaagtagtgagttcaaagctcctattattcttccctttcataattctttcctctatttcgaattctgcccttccaatttgttgaattctctttccaacatatacataatcagagctttgttcgataaccatatcatcctctagttgtgactcatttttctctcctcctatactcatatatttggctttaggccccattttttgtattctcgtaacagccggtttgtcataaatattagatcatctttaccctgggc

SEQ ID NO: 388 - DNA, 4300 bp, Diabrotica virgifera
  SmartBlast Evalue=1E-42; Info=27 kDa hemolymph protein n=1 Tax= Harpegnathos saltator RepID=E2C9D0_9HYME
tgctgtcgaggtgtaagtacgtgtagttttacaatttttgttcaggagtgagaagtggaacttttcttttaaatttttgctgtttaatttaatacctagtatcaaaatgaatattattcaacgagctgtgatatttttcatcgtaatagtatgtatccagtgccaatcatcattaaatgacctagatgctgacaaaataaaaagtaaaatagagaaaggtctaggagatttaaacatagacattccagatgtagatttaaattctacgagtatgccaaatgcagaggatatagaaaaagtgcttagagaaaaatgcgagaagaatggagcaactgacgcagtagatttgataaaggaagaacaagaaaacgctcgtatttgcatagaaaaatacgttaattttacaaccatagaagaggaactggaagagaagaaaaagacaggttctatggatgaagtattctcaaaatactgtaagaaatggccagatattaagggatgtttcgataaggccgtttctatttcaagatcgtgtatggataaaaaagaagaagacgcctttaatagaacgctggatattataaacgatttgcaagaatttatgtgttacaaggatggagatagattagccatgtttgttgctgaaggtggcgtcgaatgtatgtcagagagaaaagatggtgtacaagaatgtgtaaataaaacccttggctcaagaatccctgatgcagatgatctttctgttacaaatttaccagttatgctttttacggatagagattgcgatgatttcgaagaagtcagagaatgtgttaaccatgaactagagaagtgcaaggatagtacccccgcaaacatcgtggacgcattcttcaaattcttaaagaaacaactaccttgtaaaggaagtctagcacagaagagcaccaaaccaaattcagcttgggccatatctagcagttcgatacttttggctatttcctttttgtacgtcaggctgtattaaactttttaaatttttacagtgggtgagcggataattcttacgcatctacagttactatgccataactataattttttatcagtagtgagatttacgtttagtaaatatattctgaagcattgagttctttatatatagttgtgagaacttattatctgcacaaagaaaacatttaaacaattaaattttttatttaagattgaaattaggcaaataggtatatcaaacctataacaaagtgaaaggattaaatccaaaaacaagctgagaatacgagcattatcataacggaaattttgtttacggttagcaaaaatcatctctatattactatatttaaatgcaatatatgtctaacctgaatttacataatatatcgtattcctaaagtcgaaaatgtaatttttcgactttgggattggttatttcgaatttggttcgagatatcgaattcgcaagatgatattccttcttcttcttaaagtgcctatccgttctggatgttggcgatcatcatggctatcttgactctgtttaccagagcgcggaatagttcagcggtattcgtgttataccactttcgtaaattttgaagctaggaaatgcgtcttcttcccggtcctcttttaccatctgttggagaaggtcgtagcattcttgatttctcattacatgtcctagatattctaattttttcgttatgatggtcatgagaatttcacactctttccccattttacgcagtacttctacattagtaattcggtcaacccaggatatacgtaagatgcgcctataacaccacatttcgaaagcttcggaccgattcatagatgcaacagttagtgtccacgcttccattccgtaaagcagaactgtgaacatgtagcatttcaacagacggtattttgtttttaatgatatgtctagactattgaaaatgggtctcattctaacgaatgctgcttttgcttttattattcactgtttaatttctgttgagtggtcccattggctatttaaattggtgcctagatatgtatatggctacactctttcaatattctgttgtttgattgtaagttgagcgtttagtatgattttcctaaactaggtaaaaaacacattgatttgatacctatatcatatgcaataaatcaaaaattcgattttttgactttgaggtcggttgatatcgaaatggtttttaaatttggattcaggagacaaactgcataagaatccatcgtagatcgactcacaagtatttcaggggcggcgatgtacaaacgaacgaatcaacgaacagactttgcgaatttatatacgaaaacgaagttttcgttgaaaataaatgaattcatcgattaagctgtccttagtagcaaagtaatgtaaagcatgtagtgctatcaaacgctgtattgcgtatgccagtggcggctcgtatcactttaagtaggtagtgccagaattcgggcagctgcctaaatttttagtgacgggttcacaatattgtcaaaaaaggtataaaatagaaattaaaaaaaataggtacggatatttttacattatgtaggtatataccatttctggggtgtcaagaaatttaaacatttaaaatgcattcagtgattgatttgacatcatgtccgtccaacaagtaaaatctccaaaatctctcaacttatcgccctttacacaaatatcggaaaactataactaactgaaattcaccagcgacgcgacgtctgtcgtttcatcggcaatcactgcaacacaaagataattttcaatttctttccttatttcctcgtgataaacatctaagatgcactgaaggagttcattttgtgttgttttgaggtacatgcttttaaagatttggaactttgaatatgaaccgaagtcgttgtctaattcggctaacattgaacagttccataaagatgcctctattttctgaattttccttttcgtcgtgatttctcaaaactaactcgaaactccacaaaaccatatagatataatttttaatttgattcaaaacatatcgattcttatccacttcttgttcattgtgtttaattagactatcacgataagctgaatttaactcgggttttattaaaattaaaaattttaaattacttaaaaatataatagtttataataaaaagtttaatcattaaaaatgtaataattataaatacaaaaacgagcgagcgagcgcgtaaaaaaactcgaaaagataatgtaggtactaccctgtacgagaagctttttggatctgatctacgatccactattcactatgatgagcatagtaaaaaatattagatcttcctgccttgtcgagccaggcacgaatagtttcatttaaacgtgtattaaaagtgcaatatagctctatctctgtcacttacatagaatgcccgtaaaatctttctcttttcagccgagccatctaagatttcggcacgatcatcccggccgctgtgagtggcgacggttgtattacactacacagttgccagattttatataatttataaagagaaaagaaatacgcacaaacaaatgaacgggcattaagacggtttaatgataaaaaaatatgtttctgcataaaaataagatagtgccatgactccatggcactacctcaccggccgccactgacttatacaggtagtcttcggtctgcttttctttttttccgggggttgccattccactctcggctttgggagtcgatgtttctccattctttttacattgccactccaacaaagttgtttttcctggatttcttctattatgtttgttttcctattcattgtatatcgtactcgttcattcgttatgtgtgagactctagagatgcaggccgatcttcgccagaagtccatttccagtgcgagcaacttatgttccgttcccttattctccatatatttatatccatatagtaccacactttttaagatgctattatatagctgtgttttcttttcttctgatatggttttttgaccaaagtagtgagttcaaagctcctattattcttccctttcataattctttcctctatttcgaattctgcccttccaatttgttgaattctctttccaacatatacataatcagagctttgttcgataaccatatcatcctctagttgtgactcatttttctctcctcctatactcatatatttggctttaggccccattttttgtattctcgtaacagccggtttgtcataaatattagatcatctttaccctgggc

SEQ ID NO: 389 - DNA, 4336 bp, Diabrotica virgifera
  SmartBlast Evalue=2E-61; Info=Ubiquitin-conjugating enzyme E2 variant 2 n=4 Tax=Apocrita RepID=E2AGB3_9HYME
aagtgttaactctatctctattctggaaagaattagtcctcacatcttttgtatttaagttgagggaaaaaggtgatttttgatatccaaagagccccgctttgttaatcaatagtaggggataagatttcaatcatccataatattcgaaaatattcaaaatacacttttaaaaattttaagtttgtgagtattttgtaatggcgaccccatcaactggtgttgttgtgcctcgaaactttcgactacttgaagaactagaagccggtcaaaagggtgtttcagatggtactattagctggggcttagaaaatgatgatgatatgacacttacacattggatggggatgataatcgggccccctcgtacaccgtatgaaaataggatgtattctgttaaaattgaatgtggccaaaggtatcctgatgatgcacctactgcaaagtttatctctagaatcaatataaactgtataaacagtaacacaggggtggtcgataacagacaagtcccaatattggctaggtggcaaagggattacactattaaaacggttttgcaagaattacgaagaataatgacacttaaagagaacatgaagctaacacagcctcctgaaggcacttgcttctagcctttgaatcagcataacactcccccagtatcttctgttacaacttgtccattgagtgtcgatacctgcaccacgcaatcatgctgtcttctgtagcggattcaccttactcacaaactatctatggggtgtcttgaactggttcttggaagataacctgtctggtaatgaggacaaactggtgtatttaggttaaggtgtctaatgataagagtattttttaatattactgcttgtacaacttgtttaactctattagaggatgactcatgatcgaacttgtatttttgtaggaaacaaaaagtaatgttgatgtcaattataataaaccatctatgacgcatctcgtatttcaataaaattgaatgaataggcgtttgacacaatattgttcttgtataacccaaagttttaagaatgggtggtcacgattcattcgatatactagatttttgggttgattaaccacttatttgtttttgtatattctactgggcagtagttgacaatttatcggaactgtatttttaaacttttactagtattcactcactttgtgtacgtttttataccaaagatgaaattgtcaactgctgtggtatgaaaaaaatcaatttatgcttaaatacatgttacgctttattatggagaatcagcttcgaaaatctaaaattctaaaagacatttattgaataactacaaggttgtattgatatttagacattttttgaatgtcgtgtgtgtttataaagaagttatcctttattttgtagtagtttcggacaccccttttaacagtcagagagtagatatctatttgtatatcattgattacatatatcataaacattatctaaatcattattttttttgaaaacacagaaattaaaagtaaaggtagaatacaccattttaaaatttgacaatgttatctcaatacattattacattctcaatattcacacacacgcttcactagcactcataggtatttagcatctccttgtttgctgtcataccttggttttacatttaaaacttatatgagaaaagtgatacttagatgagactttactttataagtttaacttttttctttaaagtcttgagtctgatgaaagaatgagtagagatctacactctgatgacccaagttgtaacaaagatggctaaggtgtacagctttataagctatgtagttaagttaacattttagctaaagttattaggttgaaataagtttatatacagtaccagagcatatattccatatatagcagcttatagaaaggtaggaggaactgctaaaaactttgtttgccttaccaatagttttaataatcgagttttaagtcgagatattcacgcaggtggtctaaaatgcccaaatgttatttattatagagtaagcgccactctactagatacattggtaggtacctagttggtatgattattggctaatctggtccgttctcagatgtgactttcatccctgtcatgttactgtcatgaaactattcaaaataattgtttttccatacaaaagaatacattaattaatagtattgttactctgctttaaaataactttattcaagcaccaagcaatattacaatactttaaaactattacaactttaacaaaatgacaactataaacgtcaaacacagctgatctattatttgtcaactttttatgttaatatagggcattccaacatgctgtcaaaagtcaatatgacgactgggaggcaaacataaatgttattctatcagttcttaatttgttttagataattttagttgcgtttctttgtaattttgtttttaaaagaattgatttgacattctcactagaagaattaatctaaaaagataatatgcctaatttctgttgtgttttgaaatgtggaatacgaaattcatgatgaagttcagttttatcggttactatcagtggtatattttaagcgtaaacacgtgtaaaacaactaaataagttatcatctgagagacaaaaacaaacaactaaataagttatgatctgggagacaaaaacaatggttaaatgctacaaaacgtcctataaaatgctaaataattatttccatgttacttacgcttggaaaacgtctaaaccatgtgttctcaaacccctcgaggaaaagtggacctatattatttattttgtcaatcttttgcttgtacctaccactgtgcgtctaggtacctactaacaacattatgtattgtctaccaagaatttatatgcactcatgtttatttattcactgcttaaaaccaaataaagtcgttcaggtacttctacaactaaaaactacacaaaatctacaacaaaatgttcagaaaatacaacttaaaactgttaatacatgtgctgcaaatattataaacagacacaatgtttgacagtttgcctcccaaacgtcagtcttgaaatgccctattcagtttctatacattttctgacgttctaaacgtcactggacatacaaataaacattgcaacaagtgaagggtccaggactataatagctcaatgttcctatggatctagtagggtggcggtggttactgtatagcaatattacagtatttctcatgatcatttttcagtgcgtaacaaatgataggaaaaagggtaagtccgtgataatacacatttatgacatttattctaacatgacattttagttaaatctgacagttgtcacattttattttcaatttggaataaaaacaaatcaaaagtgtttcttgcatttataaaatggtattttctttgatttgtatagtcttataaattatacagattatatttgtaatattattatctaatttaaaaaaaaatttttattatggcgccatctatcgacaactagaataactagaataaatgttataaaaatgtccccgacgaaatgtaatcaccgacgtgcctttttttctgtcacatacaatttaatgcgttagaaagaaatcgaaaaactgtgacgcactgaaagatgatcatgagaaatactgtacatacttattttttactatagctacatttttgcgataccagttgaagagaacgtgactagaaatatattcttgtatgactactttgaacaaaagctacaactttgcttgtagtttgattcctgtgaattttttctcgaacggatacatttttgaacattttttttaagattcaattttttttaataccaaaggcaatcaaaccgttattttatcagttgttcctaacgaagcttccagcaatattgttttgaacattttactttttcattaccgtcaaacgcatgtttcggttattttggtacgctgtatgtttgaagctttaaaataaaatataatgacgtagcgtttataagctgtaccattcgtgtaattttatttgaattacatttttactatatagaatgttttgctgttatctgtgcaggatttaataagtctacgtttgttgaacaattttgttcgtttaaattacacacttttgtttcaaataggcattaatggtatttcgaaagacaattagaacggaaaccttggtgatattatcgaggtgaatacatttttgatgatagtgtgtagtataaacattttgtaattattaattttgattttggttcagtcatgataagttcgaagatttattttatcttacc

SEQ ID NO: 390 - DNA, 8021 bp, Diabrotica virgifera
  SmartBlast Evalue=4E-61; Info=Ubiquitin-conjugating enzyme E2 variant 2 n=4 Tax=Apocrita RepID=E2AGB3_9HYME
aagtgttaactctatctctattctggaaagaattagtcctcacatcttttgtatttaagttgagggaaaaaggtgatttttgatatccaaagagccccgctttgttaatcaatagtaggggataagatttcaatcatccataatattcgaaaatattcaaaatacacttttaaaaattttaagtttgtgagtattttgtaatggcgaccccatcaactggtgttgttgtgcctcgaaactttcgactacttgaagaactagaagccggtcaaaagggtgtttcagatggtactattagctggggcttagaaaatgatgatgatatgacacttacacattggatggggatgataatcgggccccctcgtacaccgtatgaaaataggatgtattctgttaaaattgaatgtggccaaaggtatcctgatgatgcacctactgcaaagtttatctctagaatcaatataaactgtataaacagtaacacaggggtggtcgataacagacaagtcccaatattggctaggtggcaaagggattacactattaaaacggttttgcaagaattacgaagaataatgacacttaaagagaacatgaagctaacacagcctcctgaaggcacttgcttctagcctttgaatcagcataacactcccccagtatcttctgttacaacttgtccattgagtgtcgatacctgcaccacgcaatcatgctgtcttctgtagcggattcaccttactcacaaactatctatggggtgtcttgaactggttcttggaagataacctgtctggtaatgaggacaaactggtgtatttaggttaaggtgtctaatgataagagtattttttaatattactgcttgtacaacttgtttaactctattagaggatgactcatgatcgaacttgtatttttgtaggaaacaaaaagtaatgttgatgtcaattataataaaccatctatgacgcatctcgtatttcaataaaattgaatgaataggcgtttgacacaatattgttcttgtataacccaaagttttaagaatgggtggtcacgattcattcgatatactagatttttgggttgattaaccacttatttgtttttgtatattctactgggcagtagttgacaatttatcggaactgtatttttaaacttttactagtattcactcactttgtgtacgtttttataccaaagatgaaattgtcaactgctgtggtatgaaaaaaatcaatttatgcttaaatacatgttacgctttattatggagaatcagcttcgaaaatctaaaattctaaaagacatttattgaataactacaaggttgtattgatatttagacattttttgaatgtcgtgtgtgtttataaagaagttatcctttattttgtagtagtttcggacaccccttttaacagtcagagagtagatatctatttgtatatcattgattacatatatcataaacattatctaaatcattattttttttgaaaacacagaaattaaaagtaaaggtagaatacaccattttaaaatttgacaatgttatctcaatacattattacattctcaatattcacacacacgcttcactagcactcataggtatttagcatctccttgtttgctgtcataccttggttttacatttaaaacttatatgagaaaagtgatacttagatgagactttactttataagtttaacttttttctttaaagtcttgagtctgatgaaagaatgagtagagatctacactctgatgacccaagttgtaacaaagatggctaaggtgtacagctttataagctatgtagttaagttaacattttagctaaagttattaggttgaaataagtttatatacagtaccagagcatatattccatatatagcagcttatagaaaggtaggaggaactgctaaaaactttgtttgccttaccaatagttttaataatcgagttttaagtcgagatattcacgcaggtggtctaaaatgcccaaatgttatttattatagagtaagcgccactctactagatacattggtaggtacctagttggtatgattattggctaatctggtccgttctcagatgtgactttcatccctgtcatgttactgtcatgaaactattcaaaataattgtttttccatacaaaagaatacattaattaatagtattgttactctgctttaaaataactttattcaagcaccaagcaatattacaatactttaaaactattacaactttaacaaaatgacaactataaacgtcaaacacagctgatctattatttgtcaactttttatgttaatatagggcattccaacatgctgtcaaaagtcaatatgacgactgggaggcaaacataaatgttattctatcagttcttaatttgttttagataattttagttgcgtttctttgtaattttgtttttaaaagaattgatttgacattctcactagaagaattaatctaaaaagataatatgcctaatttctgttgtgttttgaaatgtggaatacgaaattcatgatgaagttcagttttatcggttactatcagtggtatattttaagcgtaaacacgtgtaaaacaactaaataagttatcatctgagagacaaaaacaaacaactaaataagttatgatctgggagacaaaaacaatggttaaatgctacaaaacgtcctataaaatgctaaataattatttccatgttacttacgcttggaaaacgtctaaaccatgtgttctcaaacccctcgaggaaaagtggacctatattatttattttgtcaatcttttgcttgtacctaccactgtgcgtctaggtacctactaacaacattatgtattgtctaccaagaatttatatgcactcatgtttatttattcactgcttaaaaccaaataaagtcgttcaggtacttctacaactaaaaactacacaaaatctacaacaaaatgttcagaaaatacaacttaaaactgttaatacatgtgctgcaaatattataaacagacacaatgtttgacagtttgcctcccaaacgtcagtcttgaaatgccctattcagtttctatacattttctgacgttctaaacgtcactggacatacaaataaacattgcaacaagtgaagggtccaggactataatagctcaatgttcctatggatctagtagggtggcggtggttactgtatagcaatattacagtatttctcatgatcatttttcagtgcgtaacaaatgataggaaaaagggtaagtccgtgataatacacatttatgacatttattctaacatgacattttagttaaatctgacagttgtcacattttattttcaatttggaataaaaacaaatcaaaagtgtttcttgcatttataaaatggtattttctttgatttgtatagtcttataaattatacagattatatttgtaatattattatctaatttaaaaaaaaatttttattatggcgccatctatcgacaactagaataactagaataaatgttataaaaatgtcaccgacgaaatgtaatcaccgacgtgcctttttttctgtcacatacaatttaatgcgttagaaagaaatcgaaaaactgtgacgcactgaaagatgatcatgagaaatactgtataatctgaatttacataatatatcgtattcctaaagtcgaaaatgtaatttttcgactttgggatcggttatttcgaatttggtttgagatatcaaactcgcaagatgatattccttcttcttcttaaagtgcccatccgttctggatgttggcgatcatcatggctatcttgactttgtttaccacagcgcgaaatagttcagcggtagtcgtgttataccactttcgtaaattttgaagccaggaaatgcgtcttcttcccggtcctcttttaccatccgttggagaaggccgtagcatttctcattacatgtcctagatattctaattttttcgttatgatggtcatgagaatttcacactctttccccattctacgcagtacttctacattagtaattcggtcaacccaggatatacgtaagatgcgcctataacaccacatttcgaaagcttcggaccgattcatagatgcaacagttagtgtccacgcttccattccgtagagcagaactgtaaatatgtatcatttcaacagacggtattttgtttttaatgatatgtctagactctagactattgaaaaagggtctcattccaacgaatgctgcttttgcttttattattcactgtttaatttctgttgagtgggtccattggctatttaaattggtgcctagatatgtatattgctccactctttcaatattctgttgtttgattgtaagttgagtgtttagtatgattttcctaaactaggtaaaaaacacattgatttgatacctatatcatatgccataaatcaaaaattcgattttttgactttgaggtcggttgatatcgaaatggtttttaaatttggattcaggagacaaactgcataagaatccatcgtagatcgactcacaagtatttcaggggcggcgatgtacaaacgaacgaatcaacgaacagactttgcgaatttatatacgaaaacgaagttttcgttgaaaataaatgaattcatcgattaagctgtccttagtagcaaagtaatgtaaagcatgtagtgctatcaaacgctgtattgcgtatgccagtggcggctcgtatcactttaagtaggtagtgccagaattcgggcagctgcctaaatttttagtgacgggttcacaatattgtcaaaaaaggtataaaatagaaattaaaaaaaataggtacggatatttttacattatgtaggtatataccatttctggggtgtcaagaaatttaaacatttaaaatgcattcagtgattgatttgacatcatgtccgtccaacaagtaaaatctccaaaatctctcaacttatcgccctttacacaaatatcggaaaactataactaactgaaattcaccagcgacgcgacgtctgtcgtttcatcggcaatcactgcaacacaaagataattttcaatttctttccttatttcctcgtgataaacatctaagatgcactgaaggagttcattttgtgttgttttgaggtacatgcttttaaagatttggaactttgaatatgaaccgaagtcgttgtctaattcggctaacattgaacagttccataaagatgcctctattttctgaattttccttttcgtcgtgatttctcaaaactaactcgaaactccacaaaaccatatagatataatttttaatttgattcaaaacatatcgattcttatccacttcttgttcattgtgtttaattagactatcacgataagctgaatttaactcgggttttattaaaattaaaaattttaaattacttaaaaatataatagtttataataaaaagtttaatcattaaaaatgtaataattataaatacaaaaacgagcgagcgagcgcgtaaaaaaactcgaaaagataatgtaggtactaccctgtacgagaagctttttggatctgatctacgatccactattcactatgatgagcatagtaaaaaatattagatcttcctgccttgtcgagccaggcacgaatagtttcatttaaacgtgtattaaaagtgcaatatagctctatctctgtcacttacatagaatgcccgtaaaatctttctcttttcagccgagccatctaagcttttggcacgatgcgatcatcccgtccgctgtgagtggcgaggattgtactacactgcacagttgccagattttatataatttataaagagaaaagaaatacgcacaaaaaatgaacgggcattaaaacggtttaaagataaaaaatatgtttctgcataaaaattctgcaccggccgccactggcgtatgcagaatatttcgattaaactaaaattccaaaatttcgttctgcattatgcaaaacttgatttatgtttatataaattataaacatgtaaattttggtgctattaaattaagtgtaaaattattaggcatggtaaagttataaaaaaataaccaaatcttttgtttgttaaaattcttagaagtaacaagttaattaactatttaaagttattaataaacaattagaaggtaaagtgaaataaaaccacttctaattcgatttctatgaaaaaagtcaatatatgtggaaaaatttaaaatttcttcaatactgtttccttggtttttacgctaccaaaatacgtttgatttatcgagtcacatcgaaactatcaatgtattaataaatttgtaatgttcattagtcatttaatattaaaatttttaggattacatgtcattattgcgtaatatagttttgcatttcaaagctagtcctattgaactggattctacttgttaggaaaaaagaaatgattagaaatttcataaatcttttacaattttcaatattccatgaatgtctttttgctgtttcaaaatttcatttaaatcaaatttcaagacaatctatatttgctttatagctgcctttagttattaaatttgtactatattcctgatccgataaaattggtggtagataaagattgatttttaacattattaggtttgggctaagtatctactagtctgggtatgtctagcgttacaatgtataacgtatagtgcgaataacgtgcgcaaaatggcgattttcgctaagagttacctaaggcccgtccggcgaaacgatcggattttctgtattcattcagtggcgtattttcaagaagttagttaatatattattatgtgtctttatgtaaattttagaatggcttctttatttttgattcaaataatggatatgttaaatgatttattagtcgattaaaaatacgctataacctagaccagaggttctcaatctttttgagtcaggtaccaccaaatactttttattatttttggtaccacctaactaaaatacctgtctagctaggtgatctaattaactataattgtgccaatggtggtgctgattttggctgttttgactttgcgtaccacctcaaataatgaaatgtaccaccagtggtacatgtaccagagattgagaaccgctgacctagaccttaagatatataaaattattgttaatttgtccgttaacattttgctatttaataagggccggcgtagctcaggctgtaggatatctgactcgcatgctggtaggccggggttcgaaacccgcgccggcgagaacatctagacatttttaaaaatgtctataggccccaggtcgactcagcctgaataaaattagtactttgggtaaaaccaggggtaataataggcggttgaagcgtagcactgaccctgttacctttcttgtataccgtaggcactagatatagcagactaccctgctataatcccaaagccgctttagcggtataaaacgggagactattataataacagatacagataatagatttttttttaattactgtgatgcatgctgtattctttcagtttcggctcaggaaatattatttgttaacttcctcagaaattgtgtgcagataataagttaatacaatctaaccccaatttttaatatacacaggaatcgacacgtttttttatattatttcataaaaatttttacacacctacttaaaacgagtcttttaatagtgaattagtgatgctgccaaatatttatgaacccaatttatcaaacttaatgttgtacttaggttacatcataatcttaattgtgaacactgactacatatcccttaaatgtaactttatcagtctttccattttttactactgatatacccttgtctatgtcaaaaaatagtataaacttgtgatatatgaaatatagtaattttggattttaatatatttataaatgttcttaaga

SEQ ID NO: 391 - DNA, 4282 bp, Diabrotica virgifera
  SmartBlast Evalue=4E-27; Info=Endonuclease-reverse transcriptase n=1 Tax=Bombyx mori RepID=D5LB38_BOMMO
gcctgttatgtacgaatcatgacattcctgtctgatacagttagtcattattattatttcctggcgtataatattatagtttcttagtattttgtgtacatataagatatggcccgcaaatatcttactgaggccgagttacaggaaataattgttactgctagcgatttttatgatgatatagaagatgaaatagtatcagaaaacgataatgtattgttagatgaagatttaaatgctgaaaacattcattccaggtcatttttgacctggggtaattttttacccccgttggtcatccgtgtaacaaaaaaggttggtcatcggaaggttaaagcaatctcaagcttcaaccacagaatttagcggtgcaaaggcttgttacgatttttttttctcaccgagttaaataaaaataaatgactgttccattaacattaactgttccattaactgttttgttgcatgtataagcacatcaatattttcaaaatatgaatgaaaatgttcatcatcacgccaaaattttcttccaagatactgtgatgccattatattgttatttttggttttcgccaactacttatatgatttccaattaaagctggagaaggttttggtcaaatgtagcttgacaattattttataaattgcggatatcatcacattattttaaggtatccaacgatagctttatcgcattttgtattcatttttgaattatacaaaaacacattttgactaaaagcttcacgtctttttttgattacatttttgataatcttccacgtgcagaccaaagacaaacgaaaaagaaaattctcgtaaaagaatcaaatataagtacactttttggagtatatgtattataatttataactaattcactaatcaactattgtccttttcatgatcatttttcagtgcgtaacaaatgatatgaaaaagggtaagtccgtgataatacacatttatgacatttattctaacatgacattttagttaaatctgacagttgtcacattttattttcaatttggaataaaaacaaatcaaatgtgtttcttgcatttataaaatggtattttctttgatttgtatagtcttataaattatacagattatatttgtaatattattatctaattaaaaaaaatatttttttattatggcgccatctatcgacaactagaataactagaataaatgttataaaaatgtcaccgacgaaatgtaatcaccgacgtgcctttttttctgtcacatacaatttaatgcgttagaaagaaatcgaaaaactgtgacgcactgaaagatgatcatgagaaatactgtataatctgaatttacataatatatcgtattcctaaagtcgaaaatgtaatttttcgactttgggatcggttatttcgaatttggtttgagatatcaaactcgcaagatgatattccttcttcttcttaaagtgcccatccgttctggatgttggcgatcatcatggctatcttgactttgtttaccacagcgcgaaatagttcagcggtagtcgtgttataccactttcgtaaattttgaagccaggaaatgcgtcttcttcccggtcctcttttaccatccgttggagaaggccgtagcatttctcattacatgtcctagatattctaattttttcgttatgatggtcatgagaatttcacactctttccccattctacgcagtacttctacattagtaattcggtcaacccaggatatacgtaagatgcgcctataacaccacatttcgaaagcttcggaccgattcatagatgcaacagttagtgtccacgcttccattccgtagagcagaactgtaaatatgtatcatttcaacagacggtattttgtttttaatgatatgtctagactctagactattgaaaaagggtctcattccaacgaatgctgcttttgcttttattattcactgtttaatttctgttgagtgggtccattggctatttaaattggtgcctagatatgtatattgctccactctttcaatattctgttgtttgattgtaagttgagtgtttagtatgattttcctaaactaggtaaaaaacacattgatttgatacctatatcatatgccataaatcaaaaattcgattttttgactttgaggtcggttgatatcgaaatggtttttaaatttggattcaggagacaaactgcataagaatccatcgtagatcgactcacaagtatttcaggggcggcgatgtacaaacgaacgaatcaacgaacagactttgcgaatttatatacgaaaacgaagttttcgttgaaaataaatgaattcatcgattaagctgtccttagtagcaaagtaatgtaaagcatgtagtgctatcaaacgctgtattgcgtatgccagtggcggctcgtatcactttaagtaggtagtgccagaattcgggcagctgcctaaatttttagtgacgggttcacaatattgtcaaaaaaggtataaaatagaaattaaaaaaaataggtacggatatttttacattatgtaggtatataccatttctggggtgtcaagaaatttaaacatttaaaatgcattcagtgattgatttgacatcatgtccgtccaacaagtaaaatctccaaaatctctcaacttatcgccctttacacaaatatcggaaaactataactaactgaaattcaccagcgacgcgacgtctgtcgtttcatcggcaatcactgcaacacaaagataattttcaatttctttccttatttcctcgtgataaacatctaagatgcactgaaggagttcattttgtgttgttttgaggtacatgcttttaaagatttggaactttgaatatgaaccgaagtcgttgtctaattcggctaacattgaacagttccataaagatgcctctattttctgaattttccttttcgtcgtgatttctcaaaactaactcgaaactccacaaaaccatatagatataatttttaatttgattcaaaacatatcgattcttatccacttcttgttcattgtgtttaattagactatcacgataagctgaatttaactcgggttttattaaaattaaaaattttaaattacttaaaaatataatagtttataataaaaagtttaatcattatgtaataaatacaaaaacgagcgagcgagcgcataaaaaaactggaaaatataatgtactaccctgtacgagaatctttttggatctacgatccactattcactcactattcactatgatgagcatagtaaaaaatattagatcttccttgtccttgtcgagcatcttgttgagccaggcacgaatagtctcatttaaacgtgtattaaaagtgcaatatagctctacctctgtcacttatatagaatgcccgtaaaatctttctcttttcagccgagccatctaagatttcggcacgatcatcccggccgctgtgagtggcgacggttgtattacactacacagttgccagattttatataatttataaagagaaaagaaatacgcacaaacaaatgaacgggcattaagacggtttaatgataaaaaaatatgtttctgcataaaaataagatagtgccatgactccatggcactacctcaccggccgccactgacttatacaggtagtcttcggtctgcttttctttttttccgggggttgccattccactctcggctttgggagtcgatgtttctccattctttttacattgccactccaacaaagttgtttttcctggatttcttctattatgtttgttttcctattcattgtatatcgtactcgttcattcgttatgtgtgagactctagagatgcaggccgatcttcgccagaagtccatttccagtgcgagcaacttatgttccgttcccttattctccatatatttatatccatatagtaccacactttttaagatgctattatatagctgtgttttcttttcttctgatatggttttttgaccaaagtagtgagttcaaagctcctattattcttccctttcataattctttcctctatttcgaattctgcccttccaatttgttgaattctctttccaacatatacataatcagagctttgttcgataaccatatcatcctctagttgtgactcatttttctctcctcctatactcatatatttggctttaggccccattttttgtattctcgtaacagccggtttgtcataaatattagatcatctttaccctgggc

SEQ ID NO: 392 - DNA, 4276 bp, Diabrotica virgifera
  SmartBlast Evalue=4E-27; Info=Endonuclease-reverse transcriptase n=1 Tax=Bombyx mori RepID=D5LB38_BOMMO
gcctgttatgtacgaatcatgacattcctgtctgatacagttagtcattattattatttcctggcgtataatattatagtttcttagtattttgtgtacatataagatatggcccgcaaatatcttactgaggccgagttacaggaaataattgttactgctagcgatttttatgatgatatagaagatgaaatagtatcagaaaacgataatgtattgttagatgaagatttaaatgctgaaaacattcattccaggtcatttttgacctggggtaattttttacccccgttggtcatccgtgtaacaaaaaaggttggtcatcggaaggttaaagcaatctcaagcttcaaccacagaatttagcggtgcaaaggcttgttacgatttttttttctcaccgagttaaataaaaataaatgactgttccattaacattaactgttccattaactgttttgttgcatgtataagcacatcaatattttcaaaatatgaatgaaaatgttcatcatcacgccaaaattttcttccaagatactgtgatgccattatattgttatttttggttttcgccaactacttatatgatttccaattaaagctggagaaggttttggtcaaatgtagcttgacaattattttataaattgcggatatcatcacattattttaaggtatccaacgatagctttatcgcattttgtattcatttttgaattatacaaaaacacattttgactaaaagcttcacgtctttttttgattacatttttgataatcttccacgtgcagaccaaagacaaacgaaaaagaaaattctcgtaaaagaatcaaatataagtacactttttggagtatatgtattataatttataactaattcactaatcaactattgtccttttcatgatcatttttcagtgcgtaacaaatgatatgaaaaagggtaagtccgtgataatacacatttatgacatttattctaacatgacattttagttaaatctgacagttgtcacattttattttcaatttggaataaaaacaaatcaaatgtgtttcttgcatttataaaatggtattttctttgatttgtatagtcttataaattatacagattatatttgtaatattattatctaattaaaaaaaatatttttttattatggcgccatctatcgacaactagaataactagaataaatgttataaaaatgtcaccgacgaaatgtaatcaccgacgtgcctttttttctgtcacatacaatttaatgcgttagaaagaaatcgaaaaactgtgacgcactgaaagatgatcatgagaaatactgtataatctgaatttacataatatatcgtattcctaaagtcgaaaatgtaatttttcgactttgggatcggttatttcgaatttggtttgagatatcaaactcgcaagatgatattccttcttcttcttaaagtgcccatccgttctggatgttggcgatcatcatggctatcttgactttgtttaccacagcgcgaaatagttcagcggtagtcgtgttataccactttcgtaaattttgaagccaggaaatgcgtcttcttcccggtcctcttttaccatccgttggagaaggccgtagcatttctcattacatgtcctagatattctaattttttcgttatgatggtcatgagaatttcacactctttccccattctacgcagtacttctacattagtaattcggtcaacccaggatatacgtaagatgcgcctataacaccacatttcgaaagcttcggaccgattcatagatgcaacagttagtgtccacgcttccattccgtagagcagaactgtaaatatgtatcatttcaacagacggtattttgtttttaatgatatgtctagactctagactattgaaaaagggtctcattccaacgaatgctgcttttgcttttattattcactgtttaatttctgttgagtgggtccattggctatttaaattggtgcctagatatgtatattgctccactctttcaatattctgttgtttgattgtaagttgagtgtttagtatgattttcctaaactaggtaaaaaacacattgatttgatacctatatcatatgccataaatcaaaaattcgattttttgactttgaggtcggttgatatcgaaatggtttttaaatttggattcaggagacaaactgcataagaatccatcgtagatcgactcacaagtatttcaggggcggcgatgtacaaacgaacgaatcaacgaacagactttgcgaatttatatacgaaaacgaagttttcgttgaaaataaatgaattcatcgattaagctgtccttagtagcaaagtaatgtaaagcatgtagtgctatcaaacgctgtattgcgtatgccagtggcggctcgtatcactttaagtaggtagtgccagaattcgggcagctgcctaaatttttagtgacgggttcacaatattgtcaaaaaaggtataaaatagaaattaaaaaaaataggtacggatatttttacattatgtaggtatataccatttctggggtgtcaagaaatttaaacatttaaaatgcattcagtgattgatttgacatcatgtccgtccaacaagtaaaatctccaaaatctctcaacttatcgccctttacacaaatatcggaaaactataactaactgaaattcaccagcgacgcgacgtctgtcgtttcatcggcaatcactgcaacacaaagataattttcaatttctttccttatttcctcgtgataaacatctaagatgcactgaaggagttcattttgtgttgttttgaggtacatgcttttaaagatttggaactttgaatatgaaccgaagtcgttgtctaattcggctaacattgaacagttccataaagatgcctctattttctgaattttccttttcgtcgtgatttctcaaaactaactcgaaactccacaaaaccatatagatataatttttaatttgattcaaaacatatcgattcttatccacttcttgttcattgtgtttaattagactatcacgataagctgaatttaactcgggttttattaaaattaaaaattttaaattacttaaaaatataatagtttataataaaaagtttaatcattaaaaatgtaataattataaatacaaaaacgagcgagcgagcgcgtaaaaaaactcgaaaagataatgtaggtactaccctgtacgagaagctttttggatctgatctacgatccactattcactatgatgagcatagtaaaaaatattagatcttcctgccttgtcgagccaggcacgaatagtttcatttaaacgtgtattaaaagtgcaatatagctctatctctgtcacttacatagaatgcccgtaaaatctttctcttttcagccgagccatctaagatttcggcacgatcatcccggccgctgtgagtggcgacggttgtattacactacacagttgccagattttatataatttataaagagaaaagaaatacgcacaaacaaatgaacgggcattaagacggtttaatgataaaaaaatatgtttctgcataaaaataagatagtgccatgactccatggcactacctcaccggccgccactgacttatacaggtagtcttcggtctgcttttctttttttccgggggttgccattccactctcggctttgggagtcgatgtttctccattctttttacattgccactccaacaaagttgtttttcctggatttcttctattatgtttgttttcctattcattgtatatcgtactcgttcattcgttatgtgtgagactctagagatgcaggccgatcttcgccagaagtccatttccagtgcgagcaacttatgttccgttcccttattctccatatatttatatccatatagtaccacactttttaagatgctattatatagctgtgttttcttttcttctgatatggttttttgaccaaagtagtgagttcaaagctcctattattcttccctttcataattctttcctctatttcgaattctgcccttccaatttgttgaattctctttccaacatatacataatcagagctttgttcgataaccatatcatcctctagttgtgactcatttttctctcctcctatactcatatatttggctttaggccccattttttgtattctcgtaacagccggtttgtcataaatattagatcatctttaccctgggc

SEQ ID NO: 393 - DNA, 4097 bp, Diabrotica virgifera
  SmartBlast Evalue=8E-36; Info=Endonuclease-reverse transcriptase n=1 Tax=Bombyx mori RepID=D5LB38_BOMMO
tacattgattttcattcctttggtttttagattagtaggtttccattctcttcttaagtgcatatccgttccggatgttggcgatcatcatggctatcttgactttgtttaccgcagcgcggaacagttcagtggtagtggtgttataccactttcgtaaattttgaagccaggaaatgacgtcttcttcccggtcctcttttaccatttaccttcccttggagaatcagttggagaaggccgtaacgttcttgatttctcattacatgtcctagatattctaattttttcgttatgatggtcatgagaatttcacactctttccccattttacgcagtacttctacattagtaattcggtcaacccaggatatacgtaagatgcgcctataacaccacatttcgaaagcttcggaccgattcatagatgcaacagttagtgtccacgcttccattccgtaaagcagaactgtgaacatgtagcatttcaacagacggtattttgtttttaatgatatgtctagactattgaaaatgggtctcattctaacgaatgctgcttttgcttttattattcactgtttaatttctgttgagtggtcccattggctatttaaattggtgcctagatatgtatatggctacactctttcaatattctgttgtttgattgtaagttgagcgtttagtatgattttcctaaactaggtaaaaaacacattgatttgatacctatatcatatgcaataaatcaaaaattcgattttttgactttgaggtcggttgatatcgaaatggtttttaaatttggattcaggagacaaactgcataagaatccatcgtagatcgactcacaagtatttcaggggcggcgatgtacaaacgaacgaatcaacgaacagactttgcgaatttatatacgaaaacgaagttttcgttgaaaataaatgaattcatcgattaagctgtccttagtagcaaagtaatgtaaagcatgtagtgctatcaaacgctgtattgcgtatgccagtggcggctcgtatcactttaagtaggtagtgccagaattcgggcagctgcctaaatttttagtgacgggttcacaatattgtcaaaaaaggtataaaatagaaattaaaaaaaataggtacggatatttttacattatgtaggtatataccatttctggggtgtcaagaaatttaaacatttaaaatgcattcagtgattgatttgacatcatgtccgtccaacaagtaaaatctccaaaatctctcaacttatcgccctttacacaaatatcggaaaactataactaactgaaattcaccagcgacgcgacgtctgtcgtttcatcggcaatcactgcaacacaaagataattttcaatttctttccttatttcctcgtgataaacatctaagatgcactgaaggagttcattttgtgttgttttgaggtacatgcttttaaagatttggaactttgaatatgaaccgaagtcgttgtctaattcggctaacattgaacagttccataaagatgcctctattttctgaattttccttttcgtcgtgatttctcaaaactaactcgaaactccacaaaaccatatagatataatttttaatttgattcaaaacatatcgattcttatccacttcttgttcattgtgtttaattagactatcacgataagctgaatttaactcgggttttattaaaattaaaaattttaaattacttaaaaatataatagtttataataaaaagtttaatcattatgtaataaatacaaaaacgagcgagcgagcgcataaaaaaactggaaaatataatgtactaccctgtacgagaatctttttggatctacgatccactattcactcactattcactatgatgagcatagtaaaaaatattagatcttccttgtccttgtcgagcatcttgttgagccaggcacgaatagtctcatttaaacgtgtattaaaagtgcaatatagctctacctctgtcacttatatagaatgcccgtaaaatctttctcttttcagccgagccatctaagcttttggcacgatgcgatcatcccgtccgctgtctgtgagtggcgagggttgtactacactgcacagttgccagattttatataatttataaagagaaaagaaatacgcacaaaaaatgaacgggcattaaaacggtttaaagataaaaaaaaaatatgtttctgcataaaaataaggtagtgtcatggcactacctcaccggccgccactggcgtatgcagaatatttcaaataaactaaaattccagaatttcgttctgcattatacaaaacttgatttatgtttatataaattataaacatgtaaattttggtgctattaaattaagtgtaaaattattaggcatggtaaagttataaaaaaataaccaaatcttttgtttgttaaaattcttagaagtaacaagttaattaactatttaaagttattaataaacaattagaaggtaaagtgaaataaaaccacttctaattcgatttctatgaaaaaagtcaatatatgtggaaaaatttaaaatttcttcaatactgtttccttggtttttacgctaccaaaatacgtttgatttatcgagtcacatcgaaactatcaatgtattaataaatttgtaatgttcattagtcatttaatattaaaatttttaggattacatgtcattattgcgtaatatagttttgcatttcaaagctagtcctattgaactggattctacttgttaggaaaaaagaaatgattagaaatttcataaatcttttacaattttcaatattccatgaatgtctttttgctgtttcaaaatttcatttaaatcaaatttcaagacaatctatatttgctttatagctgcctttagttattaaatttgtactatattcctgatccgataaaattggtggtagataaagattgatttttaacattattaggtttgggctaagtatctactagtctgggtatgtctagcgttacaatgtataacgtatactgcgaataacgtgcgcaaaatggcgattttcgctaagagttacctaaggcccgtccggcgaaacgatcagattttctgcattcattcagtggcgtattttcaagaagttagttaatatattattatgtgtctttatgtaaattttagaatggcttctttatttttgattcaaataatggatatgttaaataatttattagtcgattaaaaatacgctataacctagaccttaagatatataaaattattgttaatttgtccgttaacattttgctatttaataagggccgccgtagctcaggctgtaggatatctgactcgcatgctggtaggccggggttcgaaacccgcgccggcgagaacatctagacatttttaaaaatgtctataggccccaggtcgactcagcctgaataaaattagtactttgggtaaaaccaggggtaataataggcggttgaagcgtagcactgaccctgttacctttcttgtataccgtaggcactagatatagcagactaccctgctataatcccaaagccgctttagcggtataaaacgggagactattataataacagatacagataatagatttttttttaattactgtgatgcatgctgtattctttcagtttcggctcaggaaatattatttgttaacttcctcagaaattgtgtgcagataataagttaatacaatctaaccccaatttttaatatacacaggaatcgacacgtttttttatattatttcataaaaatttttacacacctacttaaaacgagtcttttaatagtgaattagtgatgctgccaaatatttatgaacccaatttatcaaacttaatgttgtacttaggttacatcataatcttaattgtgaacactgactacatatcccttaaatgtaactttatcagtctttccattttttactactgatatacccttgtctatgtcaaaaaatagtataaacttgtgatatatgaaatatagtaattttggattttaatatatttataaatgttcttaaga

SEQ ID NO: 394 - DNA, 4091 bp, Diabrotica virgifera
  SmartBlast Evalue=8E-36; Info=Endonuclease-reverse transcriptase n=1 Tax=Bombyx mori RepID=D5LB38_BOMMO
tacattgattttcattcctttggtttttagattagtaggtttccattctcttcttaagtgcatatccgttccggatgttggcgatcatcatggctatcttgactttgtttaccgcagcgcggaacagttcagtggtagtggtgttataccactttcgtaaattttgaagccaggaaatgacgtcttcttcccggtcctcttttaccatttaccttcccttggagaatcagttggagaaggccgtaacgttcttgatttctcattacatgtcctagatattctaattttttcgttatgatggtcatgagaatttcacactctttccccattttacgcagtacttctacattagtaattcggtcaacccaggatatacgtaagatgcgcctataacaccacatttcgaaagcttcggaccgattcatagatgcaacagttagtgtccacgcttccattccgtaaagcagaactgtgaacatgtagcatttcaacagacggtattttgtttttaatgatatgtctagactattgaaaatgggtctcattctaacgaatgctgcttttgcttttattattcactgtttaatttctgttgagtggtcccattggctatttaaattggtgcctagatatgtatatggctacactctttcaatattctgttgtttgattgtaagttgagcgtttagtatgattttcctaaactaggtaaaaaacacattgatttgatacctatatcatatgcaataaatcaaaaattcgattttttgactttgaggtcggttgatatcgaaatggtttttaaatttggattcaggagacaaactgcataagaatccatcgtagatcgactcacaagtatttcaggggcggcgatgtacaaacgaacgaatcaacgaacagactttgcgaatttatatacgaaaacgaagttttcgttgaaaataaatgaattcatcgattaagctgtccttagtagcaaagtaatgtaaagcatgtagtgctatcaaacgctgtattgcgtatgccagtggcggctcgtatcactttaagtaggtagtgccagaattcgggcagctgcctaaatttttagtgacgggttcacaatattgtcaaaaaaggtataaaatagaaattaaaaaaaataggtacggatatttttacattatgtaggtatataccatttctggggtgtcaagaaatttaaacatttaaaatgcattcagtgattgatttgacatcatgtccgtccaacaagtaaaatctccaaaatctctcaacttatcgccctttacacaaatatcggaaaactataactaactgaaattcaccagcgacgcgacgtctgtcgtttcatcggcaatcactgcaacacaaagataattttcaatttctttccttatttcctcgtgataaacatctaagatgcactgaaggagttcattttgtgttgttttgaggtacatgcttttaaagatttggaactttgaatatgaaccgaagtcgttgtctaattcggctaacattgaacagttccataaagatgcctctattttctgaattttccttttcgtcgtgatttctcaaaactaactcgaaactccacaaaaccatatagatataatttttaatttgattcaaaacatatcgattcttatccacttcttgttcattgtgtttaattagactatcacgataagctgaatttaactcgggttttattaaaattaaaaattttaaattacttaaaaatataatagtttataataaaaagtttaatcattaaaaatgtaataattataaatacaaaaacgagcgagcgagcgcgtaaaaaaactcgaaaagataatgtaggtactaccctgtacgagaagctttttggatctgatctacgatccactattcactatgatgagcatagtaaaaaatattagatcttcctgccttgtcgagccaggcacgaatagtttcatttaaacgtgtattaaaagtgcaatatagctctatctctgtcacttacatagaatgcccgtaaaatctttctcttttcagccgagccatctaagcttttggcacgatgcgatcatcccgtccgctgtctgtgagtggcgagggttgtactacactgcacagttgccagattttatataatttataaagagaaaagaaatacgcacaaaaaatgaacgggcattaaaacggtttaaagataaaaaaaaaatatgtttctgcataaaaataaggtagtgtcatggcactacctcaccggccgccactggcgtatgcagaatatttcaaataaactaaaattccagaatttcgttctgcattatacaaaacttgatttatgtttatataaattataaacatgtaaattttggtgctattaaattaagtgtaaaattattaggcatggtaaagttataaaaaaataaccaaatcttttgtttgttaaaattcttagaagtaacaagttaattaactatttaaagttattaataaacaattagaaggtaaagtgaaataaaaccacttctaattcgatttctatgaaaaaagtcaatatatgtggaaaaatttaaaatttcttcaatactgtttccttggtttttacgctaccaaaatacgtttgatttatcgagtcacatcgaaactatcaatgtattaataaatttgtaatgttcattagtcatttaatattaaaatttttaggattacatgtcattattgcgtaatatagttttgcatttcaaagctagtcctattgaactggattctacttgttaggaaaaaagaaatgattagaaatttcataaatcttttacaattttcaatattccatgaatgtctttttgctgtttcaaaatttcatttaaatcaaatttcaagacaatctatatttgctttatagctgcctttagttattaaatttgtactatattcctgatccgataaaattggtggtagataaagattgatttttaacattattaggtttgggctaagtatctactagtctgggtatgtctagcgttacaatgtataacgtatactgcgaataacgtgcgcaaaatggcgattttcgctaagagttacctaaggcccgtccggcgaaacgatcagattttctgcattcattcagtggcgtattttcaagaagttagttaatatattattatgtgtctttatgtaaattttagaatggcttctttatttttgattcaaataatggatatgttaaataatttattagtcgattaaaaatacgctataacctagaccttaagatatataaaattattgttaatttgtccgttaacattttgctatttaataagggccgccgtagctcaggctgtaggatatctgactcgcatgctggtaggccggggttcgaaacccgcgccggcgagaacatctagacatttttaaaaatgtctataggccccaggtcgactcagcctgaataaaattagtactttgggtaaaaccaggggtaataataggcggttgaagcgtagcactgaccctgttacctttcttgtataccgtaggcactagatatagcagactaccctgctataatcccaaagccgctttagcggtataaaacgggagactattataataacagatacagataatagatttttttttaattactgtgatgcatgctgtattctttcagtttcggctcaggaaatattatttgttaacttcctcagaaattgtgtgcagataataagttaatacaatctaaccccaatttttaatatacacaggaatcgacacgtttttttatattatttcataaaaatttttacacacctacttaaaacgagtcttttaatagtgaattagtgatgctgccaaatatttatgaacccaatttatcaaacttaatgttgtacttaggttacatcataatcttaattgtgaacactgactacatatcccttaaatgtaactttatcagtctttccattttttactactgatatacccttgtctatgtcaaaaaatagtataaacttgtgatatatgaaatatagtaattttggattttaatatatttataaatgttcttaaga

SEQ ID NO: 395 - DNA, 4070 bp, Diabrotica virgifera
  SmartBlast Evalue=8E-36; Info=Endonuclease-reverse transcriptase n=1 Tax=Bombyx mori RepID=D5LB38_BOMMO
tacattgattttcattcctttggtttttagattagtaggtttccattctcttcttaagtgcatatccgttccggatgttggcgatcatcatggctatcttgactttgtttaccgcagcgcggaacagttcagtggtagtggtgttataccactttcgtaaattttgaagccaggaaatgacgtcttcttcccggtcctcttttaccatttaccttcccttggagaatcagttggagaaggccgtaacgttcttgatttctcattacatgtcctagatattctaattttttcgttatgatggtcatgagaatttcacactctttccccattttacgcagtacttctacattagtaattcggtcaacccaggatatacgtaagatgcgcctataacaccacatttcgaaagcttcggaccgattcatagatgcaacagttagtgtccacgcttccattccgtaaagcagaactgtgaacatgtagcatttcaacagacggtattttgtttttaatgatatgtctagactattgaaaatgggtctcattctaacgaatgctgcttttgcttttattattcactgtttaatttctgttgagtggtcccattggctatttaaattggtgcctagatatgtatatggctacactctttcaatattctgttgtttgattgtaagttgagcgtttagtatgattttcctaaactaggtaaaaaacacattgatttgatacctatatcatatgcaataaatcaaaaattcgattttttgactttgaggtcggttgatatcgaaatggtttttaaatttggattcaggagacaaactgcataagaatccatcgtagatcgactcacaagtatttcaggggcggcgatgtacaaacgaacgaatcaacgaacagactttgcgaatttatatacgaaaacgaagttttcgttgaaaataaatgaattcatcgattaagctgtccttagtagcaaagtaatgtaaagcatgtagtgctatcaaacgctgtattgcgtatgccagtggcggctcgtatcactttaagtaggtagtgccagaattcgggcagctgcctaaatttttagtgacgggttcacaatattgtcaaaaaaggtataaaatagaaattaaaaaaaataggtacggatatttttacattatgtaggtatataccatttctggggtgtcaagaaatttaaacatttaaaatgcattcagtgattgatttgacatcatgtccgtccaacaagtaaaatctccaaaatctctcaacttatcgccctttacacaaatatcggaaaactataactaactgaaattcaccagcgacgcgacgtctgtcgtttcatcggcaatcactgcaacacaaagataattttcaatttctttccttatttcctcgtgataaacatctaagatgcactgaaggagttcattttgtgttgttttgaggtacatgcttttaaagatttggaactttgaatatgaaccgaagtcgttgtctaattcggctaacattgaacagttccataaagatgcctctattttctgaattttccttttcgtcgtgatttctcaaaactaactcgaaactccacaaaaccatatagatataatttttaatttgattcaaaacatatcgattcttatccacttcttgttcattgtgtttaattagactatcacgataagctgaatttaactcgggttttattaaaattaaaaattttaaattacttaaaaatataatagtttataataaaaagtttaatcattatgtaataaatacaaaaacgagcgagcgagcgcataaaaaaactggaaaatataatgtactaccctgtacgagaatctttttggatctacgatccactattcactcactattcactatgatgagcatagtaaaaaatattagatcttccttgtccttgtcgagcatcttgttgagccaggcacgaatagtctcatttaaacgtgtattaaaagtgcaatatagctctacctctgtcacttatatagaatgcccgtaaaatctttctcttttcagccgagccatctaagcttttggcacgatgcgatcatcccgtccgctgtgagtggcgaggattgtactacactgcacagttgccagattttatataatttataaagagaaaagaaatacgcacaaaaaatgaacgggcattaaaacggtttaaagataaaaaatatgtttctgcataaaaattctgcaccggccgccactggcgtatgcagaatatttcgattaaactaaaattccaaaatttcgttctgcattatgcaaaacttgatttatgtttatataaattataaacatgtaaattttggtgctattaaattaagtgtaaaattattaggcatggtaaagttataaaaaaataaccaaatcttttgtttgttaaaattcttagaagtaacaagttaattaactatttaaagttattaataaacaattagaaggtaaagtgaaataaaaccacttctaattcgatttctatgaaaaaagtcaatatatgtggaaaaatttaaaatttcttcaatactgtttccttggtttttacgctaccaaaatacgtttgatttatcgagtcacatcgaaactatcaatgtattaataaatttgtaatgttcattagtcatttaatattaaaatttttaggattacatgtcattattgcgtaatatagttttgcatttcaaagctagtcctattgaactggattctacttgttaggaaaaaagaaatgattagaaatttcataaatcttttacaattttcaatattccatgaatgtctttttgctgtttcaaaatttcatttaaatcaaatttcaagacaatctatatttgctttatagctgcctttagttattaaatttgtactatattcctgatccgataaaattggtggtagataaagattgatttttaacattattaggtttgggctaagtatctactagtctgggtatgtctagcgttacaatgtataacgtatactgcgaataacgtgcgcaaaatggcgattttcgctaagagttacctaaggcccgtccggcgaaacgatcagattttctgcattcattcagtggcgtattttcaagaagttagttaatatattattatgtgtctttatgtaaattttagaatggcttctttatttttgattcaaataatggatatgttaaataatttattagtcgattaaaaatacgctataacctagaccttaagatatataaaattattgttaatttgtccgttaacattttgctatttaataagggccgccgtagctcaggctgtaggatatctgactcgcatgctggtaggccggggttcgaaacccgcgccggcgagaacatctagacatttttaaaaatgtctataggccccaggtcgactcagcctgaataaaattagtactttgggtaaaaccaggggtaataataggcggttgaagcgtagcactgaccctgttacctttcttgtataccgtaggcactagatatagcagactaccctgctataatcccaaagccgctttagcggtataaaacgggagactattataataacagatacagataatagatttttttttaattactgtgatgcatgctgtattctttcagtttcggctcaggaaatattatttgttaacttcctcagaaattgtgtgcagataataagttaatacaatctaaccccaatttttaatatacacaggaatcgacacgtttttttatattatttcataaaaatttttacacacctacttaaaacgagtcttttaatagtgaattagtgatgctgccaaatatttatgaacccaatttatcaaacttaatgttgtacttaggttacatcataatcttaattgtgaacactgactacatatcccttaaatgtaactttatcagtctttccattttttactactgatatacccttgtctatgtcaaaaaatagtataaacttgtgatatatgaaatatagtaattttggattttaatatatttataaatgttcttaaga

SEQ ID NO: 396 - DNA, 4064 bp, Diabrotica virgifera
  SmartBlast Evalue=8E-36; Info=Endonuclease-reverse transcriptase n=1 Tax=Bombyx mori RepID=D5LB38_BOMMO
tacattgattttcattcctttggtttttagattagtaggtttccattctcttcttaagtgcatatccgttccggatgttggcgatcatcatggctatcttgactttgtttaccgcagcgcggaacagttcagtggtagtggtgttataccactttcgtaaattttgaagccaggaaatgacgtcttcttcccggtcctcttttaccatttaccttcccttggagaatcagttggagaaggccgtaacgttcttgatttctcattacatgtcctagatattctaattttttcgttatgatggtcatgagaatttcacactctttccccattttacgcagtacttctacattagtaattcggtcaacccaggatatacgtaagatgcgcctataacaccacatttcgaaagcttcggaccgattcatagatgcaacagttagtgtccacgcttccattccgtaaagcagaactgtgaacatgtagcatttcaacagacggtattttgtttttaatgatatgtctagactattgaaaatgggtctcattctaacgaatgctgcttttgcttttattattcactgtttaatttctgttgagtggtcccattggctatttaaattggtgcctagatatgtatatggctacactctttcaatattctgttgtttgattgtaagttgagcgtttagtatgattttcctaaactaggtaaaaaacacattgatttgatacctatatcatatgcaataaatcaaaaattcgattttttgactttgaggtcggttgatatcgaaatggtttttaaatttggattcaggagacaaactgcataagaatccatcgtagatcgactcacaagtatttcaggggcggcgatgtacaaacgaacgaatcaacgaacagactttgcgaatttatatacgaaaacgaagttttcgttgaaaataaatgaattcatcgattaagctgtccttagtagcaaagtaatgtaaagcatgtagtgctatcaaacgctgtattgcgtatgccagtggcggctcgtatcactttaagtaggtagtgccagaattcgggcagctgcctaaatttttagtgacgggttcacaatattgtcaaaaaaggtataaaatagaaattaaaaaaaataggtacggatatttttacattatgtaggtatataccatttctggggtgtcaagaaatttaaacatttaaaatgcattcagtgattgatttgacatcatgtccgtccaacaagtaaaatctccaaaatctctcaacttatcgccctttacacaaatatcggaaaactataactaactgaaattcaccagcgacgcgacgtctgtcgtttcatcggcaatcactgcaacacaaagataattttcaatttctttccttatttcctcgtgataaacatctaagatgcactgaaggagttcattttgtgttgttttgaggtacatgcttttaaagatttggaactttgaatatgaaccgaagtcgttgtctaattcggctaacattgaacagttccataaagatgcctctattttctgaattttccttttcgtcgtgatttctcaaaactaactcgaaactccacaaaaccatatagatataatttttaatttgattcaaaacatatcgattcttatccacttcttgttcattgtgtttaattagactatcacgataagctgaatttaactcgggttttattaaaattaaaaattttaaattacttaaaaatataatagtttataataaaaagtttaatcattaaaaatgtaataattataaatacaaaaacgagcgagcgagcgcgtaaaaaaactcgaaaagataatgtaggtactaccctgtacgagaagctttttggatctgatctacgatccactattcactatgatgagcatagtaaaaaatattagatcttcctgccttgtcgagccaggcacgaatagtttcatttaaacgtgtattaaaagtgcaatatagctctatctctgtcacttacatagaatgcccgtaaaatctttctcttttcagccgagccatctaagcttttggcacgatgcgatcatcccgtccgctgtgagtggcgaggattgtactacactgcacagttgccagattttatataatttataaagagaaaagaaatacgcacaaaaaatgaacgggcattaaaacggtttaaagataaaaaatatgtttctgcataaaaattctgcaccggccgccactggcgtatgcagaatatttcgattaaactaaaattccaaaatttcgttctgcattatgcaaaacttgatttatgtttatataaattataaacatgtaaattttggtgctattaaattaagtgtaaaattattaggcatggtaaagttataaaaaaataaccaaatcttttgtttgttaaaattcttagaagtaacaagttaattaactatttaaagttattaataaacaattagaaggtaaagtgaaataaaaccacttctaattcgatttctatgaaaaaagtcaatatatgtggaaaaatttaaaatttcttcaatactgtttccttggtttttacgctaccaaaatacgtttgatttatcgagtcacatcgaaactatcaatgtattaataaatttgtaatgttcattagtcatttaatattaaaatttttaggattacatgtcattattgcgtaatatagttttgcatttcaaagctagtcctattgaactggattctacttgttaggaaaaaagaaatgattagaaatttcataaatcttttacaattttcaatattccatgaatgtctttttgctgtttcaaaatttcatttaaatcaaatttcaagacaatctatatttgctttatagctgcctttagttattaaatttgtactatattcctgatccgataaaattggtggtagataaagattgatttttaacattattaggtttgggctaagtatctactagtctgggtatgtctagcgttacaatgtataacgtatactgcgaataacgtgcgcaaaatggcgattttcgctaagagttacctaaggcccgtccggcgaaacgatcagattttctgcattcattcagtggcgtattttcaagaagttagttaatatattattatgtgtctttatgtaaattttagaatggcttctttatttttgattcaaataatggatatgttaaataatttattagtcgattaaaaatacgctataacctagaccttaagatatataaaattattgttaatttgtccgttaacattttgctatttaataagggccgccgtagctcaggctgtaggatatctgactcgcatgctggtaggccggggttcgaaacccgcgccggcgagaacatctagacatttttaaaaatgtctataggccccaggtcgactcagcctgaataaaattagtactttgggtaaaaccaggggtaataataggcggttgaagcgtagcactgaccctgttacctttcttgtataccgtaggcactagatatagcagactaccctgctataatcccaaagccgctttagcggtataaaacgggagactattataataacagatacagataatagatttttttttaattactgtgatgcatgctgtattctttcagtttcggctcaggaaatattatttgttaacttcctcagaaattgtgtgcagataataagttaatacaatctaaccccaatttttaatatacacaggaatcgacacgtttttttatattatttcataaaaatttttacacacctacttaaaacgagtcttttaatagtgaattagtgatgctgccaaatatttatgaacccaatttatcaaacttaatgttgtacttaggttacatcataatcttaattgtgaacactgactacatatcccttaaatgtaactttatcagtctttccattttttactactgatatacccttgtctatgtcaaaaaatagtataaacttgtgatatatgaaatatagtaattttggattttaatatatttataaatgttcttaaga

SEQ ID NO: 397 - DNA, 4011 bp, Diabrotica virgifera
  SmartBlast Evalue=4E-27; Info=Endonuclease-reverse transcriptase n=1 Tax=Bombyx mori RepID=D5LB38_BOMMO
gcaaatctagtattttgttgatttatggtatacagccagctacaggaagtttattttccttttcgattttgattttattacctccaaagctagaacgaaaagagtttgatctggaattgagcatggagtatactggagtattctggagaatttttttgcaggatctgtcaattatcgtttctttagcacctttctggatgttggcgatcagcatggctatcctaacttcgcttgctgctattcgcaatagtccagttgtcgatgtattgaaccactttcgcaggttttgaagcctagatatcgtagaatatttgtagatataacgtagaaaatacatagcttctgaaaagagacttcatcattatgaactctgatctcgcttttcctatgtgttgttttatttcatttgtgtggtcccactggctgtttatgttagtaccaaggaatgtgtaactgtccaccctgtcaattggttgttggttaaccaaaaactgtgtatttaatatttcgcgcttactgactaccatgtactttgtttttttttcgtattgagatcaactccgtgttctttacttatttatatctgatatgcgcgacattattctttactgtgacaatatacagtgtattgtccttttcatgacatttttcagtgcgtaacaaatgataggaaaaagggtaagtccgtgataatacacatttatgacatttattctaacatgacattttagttaaatctgacagttgtcacattttattttcaatttggaataaaaacaaatcaaatgtgtttcttgcatttataaaatggtattttctttgatttgtatagtcttataaattatacagattatatttgtaatattattatctaattaaaaaaaatatttttttattatggcgccatctatcgacaactagaataactagaataaatgttataaaaatgtcaccgacgaaatgtaatcaccgacgtgcctttttttctgtcacatacaatttaatgcgttagaaagaaatcgaaaaactgtgacgcactgaaagatgatcatgagaaatactgtataatctgaatttacataatatatcgtattcctaaagtcgaaaatgtaatttttcgactttgggatcggttatttcgaatttggtttgagatatcaaactcgcaagatgatattccttcttcttcttaaagtgcccatccgttctggatgttggcgatcatcatggctatcttgactttgtttaccacagcgcgaaatagttcagcggtagtcgtgttataccactttcgtaaattttgaagccaggaaatgcgtcttcttcccggtcctcttttaccatccgttggagaaggccgtagcatttctcattacatgtcctagatattctaattttttcgttatgatggtcatgagaatttcacactctttccccattctacgcagtacttctacattagtaattcggtcaacccaggatatacgtaagatgcgcctataacaccacatttcgaaagcttcggaccgattcatagatgcaacagttagtgtccacgcttccattccgtagagcagaactgtaaatatgtatcatttcaacagacggtattttgtttttaatgatatgtctagactctagactattgaaaaagggtctcattccaacgaatgctgcttttgcttttattattcactgtttaatttctgttgagtgggtccattggctatttaaattggtgcctagatatgtatattgctccactctttcaatattctgttgtttgattgtaagttgagtgtttagtatgattttcctaaactaggtaaaaaacacattgatttgatacctatatcatatgccataaatcaaaaattcgattttttgactttgaggtcggttgatatcgaaatggtttttaaatttggattcaggagacaaactgcataagaatccatcgtagatcgactcacaagtatttcaggggcggcgatgtacaaacgaacgaatcaacgaacagactttgcgaatttatatacgaaaacgaagttttcgttgaaaataaatgaattcatcgattaagctgtccttagtagcaaagtaatgtaaagcatgtagtgctatcaaacgctgtattgcgtatgccagtggcggctcgtatcactttaagtaggtagtgccagaattcgggcagctgcctaaatttttagtgacgggttcacaatattgtcaaaaaaggtataaaatagaaattaaaaaaaataggtacggatatttttacattatgtaggtatataccatttctggggtgtcaagaaatttaaacatttaaaatgcattcagtgattgatttgacatcatgtccgtccaacaagtaaaatctccaaaatctctcaacttatcgccctttacacaaatatcggaaaactataactaactgaaattcaccagcgacgcgacgtctgtcgtttcatcggcaatcactgcaacacaaagataattttcaatttctttccttatttcctcgtgataaacatctaagatgcactgaaggagttcattttgtgttgttttgaggtacatgcttttaaagatttggaactttgaatatgaaccgaagtcgttgtctaattcggctaacattgaacagttccataaagatgcctctattttctgaattttccttttcgtcgtgatttctcaaaactaactcgaaactccacaaaaccatatagatataatttttaatttgattcaaaacatatcgattcttatccacttcttgttcattgtgtttaattagactatcacgataagctgaatttaactcgggttttattaaaattaaaaattttaaattacttaaaaatataatagtttataataaaaagtttaatcattatgtaataaatacaaaaacgagcgagcgagcgcataaaaaaactggaaaatataatgtactaccctgtacgagaatctttttggatctacgatccactattcactcactattcactatgatgagcatagtaaaaaatattagatcttccttgtccttgtcgagcatcttgttgagccaggcacgaatagtctcatttaaacgtgtattaaaagtgcaatatagctctacctctgtcacttatatagaatgcccgtaaaatctttctcttttcagccgagccatctaagatttcggcacgatcatcccggccgctgtgagtggcgacggttgtattacactacacagttgccagattttatataatttataaagagaaaagaaatacgcacaaacaaatgaacgggcattaagacggtttaatgataaaaaaatatgtttctgcataaaaataagatagtgccatgactccatggcactacctcaccggccgccactgacttatacaggtagtcttcggtctgcttttctttttttccgggggttgccattccactctcggctttgggagtcgatgtttctccattctttttacattgccactccaacaaagttgtttttcctggatttcttctattatgtttgttttcctattcattgtatatcgtactcgttcattcgttatgtgtgagactctagagatgcaggccgatcttcgccagaagtccatttccagtgcgagcaacttatgttccgttcccttattctccatatatttatatccatatagtaccacactttttaagatgctattatatagctgtgttttcttttcttctgatatggttttttgaccaaagtagtgagttcaaagctcctattattcttccctttcataattctttcctctatttcgaattctgcccttccaatttgttgaattctctttccaacatatacataatcagagctttgttcgataaccatatcatcctctagttgtgactcatttttctctcctcctatactcatatatttggctttaggccccattttttgtattctcgtaacagccggtttgtcataaatattagatcatctttaccctgggc

SEQ ID NO: 398 - DNA, 4005 bp, Diabrotica virgifera
  SmartBlast Evalue=4E-27; Info=Endonuclease-reverse transcriptase n=1 Tax=Bombyx mori RepID=D5LB38_BOMMO
gcaaatctagtattttgttgatttatggtatacagccagctacaggaagtttattttccttttcgattttgattttattacctccaaagctagaacgaaaagagtttgatctggaattgagcatggagtatactggagtattctggagaatttttttgcaggatctgtcaattatcgtttctttagcacctttctggatgttggcgatcagcatggctatcctaacttcgcttgctgctattcgcaatagtccagttgtcgatgtattgaaccactttcgcaggttttgaagcctagatatcgtagaatatttgtagatataacgtagaaaatacatagcttctgaaaagagacttcatcattatgaactctgatctcgcttttcctatgtgttgttttatttcatttgtgtggtcccactggctgtttatgttagtaccaaggaatgtgtaactgtccaccctgtcaattggttgttggttaaccaaaaactgtgtatttaatatttcgcgcttactgactaccatgtactttgtttttttttcgtattgagatcaactccgtgttctttacttatttatatctgatatgcgcgacattattctttactgtgacaatatacagtgtattgtccttttcatgacatttttcagtgcgtaacaaatgataggaaaaagggtaagtccgtgataatacacatttatgacatttattctaacatgacattttagttaaatctgacagttgtcacattttattttcaatttggaataaaaacaaatcaaatgtgtttcttgcatttataaaatggtattttctttgatttgtatagtcttataaattatacagattatatttgtaatattattatctaattaaaaaaaatatttttttattatggcgccatctatcgacaactagaataactagaataaatgttataaaaatgtcaccgacgaaatgtaatcaccgacgtgcctttttttctgtcacatacaatttaatgcgttagaaagaaatcgaaaaactgtgacgcactgaaagatgatcatgagaaatactgtataatctgaatttacataatatatcgtattcctaaagtcgaaaatgtaatttttcgactttgggatcggttatttcgaatttggtttgagatatcaaactcgcaagatgatattccttcttcttcttaaagtgcccatccgttctggatgttggcgatcatcatggctatcttgactttgtttaccacagcgcgaaatagttcagcggtagtcgtgttataccactttcgtaaattttgaagccaggaaatgcgtcttcttcccggtcctcttttaccatccgttggagaaggccgtagcatttctcattacatgtcctagatattctaattttttcgttatgatggtcatgagaatttcacactctttccccattctacgcagtacttctacattagtaattcggtcaacccaggatatacgtaagatgcgcctataacaccacatttcgaaagcttcggaccgattcatagatgcaacagttagtgtccacgcttccattccgtagagcagaactgtaaatatgtatcatttcaacagacggtattttgtttttaatgatatgtctagactctagactattgaaaaagggtctcattccaacgaatgctgcttttgcttttattattcactgtttaatttctgttgagtgggtccattggctatttaaattggtgcctagatatgtatattgctccactctttcaatattctgttgtttgattgtaagttgagtgtttagtatgattttcctaaactaggtaaaaaacacattgatttgatacctatatcatatgccataaatcaaaaattcgattttttgactttgaggtcggttgatatcgaaatggtttttaaatttggattcaggagacaaactgcataagaatccatcgtagatcgactcacaagtatttcaggggcggcgatgtacaaacgaacgaatcaacgaacagactttgcgaatttatatacgaaaacgaagttttcgttgaaaataaatgaattcatcgattaagctgtccttagtagcaaagtaatgtaaagcatgtagtgctatcaaacgctgtattgcgtatgccagtggcggctcgtatcactttaagtaggtagtgccagaattcgggcagctgcctaaatttttagtgacgggttcacaatattgtcaaaaaaggtataaaatagaaattaaaaaaaataggtacggatatttttacattatgtaggtatataccatttctggggtgtcaagaaatttaaacatttaaaatgcattcagtgattgatttgacatcatgtccgtccaacaagtaaaatctccaaaatctctcaacttatcgccctttacacaaatatcggaaaactataactaactgaaattcaccagcgacgcgacgtctgtcgtttcatcggcaatcactgcaacacaaagataattttcaatttctttccttatttcctcgtgataaacatctaagatgcactgaaggagttcattttgtgttgttttgaggtacatgcttttaaagatttggaactttgaatatgaaccgaagtcgttgtctaattcggctaacattgaacagttccataaagatgcctctattttctgaattttccttttcgtcgtgatttctcaaaactaactcgaaactccacaaaaccatatagatataatttttaatttgattcaaaacatatcgattcttatccacttcttgttcattgtgtttaattagactatcacgataagctgaatttaactcgggttttattaaaattaaaaattttaaattacttaaaaatataatagtttataataaaaagtttaatcattaaaaatgtaataattataaatacaaaaacgagcgagcgagcgcgtaaaaaaactcgaaaagataatgtaggtactaccctgtacgagaagctttttggatctgatctacgatccactattcactatgatgagcatagtaaaaaatattagatcttcctgccttgtcgagccaggcacgaatagtttcatttaaacgtgtattaaaagtgcaatatagctctatctctgtcacttacatagaatgcccgtaaaatctttctcttttcagccgagccatctaagatttcggcacgatcatcccggccgctgtgagtggcgacggttgtattacactacacagttgccagattttatataatttataaagagaaaagaaatacgcacaaacaaatgaacgggcattaagacggtttaatgataaaaaaatatgtttctgcataaaaataagatagtgccatgactccatggcactacctcaccggccgccactgacttatacaggtagtcttcggtctgcttttctttttttccgggggttgccattccactctcggctttgggagtcgatgtttctccattctttttacattgccactccaacaaagttgtttttcctggatttcttctattatgtttgttttcctattcattgtatatcgtactcgttcattcgttatgtgtgagactctagagatgcaggccgatcttcgccagaagtccatttccagtgcgagcaacttatgttccgttcccttattctccatatatttatatccatatagtaccacactttttaagatgctattatatagctgtgttttcttttcttctgatatggttttttgaccaaagtagtgagttcaaagctcctattattcttccctttcataattctttcctctatttcgaattctgcccttccaatttgttgaattctctttccaacatatacataatcagagctttgttcgataaccatatcatcctctagttgtgactcatttttctctcctcctatactcatatatttggctttaggccccattttttgtattctcgtaacagccggtttgtcataaatattagatcatctttaccctgggc

SEQ ID NO: 399 - DNA, 3516 bp, Diabrotica virgifera
  SmartBlast Evalue=2E-61; Info=Ubiquitin-conjugating enzyme E2 variant 2 n=4 Tax=Apocrita RepID=E2AGB3_9HYME
aagtgttaactctatctctattctggaaagaattagtcctcacatcttttgtatttaagttgagggaaaaaggtgatttttgatatccaaagagccccgctttgttaatcaatagtaggggataagatttcaatcatccataatattcgaaaatattcaaaatacacttttaaaaattttaagtttgtgagtattttgtaatggcgaccccatcaactggtgttgttgtgcctcgaaactttcgactacttgaagaactagaagccggtcaaaagggtgtttcagatggtactattagctggggcttagaaaatgatgatgatatgacacttacacattggatggggatgataatcgggccccctcgtacaccgtatgaaaataggatgtattctgttaaaattgaatgtggccaaaggtatcctgatgatgcacctactgcaaagtttatctctagaatcaatataaactgtataaacagtaacacaggggtggtcgataacagacaagtcccaatattggctaggtggcaaagggattacactattaaaacggttttgcaagaattacgaagaataatgacacttaaagagaacatgaagctaacacagcctcctgaaggcacttgcttctagcctttgaatcagcataacactcccccagtatcttctgttacaacttgtccattgagtgtcgatacctgcaccacgcaatcatgctgtcttctgtagcggattcaccttactcacaaactatctatggggtgtcttgaactggttcttggaagataacctgtctggtaatgaggacaaactggtgtatttaggttaaggtgtctaatgataagagtattttttaatattactgcttgtacaacttgtttaactctattagaggatgactcatgatcgaacttgtatttttgtaggaaacaaaaagtaatgttgatgtcaattataataaaccatctatgacgcatctcgtatttcaataaaattgaatgaataggcgtttgacacaatattgttcttgtataacccaaagttttaagaatgggtggtcacgattcattcgatatactagatttttgggttgattaaccacttatttgtttttgtatattctactgggcagtagttgacaatttatcggaactgtatttttaaacttttactagtattcactcactttgtgtacgtttttataccaaagatgaaattgtcaactgctgtggtatgaaaaaaatcaatttatgcttaaatacatgttacgctttattatggagaatcagcttcgaaaatctaaaattctaaaagacatttattgaataactacaaggttgtattgatatttagacattttttgaatgtcgtgtgtgtttataaagaagttatcctttattttgtagtagtttcggacaccccttttaacagtcagagagtagatatctatttgtatatcattgattacatatatcataaacattatctaaatcattattttttttgaaaacacagaaattaaaagtaaaggtagaatacaccattttaaaatttgacaatgttatctcaatacattattacattctcaatattcacacacacgcttcactagcactcataggtatttagcatctccttgtttgctgtcataccttggttttacatttaaaacttatatgagaaaagtgatacttagatgagactttactttataagtttaacttttttctttaaagtcttgagtctgatgaaagaatgagtagagatctacactctgatgacccaagttgtaacaaagatggctaaggtgtacagctttataagctatgtagttaagttaacattttagctaaagttattaggttgaaataagtttatatacagtaccagagcatatattccatatatagcagcttatagaaaggtaggaggaactgctaaaaactttgtttgccttaccaatagttttaataatcgagttttaagtcgagatattcacgcaggtggtctaaaatgcccaaatgttatttattatagagtaagcgccactctactagatacattggtaggtacctagttggtatgattattggctaatctggtccgttctcagatgtgactttcatccctgtcatgttactgtcatgaaactattcaaaataattgtttttccatacaaaagaatacattaattaatagtattgttactctgctttaaaataactttattcaagcaccaagcaatattacaatactttaaaactattacaactttaacaaaatgacaactataaacgtcaaacacagctgatctattatttgtcaactttttatgttaatatagggcattccaacatgctgtcaaaagtcaatatgacgactgggaggcaaacataaatgttattctatcagttcttaatttgttttagataattttagttgcgtttctttgtaattttgtttttaaaagaattgatttgacattctcactagaagaattaatctaaaaagataatatgcctaatttctgttgtgttttgaaatgtggaatacgaaattcatgatgaagttcagttttatcggttactatcagtggtatattttaagcgtaaacacgtgtaaaacaactaaataagttatcatctgagagacaaaaacaaacaactaaataagttatgatctgggagacaaaaacaatggttaaatgctacaaaacgtcctataaaatgctaaataattatttccatgttacttacgcttggaaaacgtctaaaccatgtgttctcaaacccctcgaggaaaagtggacctatattatttattttgtcaatcttttgcttgtacctaccactgtgcgtctaggtacctactaacaacattatgtattgtctaccaagaatttatatgcactcatgtttatttattcactgcttaaaaccaaataaagtcgttcaggtacttctacaactaaaaactacacaaaatctacaacaaaatgttcagaaaatacaacttaaaactgttaatacatgtgctgcaaatattataaacagacacaatgtttgacagtttgcctcccaaacgtcagtcttgaaatgccctattcagtttctatacattttctgacgttctaaacgtcactggacatacaaataaacattgcaacaagtgaagggtccaggactataatagctcaatgttcctatggatctagtagggtggcggtggttactgtatagcaatattacagtatttctcatgatcatttttcagtgcgtaacaaatgataggaaaaagggtaagtccgtgataatacacatttatgacatttattctaacatgacattttagttaaatctgacagttgtcacattttattttcaatttggaataaaaacaaatcaaaagtgtttcttgcatttataaaatggtattttctttgatttgtatagtcttataaattatacagattatatttgtaatattattatctaatttaaaattttttttattt

SEQ ID NO: 400 - DNA, 3385 bp, Diabrotica virgifera
  SmartBlast Evalue=3E-27; Info=Endonuclease-reverse transcriptase n=1 Tax=Bombyx mori RepID=D5LB38_BOMMO
tattgtccttttcatgacatttttcagtgcgtaacaaatgataggaaaaagggtaagtccgtgataatacacatttatgacatttattctaacatgacattttagttaaatctgacagttgtcacattttattttcaatttggaataaaaacaaatcaaatgtgtttcttgcatttataaaatggtattttctttgatttgtatagtcttataaattatacagattatatttgtaatattattatctaattaaaaaaaatatttttttattatggcgccatctatcgacaactagaataactagaataaatgttataaaaatgtcaccgacgaaatgtaatcaccgacgtgcctttttttctgtcacatacaatttaatgcgttagaaagaaatcgaaaaactgtgacgcactgaaagatgatcatgagaaatactgtataatctgaatttacataatatatcgtattcctaaagtcgaaaatgtaatttttcgactttgggatcggttatttcgaatttggtttgagatatcaaactcgcaagatgatattccttcttcttcttaaagtgcccatccgttctggatgttggcgatcatcatggctatcttgactttgtttaccacagcgcgaaatagttcagcggtagtcgtgttataccactttcgtaaattttgaagccaggaaatgcgtcttcttcccggtcctcttttaccatccgttggagaaggccgtagcatttctcattacatgtcctagatattctaattttttcgttatgatggtcatgagaatttcacactctttccccattctacgcagtacttctacattagtaattcggtcaacccaggatatacgtaagatgcgcctataacaccacatttcgaaagcttcggaccgattcatagatgcaacagttagtgtccacgcttccattccgtagagcagaactgtaaatatgtatcatttcaacagacggtattttgtttttaatgatatgtctagactctagactattgaaaaagggtctcattccaacgaatgctgcttttgcttttattattcactgtttaatttctgttgagtgggtccattggctatttaaattggtgcctagatatgtatattgctccactctttcaatattctgttgtttgattgtaagttgagtgtttagtatgattttcctaaactaggtaaaaaacacattgatttgatacctatatcatatgccataaatcaaaaattcgattttttgactttgaggtcggttgatatcgaaatggtttttaaatttggattcaggagacaaactgcataagaatccatcgtagatcgactcacaagtatttcaggggcggcgatgtacaaacgaacgaatcaacgaacagactttgcgaatttatatacgaaaacgaagttttcgttgaaaataaatgaattcatcgattaagctgtccttagtagcaaagtaatgtaaagcatgtagtgctatcaaacgctgtattgcgtatgccagtggcggctcgtatcactttaagtaggtagtgccagaattcgggcagctgcctaaatttttagtgacgggttcacaatattgtcaaaaaaggtataaaatagaaattaaaaaaaataggtacggatatttttacattatgtaggtatataccatttctggggtgtcaagaaatttaaacatttaaaatgcattcagtgattgatttgacatcatgtccgtccaacaagtaaaatctccaaaatctctcaacttatcgccctttacacaaatatcggaaaactataactaactgaaattcaccagcgacgcgacgtctgtcgtttcatcggcaatcactgcaacacaaagataattttcaatttctttccttatttcctcgtgataaacatctaagatgcactgaaggagttcattttgtgttgttttgaggtacatgcttttaaagatttggaactttgaatatgaaccgaagtcgttgtctaattcggctaacattgaacagttccataaagatgcctctattttctgaattttccttttcgtcgtgatttctcaaaactaactcgaaactccacaaaaccatatagatataatttttaatttgattcaaaacatatcgattcttatccacttcttgttcattgtgtttaattagactatcacgataagctgaatttaactcgggttttattaaaattaaaaattttaaattacttaaaaatataatagtttataataaaaagtttaatcattatgtaataaatacaaaaacgagcgagcgagcgcataaaaaaactggaaaatataatgtactaccctgtacgagaatctttttggatctacgatccactattcactcactattcactatgatgagcatagtaaaaaatattagatcttccttgtccttgtcgagcatcttgttgagccaggcacgaatagtctcatttaaacgtgtattaaaagtgcaatatagctctacctctgtcacttatatagaatgcccgtaaaatctttctcttttcagccgagccatctaagatttcggcacgatcatcccggccgctgtgagtggcgacggttgtattacactacacagttgccagattttatataatttataaagagaaaagaaatacgcacaaacaaatgaacgggcattaagacggtttaatgataaaaaaatatgtttctgcataaaaataagatagtgccatgactccatggcactacctcaccggccgccactgacttatacaggtagtcttcggtctgcttttctttttttccgggggttgccattccactctcggctttgggagtcgatgtttctccattctttttacattgccactccaacaaagttgtttttcctggatttcttctattatgtttgttttcctattcattgtatatcgtactcgttcattcgttatgtgtgagactctagagatgcaggccgatcttcgccagaagtccatttccagtgcgagcaacttatgttccgttcccttattctccatatatttatatccatatagtaccacactttttaagatgctattatatagctgtgttttcttttcttctgatatggttttttgaccaaagtagtgagttcaaagctcctattattcttccctttcataattctttcctctatttcgaattctgcccttccaatttgttgaattctctttccaacatatacataatcagagctttgttcgataaccatatcatcctctagttgtgactcatttttctctcctcctatactcatatatttggctttaggccccattttttgtattctcgtaacagccggtttgtcataaatattagatcatctttaccctgggc

SEQ ID NO: 401 - DNA, 7834 bp, Diabrotica virgifera
  SmartBlast Evalue=4E-61; Info=Ubiquitin-conjugating enzyme E2 variant 2 n=4 Tax=Apocrita RepID=E2AGB3_9HYME
aagtgttaactctatctctattctggaaagaattagtcctcacatcttttgtatttaagttgagggaaaaaggtgatttttgatatccaaagagccccgctttgttaatcaatagtaggggataagatttcaatcatccataatattcgaaaatattcaaaatacacttttaaaaattttaagtttgtgagtattttgtaatggcgaccccatcaactggtgttgttgtgcctcgaaactttcgactacttgaagaactagaagccggtcaaaagggtgtttcagatggtactattagctggggcttagaaaatgatgatgatatgacacttacacattggatggggatgataatcgggccccctcgtacaccgtatgaaaataggatgtattctgttaaaattgaatgtggccaaaggtatcctgatgatgcacctactgcaaagtttatctctagaatcaatataaactgtataaacagtaacacaggggtggtcgataacagacaagtcccaatattggctaggtggcaaagggattacactattaaaacggttttgcaagaattacgaagaataatgacacttaaagagaacatgaagctaacacagcctcctgaaggcacttgcttctagcctttgaatcagcataacactcccccagtatcttctgttacaacttgtccattgagtgtcgatacctgcaccacgcaatcatgctgtcttctgtagcggattcaccttactcacaaactatctatggggtgtcttgaactggttcttggaagataacctgtctggtaatgaggacaaactggtgtatttaggttaaggtgtctaatgataagagtattttttaatattactgcttgtacaacttgtttaactctattagaggatgactcatgatcgaacttgtatttttgtaggaaacaaaaagtaatgttgatgtcaattataataaaccatctatgacgcatctcgtatttcaataaaattgaatgaataggcgtttgacacaatattgttcttgtataacccaaagttttaagaatgggtggtcacgattcattcgatatactagatttttgggttgattaaccacttatttgtttttgtatattctactgggcagtagttgacaatttatcggaactgtatttttaaacttttactagtattcactcactttgtgtacgtttttataccaaagatgaaattgtcaactgctgtggtatgaaaaaaatcaatttatgcttaaatacatgttacgctttattatggagaatcagcttcgaaaatctaaaattctaaaagacatttattgaataactacaaggttgtattgatatttagacattttttgaatgtcgtgtgtgtttataaagaagttatcctttattttgtagtagtttcggacaccccttttaacagtcagagagtagatatctatttgtatatcattgattacatatatcataaacattatctaaatcattattttttttgaaaacacagaaattaaaagtaaaggtagaatacaccattttaaaatttgacaatgttatctcaatacattattacattctcaatattcacacacacgcttcactagcactcataggtatttagcatctccttgtttgctgtcataccttggttttacatttaaaacttatatgagaaaagtgatacttagatgagactttactttataagtttaacttttttctttaaagtcttgagtctgatgaaagaatgagtagagatctacactctgatgacccaagttgtaacaaagatggctaaggtgtacagctttataagctatgtagttaagttaacattttagctaaagttattaggttgaaataagtttatatacagtaccagagcatatattccatatatagcagcttatagaaaggtaggaggaactgctaaaaactttgtttgccttaccaatagttttaataatcgagttttaagtcgagatattcacgcaggtggtctaaaatgcccaaatgttatttattatagagtaagcgccactctactagatacattggtaggtacctagttggtatgattattggctaatctggtccgttctcagatgtgactttcatccctgtcatgttactgtcatgaaactattcaaaataattgtttttccatacaaaagaatacattaattaatagtattgttactctgctttaaaataactttattcaagcaccaagcaatattacaatactttaaaactattacaactttaacaaaatgacaactataaacgtcaaacacagctgatctattatttgtcaactttttatgttaatatagggcattccaacatgctgtcaaaagtcaatatgacgactgggaggcaaacataaatgttattctatcagttcttaatttgttttagataattttagttgcgtttctttgtaattttgtttttaaaagaattgatttgacattctcactagaagaattaatctaaaaagataatatgcctaatttctgttgtgttttgaaatgtggaatacgaaattcatgatgaagttcagttttatcggttactatcagtggtatattttaagcgtaaacacgtgtaaaacaactaaataagttatcatctgagagacaaaaacaaacaactaaataagttatgatctgggagacaaaaacaatggttaaatgctacaaaacgtcctataaaatgctaaataattatttccatgttacttacgcttggaaaacgtctaaaccatgtgttctcaaacccctcgaggaaaagtggacctatattatttattttgtcaatcttttgcttgtacctaccactgtgcgtctaggtacctactaacaacattatgtattgtctaccaagaatttatatgcactcatgtttatttattcactgcttaaaaccaaataaagtcgttcaggtacttctacaactaaaaactacacaaaatctacaacaaaatgttcagaaaatacaacttaaaactgttaatacatgtgctgcaaatattataaacagacacaatgtttgacagtttgcctcccaaacgtcagtcttgaaatgccctattcagtttctatacattttctgacgttctaaacgtcactggacatacaaataaacattgcaacaagtgaagggtccaggactataatagctcaatgttcctatggatctagtagggtggcggtggttactgtatagcaatattacagtatttctcatgatcatttttcagtgcgtaacaaatgataggaaaaagggtaagtccgtgataatacacatttatgacatttattctaacatgacattttagttaaatctgacagttgtcacattttattttcaatttggaataaaaacaaatcaaaagtgtttcttgcatttataaaatggtattttctttgatttgtatagtcttataaattatacagattatatttgtaatattattatctaatttaaaaaaaaatttttattatggcgccatctatcgacaactagaataactagaataaatgttataaaaatgtcaccgacgaaatgtaatcaccgacgtgcctttttttctgtcacatacaatttaatgcgttagaaagaaatcgaaaaactgtgacgcactgaaagatgatcatgagaaatactgtataatctgaatttacataatatatcgtattcctaaagtcgaaaatgtaatttttcgactttgggatcggttatttcgaatttggtttgagatatcaaactcgcaagatgatattccttcttcttcttaaagtgcccatccgttctggatgttggcgatcatcatggctatcttgactttgtttaccacagcgcgaaatagttcagcggtagtcgtgttataccactttcgtaaattttgaagccaggaaatgcgtcttcttcccggtcctcttttaccatccgttggagaaggccgtagcatttctcattacatgtcctagatattctaattttttcgttatgatggtcatgagaatttcacactctttccccattctacgcagtacttctacattagtaattcggtcaacccaggatatacgtaagatgcgcctataacaccacatttcgaaagcttcggaccgattcatagatgcaacagttagtgtccacgcttccattccgtagagcagaactgtaaatatgtatcatttcaacagacggtattttgtttttaatgatatgtctagactctagactattgaaaaagggtctcattccaacgaatgctgcttttgcttttattattcactgtttaatttctgttgagtgggtccattggctatttaaattggtgcctagatatgtatattgctccactctttcaatattctgttgtttgattgtaagttgagtgtttagtatgattttcctaaactaggtaaaaaacacattgatttgatacctatatcatatgccataaatcaaaaattcgattttttgactttgaggtcggttgatatcgaaatggtttttaaatttggattcaggagacaaactgcataagaatccatcgtagatcgactcacaagtatttcaggggcggcgatgtacaaacgaacgaatcaacgaacagactttgcgaatttatatacgaaaacgaagttttcgttgaaaataaatgaattcatcgattaagctgtccttagtagcaaagtaatgtaaagcatgtagtgctatcaaacgctgtattgcgtatgccagtggcggctcgtatcactttaagtaggtagtgccagaattcgggcagctgcctaaatttttagtgacgggttcacaatattgtcaaaaaaggtataaaatagaaattaaaaaaaataggtacggatatttttacattatgtaggtatataccatttctggggtgtcaagaaatttaaacatttaaaatgcattcagtgattgatttgacatcatgtccgtccaacaagtaaaatctccaaaatctctcaacttatcgccctttacacaaatatcggaaaactataactaactgaaattcaccagcgacgcgacgtctgtcgtttcatcggcaatcactgcaacacaaagataattttcaatttctttccttatttcctcgtgataaacatctaagatgcactgaaggagttcattttgtgttgttttgaggtacatgcttttaaagatttggaactttgaatatgaaccgaagtcgttgtctaattcggctaacattgaacagttccataaagatgcctctattttctgaattttccttttcgtcgtgatttctcaaaactaactcgaaactccacaaaaccatatagatataatttttaatttgattcaaaacatatcgattcttatccacttcttgttcattgtgtttaattagactatcacgataagctgaatttaactcgggttttattaaaattaaaaattttaaattacttaaaaatataatagtttataataaaaagtttaatcattatgtaataaatacaaaaacgagcgagcgagcgcataaaaaaactggaaaatataatgtactaccctgtacgagaatctttttggatctacgatccactattcactcactattcactatgatgagcatagtaaaaaatattagatcttccttgtccttgtcgagcatcttgttgagccaggcacgaatagtctcatttaaacgtgtattaaaagtgcaatatagctctacctctgtcacttatatagaatgcccgtaaaatctttctcttttcagccgagccatctaagcttttggcacgatgcgatcatcccgtccgctgtctgtgagtggcgagggttgtactacactgcacagttgccagattttatataatttataaagagaaaagaaatacgcacaaaaaatgaacgggcattaaaacggtttaaagataaaaaaaaaatatgtttctgcataaaaataaggtagtgtcatggcactacctcaccggccgccactggcgtatgcagaatatttcaaataaactaaaattccagaatttcgttctgcattatacaaaacttgatttatgtttatataaattataaacatgtaaattttggtgctattaaattaagtgtaaaattattaggcatggtaaagttataaaaaaataaccaaatcttttgtttgttaaaattcttagaagtaacaagttaattaactatttaaagttattaataaacaattagaaggtaaagtgaaataaaaccacttctaattcgatttctatgaaaaaagtcaatatatgtggaaaaatttaaaatttcttcaatactgtttccttggtttttacgctaccaaaatacgtttgatttatcgagtcacatcgaaactatcaatgtattaataaatttgtaatgttcattagtcatttaatattaaaatttttaggattacatgtcattattgcgtaatatagttttgcatttcaaagctagtcctattgaactggattctacttgttaggaaaaaagaaatgattagaaatttcataaatcttttacaattttcaatattccatgaatgtctttttgctgtttcaaaatttcatttaaatcaaatttcaagacaatctatatttgctttatagctgcctttagttattaaatttgtactatattcctgatccgataaaattggtggtagataaagattgatttttaacattattaggtttgggctaagtatctactagtctgggtatgtctagcgttacaatgtataacgtatactgcgaataacgtgcgcaaaatggcgattttcgctaagagttacctaaggcccgtccggcgaaacgatcagattttctgcattcattcagtggcgtattttcaagaagttagttaatatattattatgtgtctttatgtaaattttagaatggcttctttatttttgattcaaataatggatatgttaaataatttattagtcgattaaaaatacgctataacctagaccttaagatatataaaattattgttaatttgtccgttaacattttgctatttaataagggccgccgtagctcaggctgtaggatatctgactcgcatgctggtaggccggggttcgaaacccgcgccggcgagaacatctagacatttttaaaaatgtctataggccccaggtcgactcagcctgaataaaattagtactttgggtaaaaccaggggtaataataggcggttgaagcgtagcactgaccctgttacctttcttgtataccgtaggcactagatatagcagactaccctgctataatcccaaagccgctttagcggtataaaacgggagactattataataacagatacagataatagatttttttttaattactgtgatgcatgctgtattctttcagtttcggctcaggaaatattatttgttaacttcctcagaaattgtgtgcagataataagttaatacaatctaaccccaatttttaatatacacaggaatcgacacgtttttttatattatttcataaaaatttttacacacctacttaaaacgagtcttttaatagtgaattagtgatgctgccaaatatttatgaacccaatttatcaaacttaatgttgtacttaggttacatcataatcttaattgtgaacactgactacatatcccttaaatgtaactttatcagtctttccattttttactactgatatacccttgtctatgtcaaaaaatagtataaacttgtgatatatgaaatatagtaattttggattttaatatatttataaatgttcttaaga

SEQ ID NO: 402 - DNA, 3379 bp, Diabrotica virgifera
  SmartBlast Evalue=3E-27; Info=Endonuclease-reverse transcriptase n=1 Tax=Bombyx mori RepID=D5LB38_BOMMO
tattgtccttttcatgacatttttcagtgcgtaacaaatgataggaaaaagggtaagtccgtgataatacacatttatgacatttattctaacatgacattttagttaaatctgacagttgtcacattttattttcaatttggaataaaaacaaatcaaatgtgtttcttgcatttataaaatggtattttctttgatttgtatagtcttataaattatacagattatatttgtaatattattatctaattaaaaaaaatatttttttattatggcgccatctatcgacaactagaataactagaataaatgttataaaaatgtcaccgacgaaatgtaatcaccgacgtgcctttttttctgtcacatacaatttaatgcgttagaaagaaatcgaaaaactgtgacgcactgaaagatgatcatgagaaatactgtataatctgaatttacataatatatcgtattcctaaagtcgaaaatgtaatttttcgactttgggatcggttatttcgaatttggtttgagatatcaaactcgcaagatgatattccttcttcttcttaaagtgcccatccgttctggatgttggcgatcatcatggctatcttgactttgtttaccacagcgcgaaatagttcagcggtagtcgtgttataccactttcgtaaattttgaagccaggaaatgcgtcttcttcccggtcctcttttaccatccgttggagaaggccgtagcatttctcattacatgtcctagatattctaattttttcgttatgatggtcatgagaatttcacactctttccccattctacgcagtacttctacattagtaattcggtcaacccaggatatacgtaagatgcgcctataacaccacatttcgaaagcttcggaccgattcatagatgcaacagttagtgtccacgcttccattccgtagagcagaactgtaaatatgtatcatttcaacagacggtattttgtttttaatgatatgtctagactctagactattgaaaaagggtctcattccaacgaatgctgcttttgcttttattattcactgtttaatttctgttgagtgggtccattggctatttaaattggtgcctagatatgtatattgctccactctttcaatattctgttgtttgattgtaagttgagtgtttagtatgattttcctaaactaggtaaaaaacacattgatttgatacctatatcatatgccataaatcaaaaattcgattttttgactttgaggtcggttgatatcgaaatggtttttaaatttggattcaggagacaaactgcataagaatccatcgtagatcgactcacaagtatttcaggggcggcgatgtacaaacgaacgaatcaacgaacagactttgcgaatttatatacgaaaacgaagttttcgttgaaaataaatgaattcatcgattaagctgtccttagtagcaaagtaatgtaaagcatgtagtgctatcaaacgctgtattgcgtatgccagtggcggctcgtatcactttaagtaggtagtgccagaattcgggcagctgcctaaatttttagtgacgggttcacaatattgtcaaaaaaggtataaaatagaaattaaaaaaaataggtacggatatttttacattatgtaggtatataccatttctggggtgtcaagaaatttaaacatttaaaatgcattcagtgattgatttgacatcatgtccgtccaacaagtaaaatctccaaaatctctcaacttatcgccctttacacaaatatcggaaaactataactaactgaaattcaccagcgacgcgacgtctgtcgtttcatcggcaatcactgcaacacaaagataattttcaatttctttccttatttcctcgtgataaacatctaagatgcactgaaggagttcattttgtgttgttttgaggtacatgcttttaaagatttggaactttgaatatgaaccgaagtcgttgtctaattcggctaacattgaacagttccataaagatgcctctattttctgaattttccttttcgtcgtgatttctcaaaactaactcgaaactccacaaaaccatatagatataatttttaatttgattcaaaacatatcgattcttatccacttcttgttcattgtgtttaattagactatcacgataagctgaatttaactcgggttttattaaaattaaaaattttaaattacttaaaaatataatagtttataataaaaagtttaatcattaaaaatgtaataattataaatacaaaaacgagcgagcgagcgcgtaaaaaaactcgaaaagataatgtaggtactaccctgtacgagaagctttttggatctgatctacgatccactattcactatgatgagcatagtaaaaaatattagatcttcctgccttgtcgagccaggcacgaatagtttcatttaaacgtgtattaaaagtgcaatatagctctatctctgtcacttacatagaatgcccgtaaaatctttctcttttcagccgagccatctaagatttcggcacgatcatcccggccgctgtgagtggcgacggttgtattacactacacagttgccagattttatataatttataaagagaaaagaaatacgcacaaacaaatgaacgggcattaagacggtttaatgataaaaaaatatgtttctgcataaaaataagatagtgccatgactccatggcactacctcaccggccgccactgacttatacaggtagtcttcggtctgcttttctttttttccgggggttgccattccactctcggctttgggagtcgatgtttctccattctttttacattgccactccaacaaagttgtttttcctggatttcttctattatgtttgttttcctattcattgtatatcgtactcgttcattcgttatgtgtgagactctagagatgcaggccgatcttcgccagaagtccatttccagtgcgagcaacttatgttccgttcccttattctccatatatttatatccatatagtaccacactttttaagatgctattatatagctgtgttttcttttcttctgatatggttttttgaccaaagtagtgagttcaaagctcctattattcttccctttcataattctttcctctatttcgaattctgcccttccaatttgttgaattctctttccaacatatacataatcagagctttgttcgataaccatatcatcctctagttgtgactcatttttctctcctcctatactcatatatttggctttaggccccattttttgtattctcgtaacagccggtttgtcataaatattagatcatctttaccctgggc

SEQ ID NO: 403 - DNA, 2894 bp, Diabrotica virgifera
  SmartBlast Evalue=6E-36; Info=Endonuclease-reverse transcriptase n=1 Tax=Bombyx mori RepID=D5LB38_BOMMO
tacattgattttcattcctttggtttttagattagtaggtttccattctcttcttaagtgcatatccgttccggatgttggcgatcatcatggctatcttgactttgtttaccgcagcgcggaacagttcagtggtagtggtgttataccactttcgtaaattttgaagccaggaaatgacgtcttcttcccggtcctcttttaccatttaccttcccttggagaatcagttggagaaggccgtaacgttcttgatttctcattacatgtcctagatattctaattttttcgttatgatggtcatgagaatttcacactctttccccattttacgcagtacttctacattagtaattcggtcaacccaggatatacgtaagatgcgcctataacaccacatttcgaaagcttcggaccgattcatagatgcaacagttagtgtccacgcttccattccgtaaagcagaactgtgaacatgtagcatttcaacagacggtattttgtttttaatgatatgtctagactattgaaaatgggtctcattctaacgaatgctgcttttgcttttattattcactgtttaatttctgttgagtggtcccattggctatttaaattggtgcctagatatgtatatggctacactctttcaatattctgttgtttgattgtaagttgagcgtttagtatgattttcctaaactaggtaaaaaacacattgatttgatacctatatcatatgcaataaatcaaaaattcgattttttgactttgaggtcggttgatatcgaaatggtttttaaatttggattcaggagacaaactgcataagaatccatcgtagatcgactcacaagtatttcaggggcggcgatgtacaaacgaacgaatcaacgaacagactttgcgaatttatatacgaaaacgaagttttcgttgaaaataaatgaattcatcgattaagctgtccttagtagcaaagtaatgtaaagcatgtagtgctatcaaacgctgtattgcgtatgccagtggcggctcgtatcactttaagtaggtagtgccagaattcgggcagctgcctaaatttttagtgacgggttcacaatattgtcaaaaaaggtataaaatagaaattaaaaaaaataggtacggatatttttacattatgtaggtatataccatttctggggtgtcaagaaatttaaacatttaaaatgcattcagtgattgatttgacatcatgtccgtccaacaagtaaaatctccaaaatctctcaacttatcgccctttacacaaatatcggaaaactataactaactgaaattcaccagcgacgcgacgtctgtcgtttcatcggcaatcactgcaacacaaagataattttcaatttctttccttatttcctcgtgataaacatctaagatgcactgaaggagttcattttgtgttgttttgaggtacatgcttttaaagatttggaactttgaatatgaaccgaagtcgttgtctaattcggctaacattgaacagttccataaagatgcctctattttctgaattttccttttcgtcgtgatttctcaaaactaactcgaaactccacaaaaccatatagatataatttttaatttgattcaaaacatatcgattcttatccacttcttgttcattgtgtttaattagactatcacgataagctgaatttaactcgggttttattaaaattaaaaattttaaattacttaaaaatataatagtttataataaaaagtttaatcattatgtaataaatacaaaaacgagcgagcgagcgcataaaaaaactggaaaatataatgtactaccctgtacgagaatctttttggatctacgatccactattcactcactattcactatgatgagcatagtaaaaaatattagatcttccttgtccttgtcgagcatcttgttgagccaggcacgaatagtctcatttaaacgtgtattaaaagtgcaatatagctctacctctgtcacttatatagaatgcccgtaaaatctttctcttttcagccgagccatctaagatttcggcacgatcatcccggccgctgtgagtggcgacggttgtattacactacacagttgccagattttatataatttataaagagaaaagaaatacgcacaaacaaatgaacgggcattaagacggtttaatgataaaaaaatatgtttctgcataaaaataagatagtgccatgactccatggcactacctcaccggccgccactgacttatacaggtagtcttcggtctgcttttctttttttccgggggttgccattccactctcggctttgggagtcgatgtttctccattctttttacattgccactccaacaaagttgtttttcctggatttcttctattatgtttgttttcctattcattgtatatcgtactcgttcattcgttatgtgtgagactctagagatgcaggccgatcttcgccagaagtccatttccagtgcgagcaacttatgttccgttcccttattctccatatatttatatccatatagtaccacactttttaagatgctattatatagctgtgttttcttttcttctgatatggttttttgaccaaagtagtgagttcaaagctcctattattcttccctttcataattctttcctctatttcgaattctgcccttccaatttgttgaattctctttccaacatatacataatcagagctttgttcgataaccatatcatcctctagttgtgactcatttttctctcctcctatactcatatatttggctttaggccccattttttgtattctcgtaacagccggtttgtcataaatattagatcatctttaccctgggc

SEQ ID NO: 404 - DNA, 2888 bp, Diabrotica virgifera
  SmartBlast Evalue=6E-36; Info=Endonuclease-reverse transcriptase n=1 Tax=Bombyx mori RepID=D5LB38_BOMMO
tacattgattttcattcctttggtttttagattagtaggtttccattctcttcttaagtgcatatccgttccggatgttggcgatcatcatggctatcttgactttgtttaccgcagcgcggaacagttcagtggtagtggtgttataccactttcgtaaattttgaagccaggaaatgacgtcttcttcccggtcctcttttaccatttaccttcccttggagaatcagttggagaaggccgtaacgttcttgatttctcattacatgtcctagatattctaattttttcgttatgatggtcatgagaatttcacactctttccccattttacgcagtacttctacattagtaattcggtcaacccaggatatacgtaagatgcgcctataacaccacatttcgaaagcttcggaccgattcatagatgcaacagttagtgtccacgcttccattccgtaaagcagaactgtgaacatgtagcatttcaacagacggtattttgtttttaatgatatgtctagactattgaaaatgggtctcattctaacgaatgctgcttttgcttttattattcactgtttaatttctgttgagtggtcccattggctatttaaattggtgcctagatatgtatatggctacactctttcaatattctgttgtttgattgtaagttgagcgtttagtatgattttcctaaactaggtaaaaaacacattgatttgatacctatatcatatgcaataaatcaaaaattcgattttttgactttgaggtcggttgatatcgaaatggtttttaaatttggattcaggagacaaactgcataagaatccatcgtagatcgactcacaagtatttcaggggcggcgatgtacaaacgaacgaatcaacgaacagactttgcgaatttatatacgaaaacgaagttttcgttgaaaataaatgaattcatcgattaagctgtccttagtagcaaagtaatgtaaagcatgtagtgctatcaaacgctgtattgcgtatgccagtggcggctcgtatcactttaagtaggtagtgccagaattcgggcagctgcctaaatttttagtgacgggttcacaatattgtcaaaaaaggtataaaatagaaattaaaaaaaataggtacggatatttttacattatgtaggtatataccatttctggggtgtcaagaaatttaaacatttaaaatgcattcagtgattgatttgacatcatgtccgtccaacaagtaaaatctccaaaatctctcaacttatcgccctttacacaaatatcggaaaactataactaactgaaattcaccagcgacgcgacgtctgtcgtttcatcggcaatcactgcaacacaaagataattttcaatttctttccttatttcctcgtgataaacatctaagatgcactgaaggagttcattttgtgttgttttgaggtacatgcttttaaagatttggaactttgaatatgaaccgaagtcgttgtctaattcggctaacattgaacagttccataaagatgcctctattttctgaattttccttttcgtcgtgatttctcaaaactaactcgaaactccacaaaaccatatagatataatttttaatttgattcaaaacatatcgattcttatccacttcttgttcattgtgtttaattagactatcacgataagctgaatttaactcgggttttattaaaattaaaaattttaaattacttaaaaatataatagtttataataaaaagtttaatcattaaaaatgtaataattataaatacaaaaacgagcgagcgagcgcgtaaaaaaactcgaaaagataatgtaggtactaccctgtacgagaagctttttggatctgatctacgatccactattcactatgatgagcatagtaaaaaatattagatcttcctgccttgtcgagccaggcacgaatagtttcatttaaacgtgtattaaaagtgcaatatagctctatctctgtcacttacatagaatgcccgtaaaatctttctcttttcagccgagccatctaagatttcggcacgatcatcccggccgctgtgagtggcgacggttgtattacactacacagttgccagattttatataatttataaagagaaaagaaatacgcacaaacaaatgaacgggcattaagacggtttaatgataaaaaaatatgtttctgcataaaaataagatagtgccatgactccatggcactacctcaccggccgccactgacttatacaggtagtcttcggtctgcttttctttttttccgggggttgccattccactctcggctttgggagtcgatgtttctccattctttttacattgccactccaacaaagttgtttttcctggatttcttctattatgtttgttttcctattcattgtatatcgtactcgttcattcgttatgtgtgagactctagagatgcaggccgatcttcgccagaagtccatttccagtgcgagcaacttatgttccgttcccttattctccatatatttatatccatatagtaccacactttttaagatgctattatatagctgtgttttcttttcttctgatatggttttttgaccaaagtagtgagttcaaagctcctattattcttccctttcataattctttcctctatttcgaattctgcccttccaatttgttgaattctctttccaacatatacataatcagagctttgttcgataaccatatcatcctctagttgtgactcatttttctctcctcctatactcatatatttggctttaggccccattttttgtattctcgtaacagccggtttgtcataaatattagatcatctttaccctgggc

SEQ ID NO: 405 - DNA, 2478 bp, Diabrotica virgifera
gagcgagcgtgtaaagaaactcgaaaatataatgtactactctgtaccagaatctttttgcatctacgatccactattcactatgatcaaagtaaaaaatattagatcttccttgtcgagccaggcacgaatagtttcatttaaacgtgtattaaaagtgcaatatagctctatctctgtcacttacatagaatgcccgtaaaatctttctcttttcagccgagccatctaagcttttggcacgatgcgatcatcccgtccgctgtctgtgagtggcgagggttgtactacactgcacagttgccagattttatataatttataaagagaaaagaaatacgcacaaaaaatgaacgggcattaaaacggtttaaagataaaaaaaaaatatgtttctgcataaaaataaggtagtgtcatggcactacctcaccggccgccactggcgtatgcagaatatttcaaataaactaaaattccagaatttcgttctgcattatacaaaacttgatttatgtttatataaattataaacatgtaaattttggtgctattaaattaagtgtaaaattattaggcatggtaaagttataaaaaaataaccaaatcttttgtttgttaaaattcttagaagtaacaagttaattaactatttaaagttattaataaacaattagaaggtaaagtgaaataaaaccacttctaattcgatttctatgaaaaaagtcaatatatgtggaaaaatttaaaatttcttcaatactgtttccttggtttttacgctaccaaaatacgtttgatttatcgagtcacatcgaaactatcaatgtattaataaatttgtaatgttcattagtcatttaatattaaaatttttaggattacatgtcattattgcgtaatatagttttgcatttcaaagctagtcctattgaactggattctacttgttaggaaaaaagaaatgattagaaatttcataaatcttttacaattttcaatattccatgaatgtctttttgctgtttcaaaatttcatttaaatcaaatttcaagacaatctatatttgctttatagctgcctttagttattaaatttgtactatattcctgatccgataaaattggtggtagataaagattgatttttaacattattaggtttgggctaagtatctactagtctgggtatgtctagcgttacaatgtataacgtatagtgcgaataacgtgcgcaaaatggcgattttcgctaagagttacctaaggcccgtccggcgaaacgatcggattttctgtattcattcagtggcgtattttcaagaagttagttaatatattattatgtgtctttatgtaaattttagaatggcttctttatttttgattcaaataatggatatgttaaatgatttattagtcgattaaaaatacgctataacctagaccagaggttctcaatctttttgagtcaggtaccaccaaatactttttattatttttggtaccacctaactaaaatacctgtctagctaggtgatctaattaactataattgtgccaatggtggtgctgattttggctgttttgactttgcgtaccacctcaaataatgaaatgtaccaccagtggtacatgtaccagagattgagaaccgctgacctagaccttaagatatataaaattattgttaatttgtccgttaacattttgctatttaataagggccggcgtagctcaggctgtaggatatctgactcgcatgctggtaggccggggttcgaaacccgcgccggcgagaacatctagacatttttaaaaatgtctataggccccaggtcgactcagcctgaataaaattagtactttgggtaaaaccaggggtaataataggcggttgaagcgtagcactgaccctgttacctttcttgtataccgtaggcactagatatagcagactaccctgctataatcccaaagccgctttagcggtataaaacgggagactattataataacagatacagataatagatttttttttaattactgtgatgcatgctgtattctttcagtttcggctcaggaaatattatttgttaacttcctcagaaattgtgtgcagataataagttaatacaatctaaccccaatttttaatatacacaggaatcgacacgtttttttatattatttcataaaaatttttacacacctacttaaaacgagtcttttaatagtgaattagtgatgctgccaaatatttatgaacccaatttatcaaacttaatgttgtacttaggttacatcataatcttaattgtgaacactgactacatatcccttaaatgtaactttatcagtctttccattttttactactgatatacccttgtctatgtcaaaaaatagtataaacttgtgatatatgaaatatagtaattttggattttaatatatttataaatgttcttaaga

SEQ ID NO: 406 - DNA, 2451 bp, Diabrotica virgifera
gagcgagcgtgtaaagaaactcgaaaatataatgtactactctgtaccagaatctttttgcatctacgatccactattcactatgatcaaagtaaaaaatattagatcttccttgtcgagccaggcacgaatagtttcatttaaacgtgtattaaaagtgcaatatagctctatctctgtcacttacatagaatgcccgtaaaatctttctcttttcagccgagccatctaagcttttggcacgatgcgatcatcccgtccgctgtgagtggcgaggattgtactacactgcacagttgccagattttatataatttataaagagaaaagaaatacgcacaaaaaatgaacgggcattaaaacggtttaaagataaaaaatatgtttctgcataaaaattctgcaccggccgccactggcgtatgcagaatatttcgattaaactaaaattccaaaatttcgttctgcattatgcaaaacttgatttatgtttatataaattataaacatgtaaattttggtgctattaaattaagtgtaaaattattaggcatggtaaagttataaaaaaataaccaaatcttttgtttgttaaaattcttagaagtaacaagttaattaactatttaaagttattaataaacaattagaaggtaaagtgaaataaaaccacttctaattcgatttctatgaaaaaagtcaatatatgtggaaaaatttaaaatttcttcaatactgtttccttggtttttacgctaccaaaatacgtttgatttatcgagtcacatcgaaactatcaatgtattaataaatttgtaatgttcattagtcatttaatattaaaatttttaggattacatgtcattattgcgtaatatagttttgcatttcaaagctagtcctattgaactggattctacttgttaggaaaaaagaaatgattagaaatttcataaatcttttacaattttcaatattccatgaatgtctttttgctgtttcaaaatttcatttaaatcaaatttcaagacaatctatatttgctttatagctgcctttagttattaaatttgtactatattcctgatccgataaaattggtggtagataaagattgatttttaacattattaggtttgggctaagtatctactagtctgggtatgtctagcgttacaatgtataacgtatagtgcgaataacgtgcgcaaaatggcgattttcgctaagagttacctaaggcccgtccggcgaaacgatcggattttctgtattcattcagtggcgtattttcaagaagttagttaatatattattatgtgtctttatgtaaattttagaatggcttctttatttttgattcaaataatggatatgttaaatgatttattagtcgattaaaaatacgctataacctagaccagaggttctcaatctttttgagtcaggtaccaccaaatactttttattatttttggtaccacctaactaaaatacctgtctagctaggtgatctaattaactataattgtgccaatggtggtgctgattttggctgttttgactttgcgtaccacctcaaataatgaaatgtaccaccagtggtacatgtaccagagattgagaaccgctgacctagaccttaagatatataaaattattgttaatttgtccgttaacattttgctatttaataagggccggcgtagctcaggctgtaggatatctgactcgcatgctggtaggccggggttcgaaacccgcgccggcgagaacatctagacatttttaaaaatgtctataggccccaggtcgactcagcctgaataaaattagtactttgggtaaaaccaggggtaataataggcggttgaagcgtagcactgaccctgttacctttcttgtataccgtaggcactagatatagcagactaccctgctataatcccaaagccgctttagcggtataaaacgggagactattataataacagatacagataatagatttttttttaattactgtgatgcatgctgtattctttcagtttcggctcaggaaatattatttgttaacttcctcagaaattgtgtgcagataataagttaatacaatctaaccccaatttttaatatacacaggaatcgacacgtttttttatattatttcataaaaatttttacacacctacttaaaacgagtcttttaatagtgaattagtgatgctgccaaatatttatgaacccaatttatcaaacttaatgttgtacttaggttacatcataatcttaattgtgaacactgactacatatcccttaaatgtaactttatcagtctttccattttttactactgatatacccttgtctatgtcaaaaaatagtataaacttgtgatatatgaaatatagtaattttggattttaatatatttataaatgttcttaaga

SEQ ID NO: 407 - DNA, 2336 bp, Diabrotica virgifera
  SmartBlast Evalue=6E-43; Info=27 kDa hemolymph protein n=1 Tax= Harpegnathos saltator RepID=E2C9D0_9HYME
tgctgtcgaggtgtaagtacgtgtagttttacaatttttgttcaggagtgagaagtggaacttttcttttaaatttttgctgtttaatttaatacctagtatcaaaatgaatattattcaacgagctgtgatatttttcatcgtaatagtatgtatccagtgccaatcatcattaaatgacctagatgctgacaaaataaaaagtaaaatagagaaaggtctaggagatttaaacatagacattccagatgtagatttaaattctacgagtatgccaaatgcagaggatatagaaaaagtgcttagagaaaaatgcgagaagaatggagcaactgacgcagtagatttgataaaggaagaacaagaaaacgctcgtatttgcatagaaaaatacgttaattttacaaccatagaagaggaactggaagagaagaaaaagacaggttctatggatgaagtattctcaaaatactgtaagaaatggccagatattaagggatgtttcgataaggccgtttctatttcaagatcgtgtatggataaaaaagaagaagacgcctttaatagaacgctggatattataaacgatttgcaagaatttatgtgttacaaggatggagatagattagccatgtttgttgctgaaggtggcgtcgaatgtatgtcagagagaaaagatggtgtacaagaatgtgtaaataaaacccttggctcaagaatccctgatgcagatgatctttctgttacaaatttaccagttatgctttttacggatagagattgcgatgatttcgaagaagtcagagaatgtgttaaccatgaactagagaagtgcaaggatagtacccccgcaaacatcgtggacgcattcttcaaattcttaaagaaacaactaccttgtaaaggaagtctagcacagaagagcaccaaaccaaattcagcttgggccatatctagcagttcgatacttttggctatttcctttttgtacgtcaggctgtattaaactttttaaatttttacagtgggtgagcggatagttcttacgcatctacagttattatgccataactataattttattacttatcagtagtgagatttaagtttagtaaatatattctgaagcattgagttgtttatatggttgtgagaacttattatctgcacaaagaaagcatttaaacaattaaatttttttatttaaaattgtattaggcaaataggtaacgtgtgatccaaaattattgtcaccataggtggctctgaacgacagagatagctatacagtgcatgtctattcttaattcagatatactttccagtttacgtcaactttgcagtgtacgtcaacttaacaagaaaagttaggttatgtagaaggttggtggtggacatataagcatcttgtttgattttatttattattgttacttataattttgttaatttttttatttttgattaaagttctgtgttaaaggttttgactgattttttatgttttataatgttaatcaaaattaattgataaaccaatgatataaattcagattaaaacaagacatacgtaattttttgcacggctagctttgatcccaataattatggatcgctcgttataatacctatactttacatttaacttatagactatttacttttaaattagatatacacgttataaatgacaacacggtacgaatcgcccgtcgtacaaccgtcgcatatgaacgagacggtccccgctacccaccaagacgatatcagtgtatgttttaattcgcgctgattcattccgtaactcgccgttttacaatgacgacaatgttgccgattttagcgcttccttaaattgggtatatccaatccaaatataaccagtctgtatatacctactttcacggtatcatttgccagattcgtttacaaaaccagctgtaaataagtttgtataaaaaatttcagcctttactaatataaatacagtggtataattaatcaatataataattaacagattaagtatggtgaaatgcttaataattgcagatttagtcattaaaaagtaaatattttcgatttgacaaatacagtagtagtggcagaataaaaatgtatatttgaatgcttttatttattagctattatatttaagaatatcgatagttcgtttgggaaaccatattttcaagagttagacagagctcctatttactttttgctgagaatgtcaatcttaggacctcaaaagatacaaaaaagtctgtcacacctacccccgaacttccccctaaaattcccactcgaggatttactaagaatctgtaggccgt

SEQ ID NO: 408 - DNA, 2258 bp, Diabrotica virgifera
gagcgagcgtgtaaagaaactcgaaaatataatgtactactctgtaccagaatctttttgcatctacgatccactattcactatgatcaaagtaaaaaatattagatcttccttgtcgagccaggcacgaatagtttcatttaaacgtgtattaaaagtgcaatatagctctatctctgtcacttacatagaatgcccgtaaaatctttctcttttcagccgagccatctaagcttttggcacgatgcgatcatcccgtccgctgtctgtgagtggcgagggttgtactacactgcacagttgccagattttatataatttataaagagaaaagaaatacgcacaaaaaatgaacgggcattaaaacggtttaaagataaaaaaaaaatatgtttctgcataaaaataaggtagtgtcatggcactacctcaccggccgccactggcgtatgcagaatatttcaaataaactaaaattccagaatttcgttctgcattatacaaaacttgatttatgtttatataaattataaacatgtaaattttggtgctattaaattaagtgtaaaattattaggcatggtaaagttataaaaaaataaccaaatcttttgtttgttaaaattcttagaagtaacaagttaattaactatttaaagttattaataaacaattagaaggtaaagtgaaataaaaccacttctaattcgatttctatgaaaaaagtcaatatatgtggaaaaatttaaaatttcttcaatactgtttccttggtttttacgctaccaaaatacgtttgatttatcgagtcacatcgaaactatcaatgtattaataaatttgtaatgttcattagtcatttaatattaaaatttttaggattacatgtcattattgcgtaatatagttttgcatttcaaagctagtcctattgaactggattctacttgttaggaaaaaagaaatgattagaaatttcataaatcttttacaattttcaatattccatgaatgtctttttgctgtttcaaaatttcatttaaatcaaatttcaagacaatctatatttgctttatagctgcctttagttattaaatttgtactatattcctgatccgataaaattggtggtagataaagattgatttttaacattattaggtttgggctaagtatctactagtctgggtatgtctagcgttacaatgtataacgtatactgcgaataacgtgcgcaaaatggcgattttcgctaagagttacctaaggcccgtccggcgaaacgatcagattttctgcattcattcagtggcgtattttcaagaagttagttaatatattattatgtgtctttatgtaaattttagaatggcttctttatttttgattcaaataatggatatgttaaataatttattagtcgattaaaaatacgctataacctagaccttaagatatataaaattattgttaatttgtccgttaacattttgctatttaataagggccgccgtagctcaggctgtaggatatctgactcgcatgctggtaggccggggttcgaaacccgcgccggcgagaacatctagacatttttaaaaatgtctataggccccaggtcgactcagcctgaataaaattagtactttgggtaaaaccaggggtaataataggcggttgaagcgtagcactgaccctgttacctttcttgtataccgtaggcactagatatagcagactaccctgctataatcccaaagccgctttagcggtataaaacgggagactattataataacagatacagataatagatttttttttaattactgtgatgcatgctgtattctttcagtttcggctcaggaaatattatttgttaacttcctcagaaattgtgtgcagataataagttaatacaatctaaccccaatttttaatatacacaggaatcgacacgtttttttatattatttcataaaaatttttacacacctacttaaaacgagtcttttaatagtgaattagtgatgctgccaaatatttatgaacccaatttatcaaacttaatgttgtacttaggttacatcataatcttaattgtgaacactgactacatatcccttaaatgtaactttatcagtctttccattttttactactgatatacccttgtctatgtcaaaaaatagtataaacttgtgatatatgaaatatagtaattttggattttaatatatttataaatgttcttaaga

SEQ ID NO: 409 - DNA, 2231 bp, Diabrotica virgifera
gagcgagcgtgtaaagaaactcgaaaatataatgtactactctgtaccagaatctttttgcatctacgatccactattcactatgatcaaagtaaaaaatattagatcttccttgtcgagccaggcacgaatagtttcatttaaacgtgtattaaaagtgcaatatagctctatctctgtcacttacatagaatgcccgtaaaatctttctcttttcagccgagccatctaagcttttggcacgatgcgatcatcccgtccgctgtgagtggcgaggattgtactacactgcacagttgccagattttatataatttataaagagaaaagaaatacgcacaaaaaatgaacgggcattaaaacggtttaaagataaaaaatatgtttctgcataaaaattctgcaccggccgccactggcgtatgcagaatatttcgattaaactaaaattccaaaatttcgttctgcattatgcaaaacttgatttatgtttatataaattataaacatgtaaattttggtgctattaaattaagtgtaaaattattaggcatggtaaagttataaaaaaataaccaaatcttttgtttgttaaaattcttagaagtaacaagttaattaactatttaaagttattaataaacaattagaaggtaaagtgaaataaaaccacttctaattcgatttctatgaaaaaagtcaatatatgtggaaaaatttaaaatttcttcaatactgtttccttggtttttacgctaccaaaatacgtttgatttatcgagtcacatcgaaactatcaatgtattaataaatttgtaatgttcattagtcatttaatattaaaatttttaggattacatgtcattattgcgtaatatagttttgcatttcaaagctagtcctattgaactggattctacttgttaggaaaaaagaaatgattagaaatttcataaatcttttacaattttcaatattccatgaatgtctttttgctgtttcaaaatttcatttaaatcaaatttcaagacaatctatatttgctttatagctgcctttagttattaaatttgtactatattcctgatccgataaaattggtggtagataaagattgatttttaacattattaggtttgggctaagtatctactagtctgggtatgtctagcgttacaatgtataacgtatactgcgaataacgtgcgcaaaatggcgattttcgctaagagttacctaaggcccgtccggcgaaacgatcagattttctgcattcattcagtggcgtattttcaagaagttagttaatatattattatgtgtctttatgtaaattttagaatggcttctttatttttgattcaaataatggatatgttaaataatttattagtcgattaaaaatacgctataacctagaccttaagatatataaaattattgttaatttgtccgttaacattttgctatttaataagggccgccgtagctcaggctgtaggatatctgactcgcatgctggtaggccggggttcgaaacccgcgccggcgagaacatctagacatttttaaaaatgtctataggccccaggtcgactcagcctgaataaaattagtactttgggtaaaaccaggggtaataataggcggttgaagcgtagcactgaccctgttacctttcttgtataccgtaggcactagatatagcagactaccctgctataatcccaaagccgctttagcggtataaaacgggagactattataataacagatacagataatagatttttttttaattactgtgatgcatgctgtattctttcagtttcggctcaggaaatattatttgttaacttcctcagaaattgtgtgcagataataagttaatacaatctaaccccaatttttaatatacacaggaatcgacacgtttttttatattatttcataaaaatttttacacacctacttaaaacgagtcttttaatagtgaattagtgatgctgccaaatatttatgaacccaatttatcaaacttaatgttgtacttaggttacatcataatcttaattgtgaacactgactacatatcccttaaatgtaactttatcagtctttccattttttactactgatatacccttgtctatgtcaaaaaatagtataaacttgtgatatatgaaatatagtaattttggattttaatatatttataaatgttcttaaga

SEQ ID NO: 410 - DNA, 1987 bp, Diabrotica virgifera
gcctgttatgtacgaatcatgacattcctgtctgatacagttagtcattattattatttcctggcgtataatattatagtttcttagtattttgtgtacatataagatatggcccgcaaatatcttactgaggccgagttacaggaaataattgttactgctagcgatttttatgatgatatagaagatgaaatagtatcagaaaacgataatgtattgttagatgaagatttaaatgctgaaaacattcattccaggtcatttttgacctggggtaattttttacccccgttggtcatccgtgtaacaaaaaaggttggtcatcggaaggttaaagcaatctcaagcttcaaccacagaatttagcggtgcaaaggcttgttacgatttttttttctcaccgagttaaataaaaataaatgactgttccattaacattaactgttccattaactgttttgttgcatgtataagcacatcaatattttcaaaatatgaatgaaaatgttcatcatcacgccaaaattttcttccaagatactgtgatgccattatattgttatttttggttttcgccaactacttatatgatttccaattaaagctggagaaggttttggtcaaatgtagcttgacaattattttataaattgcggatatcatcacattattttaaggtatccaacgatagctttatcgcattttgtattcatttttgaattatacaaaaacacattttgactaaaagcttcacgtctttttttgattacatttttgataatcttccacgtgcagaccaaagacaaacgaaaaagaaaattctcgtaaaagaatcaaatataagtacactttttggagtatatgtattataatttataactaattcactaatcaactattgtccttttcatgatcatttttcagtgcgtaacaaatgatatgaaaaagggtaagtccgtgataatacacatttatgacatttattctaacatgacattttagttaaatctgacagttgtcacattttattttcaatttggaataaaaacaaatcaaatgtgtttcttgcatttataaaatggtattttctttgatttgtatagtcttataaattatacagattatatttgtaatattattatctaattaaaaaaaatatttttttattatggcgccatctatcgacaactagaataactagaataaatgttataaaaatgtccccgacgaaatgtaatcaccgacgtgcctttttttctgtcacatacaatttaatgcgttagaaagaaatcgaaaaactgtgacgcactgaaagatgatcatgagaaatactgtacatacttattttttactatagctacatttttgcgataccagttgaagagaacgtgactagaaatatattcttgtatgactactttgaacaaaagctacaactttgcttgtagtttgattcctgtgaattttttctcgaacggatacatttttgaacattttttttaagattcaattttttttaataccaaaggcaatcaaaccgttattttatcagttgttcctaacgaagcttccagcaatattgttttgaacattttactttttcattaccgtcaaacgcatgtttcggttattttggtacgctgtatgtttgaagctttaaaataaaatataatgacgtagcgtttataagctgtaccattcgtgtaattttatttgaattacatttttactatatagaatgttttgctgttatctgtgcaggatttaataagtctacgtttgttgaacaattttgttcgtttaaattacacacttttgtttcaaataggcattaatggtatttcgaaagacaattagaacggaaaccttggtgatattatcgaggtgaatacatttttgatgatagtgtgtagtataaacattttgtaattattaattttgattttggttcagtcatgataagttcgaagatttattttatcttacc

SEQ ID NO: 411 - DNA, 1902 bp, Diabrotica virgifera
  SmartBlast Evalue=5E-43; Info=27 kDa hemolymph protein n=1 Tax= Harpegnathos saltator RepID=E2C9D0_9HYME
tgctgtcgaggtgtaagtacgtgtagttttacaatttttgttcaggagtgagaagtggaacttttcttttaaatttttgctgtttaatttaatacctagtatcaaaatgaatattattcaacgagctgtgatatttttcatcgtaatagtatgtatccagtgccaatcatcattaaatgacctagatgctgacaaaataaaaagtaaaatagagaaaggtctaggagatttaaacatagacattccagatgtagatttaaattctacgagtatgccaaatgcagaggatatagaaaaagtgcttagagaaaaatgcgagaagaatggagcaactgacgcagtagatttgataaaggaagaacaagaaaacgctcgtatttgcatagaaaaatacgttaattttacaaccatagaagaggaactggaagagaagaaaaagacaggttctatggatgaagtattctcaaaatactgtaagaaatggccagatattaagggatgtttcgataaggccgtttctatttcaagatcgtgtatggataaaaaagaagaagacgcctttaatagaacgctggatattataaacgatttgcaagaatttatgtgttacaaggatggagatagattagccatgtttgttgctgaaggtggcgtcgaatgtatgtcagagagaaaagatggtgtacaagaatgtgtaaataaaacccttggctcaagaatccctgatgcagatgatctttctgttacaaatttaccagttatgctttttacggatagagattgcgatgatttcgaagaagtcagagaatgtgttaaccatgaactagagaagtgcaaggatagtacccccgcaaacatcgtggacgcattcttcaaattcttaaagaaacaactaccttgtaaaggaagtctagcacagaagagcaccaaaccaaattcagcttgggccatatctagcagttcgatacttttggctatttcctttttgtacgtcaggctgtattaaactttttaaatttttacagtgggtgagcggatagttcttacgcatctacagttattatgccataactataattttattacttatcagtagtgagatttaagtttagtaaatatattctgaagcattgagttgtttatatggttgtgagaacttattatctgcacaaagaaagcatttaaacaattaaatttttttatttaaaattgtattaggcaaataggtaacgtgtgatccaaaattattgtcaccataggtggctctgaacgacagagatagctatacagtgcatgtctattcttaattcagatatactttccagtttacgtcaactttgcagtgtacgtcaacttaacaagaaaagttaggttatgtagaaggttggtggtggacatataagcatcttgtttgattttatttattattgttacttataattttgttaatttttttatttttgattaaagttctgtgttaaaggttttgactgattttttatgttttataatgttaatcaaaattaattgataaaccaatgatataaattcagattaaaacaagacatacgtaattttttgcacggctagctttggtcccaataattgtggatcgctcgttatcatgtgtcacataacattaatatatctacgtcatatacattattggtatatataaatgacacaaaccaaagacgtatgactaagatatattaatattatgtgacccatgacagacgctcgaaacaaatgacaatcgatgaaaagccctattaatacattttgattcttaaagcatttttgagtacatattgttgttttgactgcattattgtaaacatattggtgagaaataagctccatatcaaggacaaaataaatacgtataaacacattaaaaaa

SEQ ID NO: 412 - DNA, 7828 bp, Diabrotica virgifera
  SmartBlast Evalue=4E-61; Info=Ubiquitin-conjugating enzyme E2 variant 2 n=4 Tax=Apocrita RepID=E2AGB3_9HYME
aagtgttaactctatctctattctggaaagaattagtcctcacatcttttgtatttaagttgagggaaaaaggtgatttttgatatccaaagagccccgctttgttaatcaatagtaggggataagatttcaatcatccataatattcgaaaatattcaaaatacacttttaaaaattttaagtttgtgagtattttgtaatggcgaccccatcaactggtgttgttgtgcctcgaaactttcgactacttgaagaactagaagccggtcaaaagggtgtttcagatggtactattagctggggcttagaaaatgatgatgatatgacacttacacattggatggggatgataatcgggccccctcgtacaccgtatgaaaataggatgtattctgttaaaattgaatgtggccaaaggtatcctgatgatgcacctactgcaaagtttatctctagaatcaatataaactgtataaacagtaacacaggggtggtcgataacagacaagtcccaatattggctaggtggcaaagggattacactattaaaacggttttgcaagaattacgaagaataatgacacttaaagagaacatgaagctaacacagcctcctgaaggcacttgcttctagcctttgaatcagcataacactcccccagtatcttctgttacaacttgtccattgagtgtcgatacctgcaccacgcaatcatgctgtcttctgtagcggattcaccttactcacaaactatctatggggtgtcttgaactggttcttggaagataacctgtctggtaatgaggacaaactggtgtatttaggttaaggtgtctaatgataagagtattttttaatattactgcttgtacaacttgtttaactctattagaggatgactcatgatcgaacttgtatttttgtaggaaacaaaaagtaatgttgatgtcaattataataaaccatctatgacgcatctcgtatttcaataaaattgaatgaataggcgtttgacacaatattgttcttgtataacccaaagttttaagaatgggtggtcacgattcattcgatatactagatttttgggttgattaaccacttatttgtttttgtatattctactgggcagtagttgacaatttatcggaactgtatttttaaacttttactagtattcactcactttgtgtacgtttttataccaaagatgaaattgtcaactgctgtggtatgaaaaaaatcaatttatgcttaaatacatgttacgctttattatggagaatcagcttcgaaaatctaaaattctaaaagacatttattgaataactacaaggttgtattgatatttagacattttttgaatgtcgtgtgtgtttataaagaagttatcctttattttgtagtagtttcggacaccccttttaacagtcagagagtagatatctatttgtatatcattgattacatatatcataaacattatctaaatcattattttttttgaaaacacagaaattaaaagtaaaggtagaatacaccattttaaaatttgacaatgttatctcaatacattattacattctcaatattcacacacacgcttcactagcactcataggtatttagcatctccttgtttgctgtcataccttggttttacatttaaaacttatatgagaaaagtgatacttagatgagactttactttataagtttaacttttttctttaaagtcttgagtctgatgaaagaatgagtagagatctacactctgatgacccaagttgtaacaaagatggctaaggtgtacagctttataagctatgtagttaagttaacattttagctaaagttattaggttgaaataagtttatatacagtaccagagcatatattccatatatagcagcttatagaaaggtaggaggaactgctaaaaactttgtttgccttaccaatagttttaataatcgagttttaagtcgagatattcacgcaggtggtctaaaatgcccaaatgttatttattatagagtaagcgccactctactagatacattggtaggtacctagttggtatgattattggctaatctggtccgttctcagatgtgactttcatccctgtcatgttactgtcatgaaactattcaaaataattgtttttccatacaaaagaatacattaattaatagtattgttactctgctttaaaataactttattcaagcaccaagcaatattacaatactttaaaactattacaactttaacaaaatgacaactataaacgtcaaacacagctgatctattatttgtcaactttttatgttaatatagggcattccaacatgctgtcaaaagtcaatatgacgactgggaggcaaacataaatgttattctatcagttcttaatttgttttagataattttagttgcgtttctttgtaattttgtttttaaaagaattgatttgacattctcactagaagaattaatctaaaaagataatatgcctaatttctgttgtgttttgaaatgtggaatacgaaattcatgatgaagttcagttttatcggttactatcagtggtatattttaagcgtaaacacgtgtaaaacaactaaataagttatcatctgagagacaaaaacaaacaactaaataagttatgatctgggagacaaaaacaatggttaaatgctacaaaacgtcctataaaatgctaaataattatttccatgttacttacgcttggaaaacgtctaaaccatgtgttctcaaacccctcgaggaaaagtggacctatattatttattttgtcaatcttttgcttgtacctaccactgtgcgtctaggtacctactaacaacattatgtattgtctaccaagaatttatatgcactcatgtttatttattcactgcttaaaaccaaataaagtcgttcaggtacttctacaactaaaaactacacaaaatctacaacaaaatgttcagaaaatacaacttaaaactgttaatacatgtgctgcaaatattataaacagacacaatgtttgacagtttgcctcccaaacgtcagtcttgaaatgccctattcagtttctatacattttctgacgttctaaacgtcactggacatacaaataaacattgcaacaagtgaagggtccaggactataatagctcaatgttcctatggatctagtagggtggcggtggttactgtatagcaatattacagtatttctcatgatcatttttcagtgcgtaacaaatgataggaaaaagggtaagtccgtgataatacacatttatgacatttattctaacatgacattttagttaaatctgacagttgtcacattttattttcaatttggaataaaaacaaatcaaaagtgtttcttgcatttataaaatggtattttctttgatttgtatagtcttataaattatacagattatatttgtaatattattatctaatttaaaaaaaaatttttattatggcgccatctatcgacaactagaataactagaataaatgttataaaaatgtcaccgacgaaatgtaatcaccgacgtgcctttttttctgtcacatacaatttaatgcgttagaaagaaatcgaaaaactgtgacgcactgaaagatgatcatgagaaatactgtataatctgaatttacataatatatcgtattcctaaagtcgaaaatgtaatttttcgactttgggatcggttatttcgaatttggtttgagatatcaaactcgcaagatgatattccttcttcttcttaaagtgcccatccgttctggatgttggcgatcatcatggctatcttgactttgtttaccacagcgcgaaatagttcagcggtagtcgtgttataccactttcgtaaattttgaagccaggaaatgcgtcttcttcccggtcctcttttaccatccgttggagaaggccgtagcatttctcattacatgtcctagatattctaattttttcgttatgatggtcatgagaatttcacactctttccccattctacgcagtacttctacattagtaattcggtcaacccaggatatacgtaagatgcgcctataacaccacatttcgaaagcttcggaccgattcatagatgcaacagttagtgtccacgcttccattccgtagagcagaactgtaaatatgtatcatttcaacagacggtattttgtttttaatgatatgtctagactctagactattgaaaaagggtctcattccaacgaatgctgcttttgcttttattattcactgtttaatttctgttgagtgggtccattggctatttaaattggtgcctagatatgtatattgctccactctttcaatattctgttgtttgattgtaagttgagtgtttagtatgattttcctaaactaggtaaaaaacacattgatttgatacctatatcatatgccataaatcaaaaattcgattttttgactttgaggtcggttgatatcgaaatggtttttaaatttggattcaggagacaaactgcataagaatccatcgtagatcgactcacaagtatttcaggggcggcgatgtacaaacgaacgaatcaacgaacagactttgcgaatttatatacgaaaacgaagttttcgttgaaaataaatgaattcatcgattaagctgtccttagtagcaaagtaatgtaaagcatgtagtgctatcaaacgctgtattgcgtatgccagtggcggctcgtatcactttaagtaggtagtgccagaattcgggcagctgcctaaatttttagtgacgggttcacaatattgtcaaaaaaggtataaaatagaaattaaaaaaaataggtacggatatttttacattatgtaggtatataccatttctggggtgtcaagaaatttaaacatttaaaatgcattcagtgattgatttgacatcatgtccgtccaacaagtaaaatctccaaaatctctcaacttatcgccctttacacaaatatcggaaaactataactaactgaaattcaccagcgacgcgacgtctgtcgtttcatcggcaatcactgcaacacaaagataattttcaatttctttccttatttcctcgtgataaacatctaagatgcactgaaggagttcattttgtgttgttttgaggtacatgcttttaaagatttggaactttgaatatgaaccgaagtcgttgtctaattcggctaacattgaacagttccataaagatgcctctattttctgaattttccttttcgtcgtgatttctcaaaactaactcgaaactccacaaaaccatatagatataatttttaatttgattcaaaacatatcgattcttatccacttcttgttcattgtgtttaattagactatcacgataagctgaatttaactcgggttttattaaaattaaaaattttaaattacttaaaaatataatagtttataataaaaagtttaatcattaaaaatgtaataattataaatacaaaaacgagcgagcgagcgcgtaaaaaaactcgaaaagataatgtaggtactaccctgtacgagaagctttttggatctgatctacgatccactattcactatgatgagcatagtaaaaaatattagatcttcctgccttgtcgagccaggcacgaatagtttcatttaaacgtgtattaaaagtgcaatatagctctatctctgtcacttacatagaatgcccgtaaaatctttctcttttcagccgagccatctaagcttttggcacgatgcgatcatcccgtccgctgtctgtgagtggcgagggttgtactacactgcacagttgccagattttatataatttataaagagaaaagaaatacgcacaaaaaatgaacgggcattaaaacggtttaaagataaaaaaaaaatatgtttctgcataaaaataaggtagtgtcatggcactacctcaccggccgccactggcgtatgcagaatatttcaaataaactaaaattccagaatttcgttctgcattatacaaaacttgatttatgtttatataaattataaacatgtaaattttggtgctattaaattaagtgtaaaattattaggcatggtaaagttataaaaaaataaccaaatcttttgtttgttaaaattcttagaagtaacaagttaattaactatttaaagttattaataaacaattagaaggtaaagtgaaataaaaccacttctaattcgatttctatgaaaaaagtcaatatatgtggaaaaatttaaaatttcttcaatactgtttccttggtttttacgctaccaaaatacgtttgatttatcgagtcacatcgaaactatcaatgtattaataaatttgtaatgttcattagtcatttaatattaaaatttttaggattacatgtcattattgcgtaatatagttttgcatttcaaagctagtcctattgaactggattctacttgttaggaaaaaagaaatgattagaaatttcataaatcttttacaattttcaatattccatgaatgtctttttgctgtttcaaaatttcatttaaatcaaatttcaagacaatctatatttgctttatagctgcctttagttattaaatttgtactatattcctgatccgataaaattggtggtagataaagattgatttttaacattattaggtttgggctaagtatctactagtctgggtatgtctagcgttacaatgtataacgtatactgcgaataacgtgcgcaaaatggcgattttcgctaagagttacctaaggcccgtccggcgaaacgatcagattttctgcattcattcagtggcgtattttcaagaagttagttaatatattattatgtgtctttatgtaaattttagaatggcttctttatttttgattcaaataatggatatgttaaataatttattagtcgattaaaaatacgctataacctagaccttaagatatataaaattattgttaatttgtccgttaacattttgctatttaataagggccgccgtagctcaggctgtaggatatctgactcgcatgctggtaggccggggttcgaaacccgcgccggcgagaacatctagacatttttaaaaatgtctataggccccaggtcgactcagcctgaataaaattagtactttgggtaaaaccaggggtaataataggcggttgaagcgtagcactgaccctgttacctttcttgtataccgtaggcactagatatagcagactaccctgctataatcccaaagccgctttagcggtataaaacgggagactattataataacagatacagataatagatttttttttaattactgtgatgcatgctgtattctttcagtttcggctcaggaaatattatttgttaacttcctcagaaattgtgtgcagataataagttaatacaatctaaccccaatttttaatatacacaggaatcgacacgtttttttatattatttcataaaaatttttacacacctacttaaaacgagtcttttaatagtgaattagtgatgctgccaaatatttatgaacccaatttatcaaacttaatgttgtacttaggttacatcataatcttaattgtgaacactgactacatatcccttaaatgtaactttatcagtctttccattttttactactgatatacccttgtctatgtcaaaaaatagtataaacttgtgatatatgaaatatagtaattttggattttaatatatttataaatgttcttaaga

SEQ ID NO: 413 - DNA, 1924 bp, Diabrotica virgifera
  SmartBlast Evalue=5E-43; Info=27 kDa hemolymph protein n=1 Tax= Harpegnathos saltator RepID=E2C9D0_9HYME
tgctgtcgaggtgtaagtacgtgtagttttacaatttttgttcaggagtgagaagtggaacttttcttttaaatttttgctgtttaatttaatacctagtatcaaaatgaatattattcaacgagctgtgatatttttcatcgtaatagtatgtatccagtgccaatcatcattaaatgacctagatgctgacaaaataaaaagtaaaatagagaaaggtctaggagatttaaacatagacattccagatgtagatttaaattctacgagtatgccaaatgcagaggatatagaaaaagtgcttagagaaaaatgcgagaagaatggagcaactgacgcagtagatttgataaaggaagaacaagaaaacgctcgtatttgcatagaaaaatacgttaattttacaaccatagaagaggaactggaagagaagaaaaagacaggttctatggatgaagtattctcaaaatactgtaagaaatggccagatattaagggatgtttcgataaggccgtttctatttcaagatcgtgtatggataaaaaagaagaagacgcctttaatagaacgctggatattataaacgatttgcaagaatttatgtgttacaaggatggagatagattagccatgtttgttgctgaaggtggcgtcgaatgtatgtcagagagaaaagatggtgtacaagaatgtgtaaataaaacccttggctcaagaatccctgatgcagatgatctttctgttacaaatttaccagttatgctttttacggatagagattgcgatgatttcgaagaagtcagagaatgtgttaaccatgaactagagaagtgcaaggatagtacccccgcaaacatcgtggacgcattcttcaaattcttaaagaaacaactaccttgtaaaggaagtctagcacagaagagcaccaaaccaaattcagcttgggccatatctagcagttcgatacttttggctatttcctttttgtacgtcaggctgtattaaactttttaaatttttacagtgggtgagcggataattcttacgcatctacagttactatgccataactataattttttatcagtagtgagatttacgtttagtaaatatattctgaagcattgagttctttatatatagttgtgagaacttattatctgcacaaagaaaacatttaaacaattaaattttttatttaagattgaaattaggcaaataggtatatcaaacctataacaaagtgaaaggattaaatccaaaaacaagctgagaatacgagcattatcataacggaaattttgtttacggttagcaaaaatcatctctatattactatatttaaatgcaatatatgtctaacctgaatttacataatatatcgtattcctaaagtcgaaaatgtaatttttcgactttgggattggttatttcgaatttggttcgagatatcgaattcgcaagatgatattccttcttcttcttaaagtgcctatccgttctggatgttggcgatcatcatggctatcttgactctgtttaccagagcgcggaatagttcagcggtattcgtgttataccactttcgtaaattttgaagctaggaaatgcgtcttcttcccggtcctcttttaccatctgttggagaaggtcgtagcattcttgatttctcattacatgtcctagatattctaattttttcgttatgatggtcatgagaatttcacactctttccccattttacgcagtacttttcgaaagcttcgagccgattcatagatacaacagttagtgtccacgcttccatgttttaatgatatgtctcgactgttgaaaatgggtctcattctaacgtatgctgctttcgcttttattattcgctgtttaatttctgtcgagtggtcctattggctatttaaatt

SEQ ID NO: 414 - DNA, 1838 bp, Diabrotica virgifera
  SmartBlast Evalue=5E-43; Info=27 kDa hemolymph protein n=1 Tax= Harpegnathos saltator RepID=E2C9D0_9HYME
tgctgtcgaggtgtaagtacgtgtagttttacaatttttgttcaggagtgagaagtggaacttttcttttaaatttttgctgtttaatttaatacctagtatcaaaatgaatattattcaacgagctgtgatatttttcatcgtaatagtatgtatccagtgccaatcatcattaaatgacctagatgctgacaaaataaaaagtaaaatagagaaaggtctaggagatttaaacatagacattccagatgtagatttaaattctacgagtatgccaaatgcagaggatatagaaaaagtgcttagagaaaaatgcgagaagaatggagcaactgacgcagtagatttgataaaggaagaacaagaaaacgctcgtatttgcatagaaaaatacgttaattttacaaccatagaagaggaactggaagagaagaaaaagacaggttctatggatgaagtattctcaaaatactgtaagaaatggccagatattaagggatgtttcgataaggccgtttctatttcaagatcgtgtatggataaaaaagaagaagacgcctttaatagaacgctggatattataaacgatttgcaagaatttatgtgttacaaggatggagatagattagccatgtttgttgctgaaggtggcgtcgaatgtatgtcagagagaaaagatggtgtacaagaatgtgtaaataaaacccttggctcaagaatccctgatgcagatgatctttctgttacaaatttaccagttatgctttttacggatagagattgcgatgatttcgaagaagtcagagaatgtgttaaccatgaactagagaagtgcaaggatagtacccccgcaaacatcgtggacgcattcttcaaattcttaaagaaacaactaccttgtaaaggaagtctagcacagaagagcaccaaaccaaattcagcttgggccatatctagcagttcgatacttttggctatttcctttttgtacgtcaggctgtattaaactttttaaatttttacagtgggtgagcggatagttcttacgcatctacagttattatgccataactataattttattacttatcagtagtgagatttaagtttagtaaatatattctgaagcattgagttgtttatatggttgtgagaacttattatctgcacaaagaaagcatttaaacaattaaatttttttatttaaaattgtattaggcaaataggtaacgtgtgatccaaaattattgtcaccataggtggctctgaacgacagagatagctatacagtgcatgtctattcttaattcagatatactttccagtttacgtcaactttgcagtgtacgtcaacttaacaagaaaattaaggttatgtagagagatcttgtttgattttatttattattattacttataattttgttaattctttttatttttgattaaagttctggttttgactgattttttatgttttataacgttaatcaaaattaattgataaaccaatgatataaattcagattaaaacaagacatacgtaattttttgcatggctagctttgatcccaataattgtggatcgctcgttatatcaaacctataacaaagtgaaaggattaaatccaaaaacaagctgagaatacgagcattatcataacgaaaattttgtttacggttagcaaaaatcatctctatattactatatttaaatgaaatatatgtacagtatttctcatgatcatttttcagtgcgtaacaaatgataggaaaaagggtaagtccgtgataatacacatttatgacatttattctaacatgacattttagttaaa

SEQ ID NO: 415 - DNA, 1716 bp, Diabrotica virgifera
gcaaatctagtattttgttgatttatggtatacagccagctacaggaagtttattttccttttcgattttgattttattacctccaaagctagaacgaaaagagtttgatctggaattgagcatggagtatactggagtattctggagaatttttttgcaggatctgtcaattatcgtttctttagcacctttctggatgttggcgatcagcatggctatcctaacttcgcttgctgctattcgcaatagtccagttgtcgatgtattgaaccactttcgcaggttttgaagcctagatatcgtagaatatttgtagatataacgtagaaaatacatagcttctgaaaagagacttcatcattatgaactctgatctcgcttttcctatgtgttgttttatttcatttgtgtggtcccactggctgtttatgttagtaccaaggaatgtgtaactgtccaccctgtcaattggttgttggttaaccaaaaactgtgtatttaatatttcgcgcttactgactaccatgtactttgtttttttttcgtattgagatcaactccgtgttctttacttatttatatctgatatgcgcgacattattctttactgtgacaatatacagtgtattgtccttttcatgacatttttcagtgcgtaacaaatgataggaaaaagggtaagtccgtgataatacacatttatgacatttattctaacatgacattttagttaaatctgacagttgtcacattttattttcaatttggaataaaaacaaatcaaatgtgtttcttgcatttataaaatggtattttctttgatttgtatagtcttataaattatacagattatatttgtaatattattatctaattaaaaaaaatatttttttattatggcgccatctatcgacaactagaataactagaataaatgttataaaaatgtccccgacgaaatgtaatcaccgacgtgcctttttttctgtcacatacaatttaatgcgttagaaagaaatcgaaaaactgtgacgcactgaaagatgatcatgagaaatactgtacatacttattttttactatagctacatttttgcgataccagttgaagagaacgtgactagaaatatattcttgtatgactactttgaacaaaagctacaactttgcttgtagtttgattcctgtgaattttttctcgaacggatacatttttgaacattttttttaagattcaattttttttaataccaaaggcaatcaaaccgttattttatcagttgttcctaacgaagcttccagcaatattgttttgaacattttactttttcattaccgtcaaacgcatgtttcggttattttggtacgctgtatgtttgaagctttaaaataaaatataatgacgtagcgtttataagctgtaccattcgtgtaattttatttgaattacatttttactatatagaatgttttgctgttatctgtgcaggatttaataagtctacgtttgttgaacaattttgttcgtttaaattacacacttttgtttcaaataggcattaatggtatttcgaaagacaattagaacggaaaccttggtgatattatcgaggtgaatacatttttgatgatagtgtgtagtataaacattttgtaattattaattttgattttggttcagtcatgataagttcgaagatttattttatcttacc

SEQ ID NO: 416 - DNA, 1440 bp, Diabrotica virgifera
gcctgttatgtacgaatcatgacattcctgtctgatacagttagtcattattattatttcctggcgtataatattatagtttcttagtattttgtgtacatataagatatggcccgcaaatatcttactgaggccgagttacaggaaataattgttactgctagcgatttttatgatgatatagaagatgaaatagtatcagaaaacgataatgtattgttagatgaagatttaaatgctgaaaacattcattccaggtcatttttgacctggggtaattttttacccccgttggtcatccgtgtaacaaaaaaggttggtcatcggaaggttaaagcaatctcaagcttcaaccacagaatttagcggtgcaaaggcttgttacgatttttttttctcaccgagttaaataaaaataaatgactgttccattaacattaactgttccattaactgttttgttgcatgtataagcacatcaatattttcaaaatatgaatgaaaatgttcatcatcacgccaaaattttcttccaagatactgtgatgccattatattgttatttttggttttcgccaactacttatatgatttccaattaaagctggagaaggttttggtcaaatgtagcttgacaattattttataaattgcggatatcatcacattattttaaggtatccaacgatagctttatcgcattttgtattcatttttgaattatacaaaaacacattttgactaaaagcttcacgtctttttttgattacatttttgataatcttccacgtgcagaccaaagacaaacgaaaaagaaaattctcgtaaaagaatcaaatataagtacactttttggagtatatgtattataatttataactaattcactaatcaactattgtccttttcatgatcatttttcagtgcgtaacaaatgatatgaaaaagggtaagtccgtgataatacacatttatgacatttattctaacatgacattttagttaaatctgacagttgtcacattttattttcaatttggaataaaaacaaatcaaatgtgtttcttgcatttataaaatggtattttctttgatttgtatagtcttataaattatacagattatatttgtaatattattatctaattaaaaaaaatatttttttattatggcgccatctatcgacaactagaataatcaccgaactagaataattaccaaagtaatcaccgacgtgcctttttttctgtcacatacaatttaatgcgttagaatgaaatcgaaaaactgtgacgcgctgaaagatgatcatgagaaaaaagaataatataattggccaatataattaaaaagtgcgaataaaagttgcagagcgtagaaaccaggtgtcgctttgccgaacttgcacggtcctaataccttcaaataaccccatgaaaa

SEQ ID NO: 417 - DNA, 1325 bp, Diabrotica virgifera
gcctgttatgtacgaatcatgacattcctgtctgatacagttagtcattattattatttcctggcgtataatattatagtttcttagtattttgtgtacatataagatatggcccgcaaatatcttactgaggccgagttacaggaaataattgttactgctagcgatttttatgatgatatagaagatgaaatagtatcagaaaacgataatgtattgttagatgaagatttaaatgctgaaaacattcattccaggtcatttttgacctggggtaattttttacccccgttggtcatccgtgtaacaaaaaaggttggtcatcggaaggttaaagcaatctcaagcttcaaccacagaatttagcggtgcaaaggcttgttacgatttttttttctcaccgagttaaataaaaataaatgactgttccattaacattaactgttccattaactgttttgttgcatgtataagcacatcaatattttcaaaatatgaatgaaaatgttcatcatcacgccaaaattttcttccaagatactgtgatgccattatattgttatttttggttttcgccaactacttatatgatttccaattaaagctggagaaggttttggtcaaatgtagcttgacaattattttataaattgcggatatcatcacattattttaaggtatccaacgatagctttatcgcattttgtattcatttttgaattatacaaaaacacattttgactaaaagcttcacgtctttttttgattacatttttgataatcttccacgtgcagaccaaagacaaacgaaaaagaaaattctcgtaaaagaatcaaatataagtacactttttggagtatatgtattataatttataactaattcactaatcaactattgtccttttcatgatcatttttcagtgcgtaacaaatgatatgaaaaagggtaagtccgtgataatacacatttatgacatttattctaacatgacattttagttaaatctgacagttgtcacattttattttcaatttggaataaaaacaaatcaaatgtgtttcttgcatttataaaatggtattttctttgatttgtatagtcttataaattatacagattatatttgtaatattattatctaattaaaaaaaatatttttttattatggcgccatctatcgacaactagaataactagaataaatgttgtaaatgtctgtaatcacggacgtgcctttttttctgtcacatacaatttaatgcgttagaaagaaatcgaaaaactgtgacgcactgaaagatgatcatgagaaaaagaatac

SEQ ID NO: 418 - DNA, 1169 bp, Diabrotica virgifera
gcaaatctagtattttgttgatttatggtatacagccagctacaggaagtttattttccttttcgattttgattttattacctccaaagctagaacgaaaagagtttgatctggaattgagcatggagtatactggagtattctggagaatttttttgcaggatctgtcaattatcgtttctttagcacctttctggatgttggcgatcagcatggctatcctaacttcgcttgctgctattcgcaatagtccagttgtcgatgtattgaaccactttcgcaggttttgaagcctagatatcgtagaatatttgtagatataacgtagaaaatacatagcttctgaaaagagacttcatcattatgaactctgatctcgcttttcctatgtgttgttttatttcatttgtgtggtcccactggctgtttatgttagtaccaaggaatgtgtaactgtccaccctgtcaattggttgttggttaaccaaaaactgtgtatttaatatttcgcgcttactgactaccatgtactttgtttttttttcgtattgagatcaactccgtgttctttacttatttatatctgatatgcgcgacattattctttactgtgacaatatacagtgtattgtccttttcatgacatttttcagtgcgtaacaaatgataggaaaaagggtaagtccgtgataatacacatttatgacatttattctaacatgacattttagttaaatctgacagttgtcacattttattttcaatttggaataaaaacaaatcaaatgtgtttcttgcatttataaaatggtattttctttgatttgtatagtcttataaattatacagattatatttgtaatattattatctaattaaaaaaaatatttttttattatggcgccatctatcgacaactagaataatcaccgaactagaataattaccaaagtaatcaccgacgtgcctttttttctgtcacatacaatttaatgcgttagaatgaaatcgaaaaactgtgacgcgctgaaagatgatcatgagaaaaaagaataatataattggccaatataattaaaaagtgcgaataaaagttgcagagcgtagaaaccaggtgtcgctttgccgaacttgcacggtcctaataccttcaaataaccccatgaaaa

SEQ ID NO: 419 - DNA, 1090 bp, Diabrotica virgifera
tattgtccttttcatgacatttttcagtgcgtaacaaatgataggaaaaagggtaagtccgtgataatacacatttatgacatttattctaacatgacattttagttaaatctgacagttgtcacattttattttcaatttggaataaaaacaaatcaaatgtgtttcttgcatttataaaatggtattttctttgatttgtatagtcttataaattatacagattatatttgtaatattattatctaattaaaaaaaatatttttttattatggcgccatctatcgacaactagaataactagaataaatgttataaaaatgtccccgacgaaatgtaatcaccgacgtgcctttttttctgtcacatacaatttaatgcgttagaaagaaatcgaaaaactgtgacgcactgaaagatgatcatgagaaatactgtacatacttattttttactatagctacatttttgcgataccagttgaagagaacgtgactagaaatatattcttgtatgactactttgaacaaaagctacaactttgcttgtagtttgattcctgtgaattttttctcgaacggatacatttttgaacattttttttaagattcaattttttttaataccaaaggcaatcaaaccgttattttatcagttgttcctaacgaagcttccagcaatattgttttgaacattttactttttcattaccgtcaaacgcatgtttcggttattttggtacgctgtatgtttgaagctttaaaataaaatataatgacgtagcgtttataagctgtaccattcgtgtaattttatttgaattacatttttactatatagaatgttttgctgttatctgtgcaggatttaataagtctacgtttgttgaacaattttgttcgtttaaattacacacttttgtttcaaataggcattaatggtatttcgaaagacaattagaacggaaaccttggtgatattatcgaggtgaatacatttttgatgatagtgtgtagtataaacattttgtaattattaattttgattttggttcagtcatgataagttcgaagatttattttatcttacc

SEQ ID NO: 420 - DNA, 1054 bp, Diabrotica virgifera
gcaaatctagtattttgttgatttatggtatacagccagctacaggaagtttattttccttttcgattttgattttattacctccaaagctagaacgaaaagagtttgatctggaattgagcatggagtatactggagtattctggagaatttttttgcaggatctgtcaattatcgtttctttagcacctttctggatgttggcgatcagcatggctatcctaacttcgcttgctgctattcgcaatagtccagttgtcgatgtattgaaccactttcgcaggttttgaagcctagatatcgtagaatatttgtagatataacgtagaaaatacatagcttctgaaaagagacttcatcattatgaactctgatctcgcttttcctatgtgttgttttatttcatttgtgtggtcccactggctgtttatgttagtaccaaggaatgtgtaactgtccaccctgtcaattggttgttggttaaccaaaaactgtgtatttaatatttcgcgcttactgactaccatgtactttgtttttttttcgtattgagatcaactccgtgttctttacttatttatatctgatatgcgcgacattattctttactgtgacaatatacagtgtattgtccttttcatgacatttttcagtgcgtaacaaatgataggaaaaagggtaagtccgtgataatacacatttatgacatttattctaacatgacattttagttaaatctgacagttgtcacattttattttcaatttggaataaaaacaaatcaaatgtgtttcttgcatttataaaatggtattttctttgatttgtatagtcttataaattatacagattatatttgtaatattattatctaattaaaaaaaatatttttttattatggcgccatctatcgacaactagaataactagaataaatgttgtaaatgtctgtaatcacggacgtgcctttttttctgtcacatacaatttaatgcgttagaaagaaatcgaaaaactgtgacgcactgaaagatgatcatgagaaaaagaatac

SEQ ID NO: 421 - DNA, 1055 bp, Diabrotica virgifera
gagcgagcgtgtaaagaaactcgaaaatataatgtactactctgtaccagaatctttttgcatctacgatccactattcactatgatcaaagtaaaaaatattagatcttccttgtcgagccaggcacgaatagtttcatttaaacgtgtattaaaagtgcaatatagctctatctctgtcacttacatagaatgcccgtaaaatctttctcttttcagccgagccatctaagatttcggcacgatcatcccggccgctgtgagtggcgacggttgtattacactacacagttgccagattttatataatttataaagagaaaagaaatacgcacaaacaaatgaacgggcattaagacggtttaatgataaaaaaatatgtttctgcataaaaataagatagtgccatgactccatggcactacctcaccggccgccactgacttatacaggtagtcttcggtctgcttttctttttttccgggggttgccattccactctcggctttgggagtcgatgtttctccattctttttacattgccactccaacaaagttgtttttcctggatttcttctattatgtttgttttcctattcattgtatatcgtactcgttcattcgttatgtgtgagactctagagatgcaggccgatcttcgccagaagtccatttccagtgcgagcaacttatgttccgttcccttattctccatatatttatatccatatagtaccacactttttaagatgctattatatagctgtgttttcttttcttctgatatggttttttgaccaaagtagtgagttcaaagctcctattattcttccctttcataattctttcctctatttcgaattctgcccttccaatttgttgaattctctttccaacatatacataatcagagctttgttcgataaccatatcatcctctagttgtgactcatttttctctcctcctatactcatatatttggctttaggccccattttttgtattctcgtaacagccggtttgtcataaatattagatcatctttaccctgggc

SEQ ID NO: 422 - DNA, 543 bp, Diabrotica virgifera
tattgtccttttcatgacatttttcagtgcgtaacaaatgataggaaaaagggtaagtccgtgataatacacatttatgacatttattctaacatgacattttagttaaatctgacagttgtcacattttattttcaatttggaataaaaacaaatcaaatgtgtttcttgcatttataaaatggtattttctttgatttgtatagtcttataaattatacagattatatttgtaatattattatctaattaaaaaaaatatttttttattatggcgccatctatcgacaactagaataatcaccgaactagaataattaccaaagtaatcaccgacgtgcctttttttctgtcacatacaatttaatgcgttagaatgaaatcgaaaaactgtgacgcgctgaaagatgatcatgagaaaaaagaataatataattggccaatataattaaaaagtgcgaataaaagttgcagagcgtagaaaccaggtgtcgctttgccgaacttgcacggtcctaataccttcaaataaccccatgaaaa

SEQ ID NO: 423 - DNA, 7807 bp, Diabrotica virgifera
  SmartBlast Evalue=4E-61; Info=Ubiquitin-conjugating enzyme E2 variant 2 n=4 Tax=Apocrita RepID=E2AGB3_9HYME
aagtgttaactctatctctattctggaaagaattagtcctcacatcttttgtatttaagttgagggaaaaaggtgatttttgatatccaaagagccccgctttgttaatcaatagtaggggataagatttcaatcatccataatattcgaaaatattcaaaatacacttttaaaaattttaagtttgtgagtattttgtaatggcgaccccatcaactggtgttgttgtgcctcgaaactttcgactacttgaagaactagaagccggtcaaaagggtgtttcagatggtactattagctggggcttagaaaatgatgatgatatgacacttacacattggatggggatgataatcgggccccctcgtacaccgtatgaaaataggatgtattctgttaaaattgaatgtggccaaaggtatcctgatgatgcacctactgcaaagtttatctctagaatcaatataaactgtataaacagtaacacaggggtggtcgataacagacaagtcccaatattggctaggtggcaaagggattacactattaaaacggttttgcaagaattacgaagaataatgacacttaaagagaacatgaagctaacacagcctcctgaaggcacttgcttctagcctttgaatcagcataacactcccccagtatcttctgttacaacttgtccattgagtgtcgatacctgcaccacgcaatcatgctgtcttctgtagcggattcaccttactcacaaactatctatggggtgtcttgaactggttcttggaagataacctgtctggtaatgaggacaaactggtgtatttaggttaaggtgtctaatgataagagtattttttaatattactgcttgtacaacttgtttaactctattagaggatgactcatgatcgaacttgtatttttgtaggaaacaaaaagtaatgttgatgtcaattataataaaccatctatgacgcatctcgtatttcaataaaattgaatgaataggcgtttgacacaatattgttcttgtataacccaaagttttaagaatgggtggtcacgattcattcgatatactagatttttgggttgattaaccacttatttgtttttgtatattctactgggcagtagttgacaatttatcggaactgtatttttaaacttttactagtattcactcactttgtgtacgtttttataccaaagatgaaattgtcaactgctgtggtatgaaaaaaatcaatttatgcttaaatacatgttacgctttattatggagaatcagcttcgaaaatctaaaattctaaaagacatttattgaataactacaaggttgtattgatatttagacattttttgaatgtcgtgtgtgtttataaagaagttatcctttattttgtagtagtttcggacaccccttttaacagtcagagagtagatatctatttgtatatcattgattacatatatcataaacattatctaaatcattattttttttgaaaacacagaaattaaaagtaaaggtagaatacaccattttaaaatttgacaatgttatctcaatacattattacattctcaatattcacacacacgcttcactagcactcataggtatttagcatctccttgtttgctgtcataccttggttttacatttaaaacttatatgagaaaagtgatacttagatgagactttactttataagtttaacttttttctttaaagtcttgagtctgatgaaagaatgagtagagatctacactctgatgacccaagttgtaacaaagatggctaaggtgtacagctttataagctatgtagttaagttaacattttagctaaagttattaggttgaaataagtttatatacagtaccagagcatatattccatatatagcagcttatagaaaggtaggaggaactgctaaaaactttgtttgccttaccaatagttttaataatcgagttttaagtcgagatattcacgcaggtggtctaaaatgcccaaatgttatttattatagagtaagcgccactctactagatacattggtaggtacctagttggtatgattattggctaatctggtccgttctcagatgtgactttcatccctgtcatgttactgtcatgaaactattcaaaataattgtttttccatacaaaagaatacattaattaatagtattgttactctgctttaaaataactttattcaagcaccaagcaatattacaatactttaaaactattacaactttaacaaaatgacaactataaacgtcaaacacagctgatctattatttgtcaactttttatgttaatatagggcattccaacatgctgtcaaaagtcaatatgacgactgggaggcaaacataaatgttattctatcagttcttaatttgttttagataattttagttgcgtttctttgtaattttgtttttaaaagaattgatttgacattctcactagaagaattaatctaaaaagataatatgcctaatttctgttgtgttttgaaatgtggaatacgaaattcatgatgaagttcagttttatcggttactatcagtggtatattttaagcgtaaacacgtgtaaaacaactaaataagttatcatctgagagacaaaaacaaacaactaaataagttatgatctgggagacaaaaacaatggttaaatgctacaaaacgtcctataaaatgctaaataattatttccatgttacttacgcttggaaaacgtctaaaccatgtgttctcaaacccctcgaggaaaagtggacctatattatttattttgtcaatcttttgcttgtacctaccactgtgcgtctaggtacctactaacaacattatgtattgtctaccaagaatttatatgcactcatgtttatttattcactgcttaaaaccaaataaagtcgttcaggtacttctacaactaaaaactacacaaaatctacaacaaaatgttcagaaaatacaacttaaaactgttaatacatgtgctgcaaatattataaacagacacaatgtttgacagtttgcctcccaaacgtcagtcttgaaatgccctattcagtttctatacattttctgacgttctaaacgtcactggacatacaaataaacattgcaacaagtgaagggtccaggactataatagctcaatgttcctatggatctagtagggtggcggtggttactgtatagcaatattacagtatttctcatgatcatttttcagtgcgtaacaaatgataggaaaaagggtaagtccgtgataatacacatttatgacatttattctaacatgacattttagttaaatctgacagttgtcacattttattttcaatttggaataaaaacaaatcaaaagtgtttcttgcatttataaaatggtattttctttgatttgtatagtcttataaattatacagattatatttgtaatattattatctaatttaaaaaaaaatttttattatggcgccatctatcgacaactagaataactagaataaatgttataaaaatgtcaccgacgaaatgtaatcaccgacgtgcctttttttctgtcacatacaatttaatgcgttagaaagaaatcgaaaaactgtgacgcactgaaagatgatcatgagaaatactgtataatctgaatttacataatatatcgtattcctaaagtcgaaaatgtaatttttcgactttgggatcggttatttcgaatttggtttgagatatcaaactcgcaagatgatattccttcttcttcttaaagtgcccatccgttctggatgttggcgatcatcatggctatcttgactttgtttaccacagcgcgaaatagttcagcggtagtcgtgttataccactttcgtaaattttgaagccaggaaatgcgtcttcttcccggtcctcttttaccatccgttggagaaggccgtagcatttctcattacatgtcctagatattctaattttttcgttatgatggtcatgagaatttcacactctttccccattctacgcagtacttctacattagtaattcggtcaacccaggatatacgtaagatgcgcctataacaccacatttcgaaagcttcggaccgattcatagatgcaacagttagtgtccacgcttccattccgtagagcagaactgtaaatatgtatcatttcaacagacggtattttgtttttaatgatatgtctagactctagactattgaaaaagggtctcattccaacgaatgctgcttttgcttttattattcactgtttaatttctgttgagtgggtccattggctatttaaattggtgcctagatatgtatattgctccactctttcaatattctgttgtttgattgtaagttgagtgtttagtatgattttcctaaactaggtaaaaaacacattgatttgatacctatatcatatgccataaatcaaaaattcgattttttgactttgaggtcggttgatatcgaaatggtttttaaatttggattcaggagacaaactgcataagaatccatcgtagatcgactcacaagtatttcaggggcggcgatgtacaaacgaacgaatcaacgaacagactttgcgaatttatatacgaaaacgaagttttcgttgaaaataaatgaattcatcgattaagctgtccttagtagcaaagtaatgtaaagcatgtagtgctatcaaacgctgtattgcgtatgccagtggcggctcgtatcactttaagtaggtagtgccagaattcgggcagctgcctaaatttttagtgacgggttcacaatattgtcaaaaaaggtataaaatagaaattaaaaaaaataggtacggatatttttacattatgtaggtatataccatttctggggtgtcaagaaatttaaacatttaaaatgcattcagtgattgatttgacatcatgtccgtccaacaagtaaaatctccaaaatctctcaacttatcgccctttacacaaatatcggaaaactataactaactgaaattcaccagcgacgcgacgtctgtcgtttcatcggcaatcactgcaacacaaagataattttcaatttctttccttatttcctcgtgataaacatctaagatgcactgaaggagttcattttgtgttgttttgaggtacatgcttttaaagatttggaactttgaatatgaaccgaagtcgttgtctaattcggctaacattgaacagttccataaagatgcctctattttctgaattttccttttcgtcgtgatttctcaaaactaactcgaaactccacaaaaccatatagatataatttttaatttgattcaaaacatatcgattcttatccacttcttgttcattgtgtttaattagactatcacgataagctgaatttaactcgggttttattaaaattaaaaattttaaattacttaaaaatataatagtttataataaaaagtttaatcattatgtaataaatacaaaaacgagcgagcgagcgcataaaaaaactggaaaatataatgtactaccctgtacgagaatctttttggatctacgatccactattcactcactattcactatgatgagcatagtaaaaaatattagatcttccttgtccttgtcgagcatcttgttgagccaggcacgaatagtctcatttaaacgtgtattaaaagtgcaatatagctctacctctgtcacttatatagaatgcccgtaaaatctttctcttttcagccgagccatctaagcttttggcacgatgcgatcatcccgtccgctgtgagtggcgaggattgtactacactgcacagttgccagattttatataatttataaagagaaaagaaatacgcacaaaaaatgaacgggcattaaaacggtttaaagataaaaaatatgtttctgcataaaaattctgcaccggccgccactggcgtatgcagaatatttcgattaaactaaaattccaaaatttcgttctgcattatgcaaaacttgatttatgtttatataaattataaacatgtaaattttggtgctattaaattaagtgtaaaattattaggcatggtaaagttataaaaaaataaccaaatcttttgtttgttaaaattcttagaagtaacaagttaattaactatttaaagttattaataaacaattagaaggtaaagtgaaataaaaccacttctaattcgatttctatgaaaaaagtcaatatatgtggaaaaatttaaaatttcttcaatactgtttccttggtttttacgctaccaaaatacgtttgatttatcgagtcacatcgaaactatcaatgtattaataaatttgtaatgttcattagtcatttaatattaaaatttttaggattacatgtcattattgcgtaatatagttttgcatttcaaagctagtcctattgaactggattctacttgttaggaaaaaagaaatgattagaaatttcataaatcttttacaattttcaatattccatgaatgtctttttgctgtttcaaaatttcatttaaatcaaatttcaagacaatctatatttgctttatagctgcctttagttattaaatttgtactatattcctgatccgataaaattggtggtagataaagattgatttttaacattattaggtttgggctaagtatctactagtctgggtatgtctagcgttacaatgtataacgtatactgcgaataacgtgcgcaaaatggcgattttcgctaagagttacctaaggcccgtccggcgaaacgatcagattttctgcattcattcagtggcgtattttcaagaagttagttaatatattattatgtgtctttatgtaaattttagaatggcttctttatttttgattcaaataatggatatgttaaataatttattagtcgattaaaaatacgctataacctagaccttaagatatataaaattattgttaatttgtccgttaacattttgctatttaataagggccgccgtagctcaggctgtaggatatctgactcgcatgctggtaggccggggttcgaaacccgcgccggcgagaacatctagacatttttaaaaatgtctataggccccaggtcgactcagcctgaataaaattagtactttgggtaaaaccaggggtaataataggcggttgaagcgtagcactgaccctgttacctttcttgtataccgtaggcactagatatagcagactaccctgctataatcccaaagccgctttagcggtataaaacgggagactattataataacagatacagataatagatttttttttaattactgtgatgcatgctgtattctttcagtttcggctcaggaaatattatttgttaacttcctcagaaattgtgtgcagataataagttaatacaatctaaccccaatttttaatatacacaggaatcgacacgtttttttatattatttcataaaaatttttacacacctacttaaaacgagtcttttaatagtgaattagtgatgctgccaaatatttatgaacccaatttatcaaacttaatgttgtacttaggttacatcataatcttaattgtgaacactgactacatatcccttaaatgtaactttatcagtctttccattttttactactgatatacccttgtctatgtcaaaaaatagtataaacttgtgatatatgaaatatagtaattttggattttaatatatttataaatgttcttaaga

SEQ ID NO: 424 - DNA, 428 bp, Diabrotica virgifera
tattgtccttttcatgacatttttcagtgcgtaacaaatgataggaaaaagggtaagtccgtgataatacacatttatgacatttattctaacatgacattttagttaaatctgacagttgtcacattttattttcaatttggaataaaaacaaatcaaatgtgtttcttgcatttataaaatggtattttctttgatttgtatagtcttataaattatacagattatatttgtaatattattatctaattaaaaaaaatatttttttattatggcgccatctatcgacaactagaataactagaataaatgttgtaaatgtctgtaatcacggacgtgcctttttttctgtcacatacaatttaatgcgttagaaagaaatcgaaaaactgtgacgcactgaaagatgatcatgagaaaaagaatac

SEQ ID NO: 425 - DNA, 512 bp, Diabrotica virgifera
  SmartBlast Evalue=2E-10; Info=Endonuclease-reverse transcriptase n=1 Tax=Bombyx mori RepID=D5LB38_BOMMO
tacattgattttcattcctttggtttttagattagtaggtttccattctcttcttaagtgcatatccgttccggatgttggcgatcatcatggctatcttgactttgtttaccgcagcgcggaacagttcagtggtagtggtgttataccactttcgtaaattttgaagccaggaaatgacgtcttcttcccggtcctcttttaccatttaccttcccttggagaatcagttggagaaggccgtaacgttcttgatttctcattacatgtcctagatattctaattttttcgttatgatggtcatgagaatttcacactctttccccattttacgcagtacttttcgaaagcttcgagccgattcatagatacaacagttagtgtccacgcttccatgttttaatgatatgtctcgactgttgaaaatgggtctcattctaacgtatgctgctttcgcttttattattcgctgtttaatttctgtcgagtggtcctattggctatttaaatt

SEQ ID NO: 426 - DNA, 7801 bp, Diabrotica virgifera
  SmartBlast Evalue=4E-61; Info=Ubiquitin-conjugating enzyme E2 variant 2 n=4 Tax=Apocrita RepID=E2AGB3_9HYME
aagtgttaactctatctctattctggaaagaattagtcctcacatcttttgtatttaagttgagggaaaaaggtgatttttgatatccaaagagccccgctttgttaatcaatagtaggggataagatttcaatcatccataatattcgaaaatattcaaaatacacttttaaaaattttaagtttgtgagtattttgtaatggcgaccccatcaactggtgttgttgtgcctcgaaactttcgactacttgaagaactagaagccggtcaaaagggtgtttcagatggtactattagctggggcttagaaaatgatgatgatatgacacttacacattggatggggatgataatcgggccccctcgtacaccgtatgaaaataggatgtattctgttaaaattgaatgtggccaaaggtatcctgatgatgcacctactgcaaagtttatctctagaatcaatataaactgtataaacagtaacacaggggtggtcgataacagacaagtcccaatattggctaggtggcaaagggattacactattaaaacggttttgcaagaattacgaagaataatgacacttaaagagaacatgaagctaacacagcctcctgaaggcacttgcttctagcctttgaatcagcataacactcccccagtatcttctgttacaacttgtccattgagtgtcgatacctgcaccacgcaatcatgctgtcttctgtagcggattcaccttactcacaaactatctatggggtgtcttgaactggttcttggaagataacctgtctggtaatgaggacaaactggtgtatttaggttaaggtgtctaatgataagagtattttttaatattactgcttgtacaacttgtttaactctattagaggatgactcatgatcgaacttgtatttttgtaggaaacaaaaagtaatgttgatgtcaattataataaaccatctatgacgcatctcgtatttcaataaaattgaatgaataggcgtttgacacaatattgttcttgtataacccaaagttttaagaatgggtggtcacgattcattcgatatactagatttttgggttgattaaccacttatttgtttttgtatattctactgggcagtagttgacaatttatcggaactgtatttttaaacttttactagtattcactcactttgtgtacgtttttataccaaagatgaaattgtcaactgctgtggtatgaaaaaaatcaatttatgcttaaatacatgttacgctttattatggagaatcagcttcgaaaatctaaaattctaaaagacatttattgaataactacaaggttgtattgatatttagacattttttgaatgtcgtgtgtgtttataaagaagttatcctttattttgtagtagtttcggacaccccttttaacagtcagagagtagatatctatttgtatatcattgattacatatatcataaacattatctaaatcattattttttttgaaaacacagaaattaaaagtaaaggtagaatacaccattttaaaatttgacaatgttatctcaatacattattacattctcaatattcacacacacgcttcactagcactcataggtatttagcatctccttgtttgctgtcataccttggttttacatttaaaacttatatgagaaaagtgatacttagatgagactttactttataagtttaacttttttctttaaagtcttgagtctgatgaaagaatgagtagagatctacactctgatgacccaagttgtaacaaagatggctaaggtgtacagctttataagctatgtagttaagttaacattttagctaaagttattaggttgaaataagtttatatacagtaccagagcatatattccatatatagcagcttatagaaaggtaggaggaactgctaaaaactttgtttgccttaccaatagttttaataatcgagttttaagtcgagatattcacgcaggtggtctaaaatgcccaaatgttatttattatagagtaagcgccactctactagatacattggtaggtacctagttggtatgattattggctaatctggtccgttctcagatgtgactttcatccctgtcatgttactgtcatgaaactattcaaaataattgtttttccatacaaaagaatacattaattaatagtattgttactctgctttaaaataactttattcaagcaccaagcaatattacaatactttaaaactattacaactttaacaaaatgacaactataaacgtcaaacacagctgatctattatttgtcaactttttatgttaatatagggcattccaacatgctgtcaaaagtcaatatgacgactgggaggcaaacataaatgttattctatcagttcttaatttgttttagataattttagttgcgtttctttgtaattttgtttttaaaagaattgatttgacattctcactagaagaattaatctaaaaagataatatgcctaatttctgttgtgttttgaaatgtggaatacgaaattcatgatgaagttcagttttatcggttactatcagtggtatattttaagcgtaaacacgtgtaaaacaactaaataagttatcatctgagagacaaaaacaaacaactaaataagttatgatctgggagacaaaaacaatggttaaatgctacaaaacgtcctataaaatgctaaataattatttccatgttacttacgcttggaaaacgtctaaaccatgtgttctcaaacccctcgaggaaaagtggacctatattatttattttgtcaatcttttgcttgtacctaccactgtgcgtctaggtacctactaacaacattatgtattgtctaccaagaatttatatgcactcatgtttatttattcactgcttaaaaccaaataaagtcgttcaggtacttctacaactaaaaactacacaaaatctacaacaaaatgttcagaaaatacaacttaaaactgttaatacatgtgctgcaaatattataaacagacacaatgtttgacagtttgcctcccaaacgtcagtcttgaaatgccctattcagtttctatacattttctgacgttctaaacgtcactggacatacaaataaacattgcaacaagtgaagggtccaggactataatagctcaatgttcctatggatctagtagggtggcggtggttactgtatagcaatattacagtatttctcatgatcatttttcagtgcgtaacaaatgataggaaaaagggtaagtccgtgataatacacatttatgacatttattctaacatgacattttagttaaatctgacagttgtcacattttattttcaatttggaataaaaacaaatcaaaagtgtttcttgcatttataaaatggtattttctttgatttgtatagtcttataaattatacagattatatttgtaatattattatctaatttaaaaaaaaatttttattatggcgccatctatcgacaactagaataactagaataaatgttataaaaatgtcaccgacgaaatgtaatcaccgacgtgcctttttttctgtcacatacaatttaatgcgttagaaagaaatcgaaaaactgtgacgcactgaaagatgatcatgagaaatactgtataatctgaatttacataatatatcgtattcctaaagtcgaaaatgtaatttttcgactttgggatcggttatttcgaatttggtttgagatatcaaactcgcaagatgatattccttcttcttcttaaagtgcccatccgttctggatgttggcgatcatcatggctatcttgactttgtttaccacagcgcgaaatagttcagcggtagtcgtgttataccactttcgtaaattttgaagccaggaaatgcgtcttcttcccggtcctcttttaccatccgttggagaaggccgtagcatttctcattacatgtcctagatattctaattttttcgttatgatggtcatgagaatttcacactctttccccattctacgcagtacttctacattagtaattcggtcaacccaggatatacgtaagatgcgcctataacaccacatttcgaaagcttcggaccgattcatagatgcaacagttagtgtccacgcttccattccgtagagcagaactgtaaatatgtatcatttcaacagacggtattttgtttttaatgatatgtctagactctagactattgaaaaagggtctcattccaacgaatgctgcttttgcttttattattcactgtttaatttctgttgagtgggtccattggctatttaaattggtgcctagatatgtatattgctccactctttcaatattctgttgtttgattgtaagttgagtgtttagtatgattttcctaaactaggtaaaaaacacattgatttgatacctatatcatatgccataaatcaaaaattcgattttttgactttgaggtcggttgatatcgaaatggtttttaaatttggattcaggagacaaactgcataagaatccatcgtagatcgactcacaagtatttcaggggcggcgatgtacaaacgaacgaatcaacgaacagactttgcgaatttatatacgaaaacgaagttttcgttgaaaataaatgaattcatcgattaagctgtccttagtagcaaagtaatgtaaagcatgtagtgctatcaaacgctgtattgcgtatgccagtggcggctcgtatcactttaagtaggtagtgccagaattcgggcagctgcctaaatttttagtgacgggttcacaatattgtcaaaaaaggtataaaatagaaattaaaaaaaataggtacggatatttttacattatgtaggtatataccatttctggggtgtcaagaaatttaaacatttaaaatgcattcagtgattgatttgacatcatgtccgtccaacaagtaaaatctccaaaatctctcaacttatcgccctttacacaaatatcggaaaactataactaactgaaattcaccagcgacgcgacgtctgtcgtttcatcggcaatcactgcaacacaaagataattttcaatttctttccttatttcctcgtgataaacatctaagatgcactgaaggagttcattttgtgttgttttgaggtacatgcttttaaagatttggaactttgaatatgaaccgaagtcgttgtctaattcggctaacattgaacagttccataaagatgcctctattttctgaattttccttttcgtcgtgatttctcaaaactaactcgaaactccacaaaaccatatagatataatttttaatttgattcaaaacatatcgattcttatccacttcttgttcattgtgtttaattagactatcacgataagctgaatttaactcgggttttattaaaattaaaaattttaaattacttaaaaatataatagtttataataaaaagtttaatcattaaaaatgtaataattataaatacaaaaacgagcgagcgagcgcgtaaaaaaactcgaaaagataatgtaggtactaccctgtacgagaagctttttggatctgatctacgatccactattcactatgatgagcatagtaaaaaatattagatcttcctgccttgtcgagccaggcacgaatagtttcatttaaacgtgtattaaaagtgcaatatagctctatctctgtcacttacatagaatgcccgtaaaatctttctcttttcagccgagccatctaagcttttggcacgatgcgatcatcccgtccgctgtgagtggcgaggattgtactacactgcacagttgccagattttatataatttataaagagaaaagaaatacgcacaaaaaatgaacgggcattaaaacggtttaaagataaaaaatatgtttctgcataaaaattctgcaccggccgccactggcgtatgcagaatatttcgattaaactaaaattccaaaatttcgttctgcattatgcaaaacttgatttatgtttatataaattataaacatgtaaattttggtgctattaaattaagtgtaaaattattaggcatggtaaagttataaaaaaataaccaaatcttttgtttgttaaaattcttagaagtaacaagttaattaactatttaaagttattaataaacaattagaaggtaaagtgaaataaaaccacttctaattcgatttctatgaaaaaagtcaatatatgtggaaaaatttaaaatttcttcaatactgtttccttggtttttacgctaccaaaatacgtttgatttatcgagtcacatcgaaactatcaatgtattaataaatttgtaatgttcattagtcatttaatattaaaatttttaggattacatgtcattattgcgtaatatagttttgcatttcaaagctagtcctattgaactggattctacttgttaggaaaaaagaaatgattagaaatttcataaatcttttacaattttcaatattccatgaatgtctttttgctgtttcaaaatttcatttaaatcaaatttcaagacaatctatatttgctttatagctgcctttagttattaaatttgtactatattcctgatccgataaaattggtggtagataaagattgatttttaacattattaggtttgggctaagtatctactagtctgggtatgtctagcgttacaatgtataacgtatactgcgaataacgtgcgcaaaatggcgattttcgctaagagttacctaaggcccgtccggcgaaacgatcagattttctgcattcattcagtggcgtattttcaagaagttagttaatatattattatgtgtctttatgtaaattttagaatggcttctttatttttgattcaaataatggatatgttaaataatttattagtcgattaaaaatacgctataacctagaccttaagatatataaaattattgttaatttgtccgttaacattttgctatttaataagggccgccgtagctcaggctgtaggatatctgactcgcatgctggtaggccggggttcgaaacccgcgccggcgagaacatctagacatttttaaaaatgtctataggccccaggtcgactcagcctgaataaaattagtactttgggtaaaaccaggggtaataataggcggttgaagcgtagcactgaccctgttacctttcttgtataccgtaggcactagatatagcagactaccctgctataatcccaaagccgctttagcggtataaaacgggagactattataataacagatacagataatagatttttttttaattactgtgatgcatgctgtattctttcagtttcggctcaggaaatattatttgttaacttcctcagaaattgtgtgcagataataagttaatacaatctaaccccaatttttaatatacacaggaatcgacacgtttttttatattatttcataaaaatttttacacacctacttaaaacgagtcttttaatagtgaattagtgatgctgccaaatatttatgaacccaatttatcaaacttaatgttgtacttaggttacatcataatcttaattgtgaacactgactacatatcccttaaatgtaactttatcagtctttccattttttactactgatatacccttgtctatgtcaaaaaatagtataaacttgtgatatatgaaatatagtaattttggattttaatatatttataaatgttcttaaga

SEQ ID NO: 427 - DNA, 6631 bp, Diabrotica virgifera
  SmartBlast Evalue=3E-61; Info=Ubiquitin-conjugating enzyme E2 variant 2 n=4 Tax=Apocrita RepID=E2AGB3_9HYME
aagtgttaactctatctctattctggaaagaattagtcctcacatcttttgtatttaagttgagggaaaaaggtgatttttgatatccaaagagccccgctttgttaatcaatagtaggggataagatttcaatcatccataatattcgaaaatattcaaaatacacttttaaaaattttaagtttgtgagtattttgtaatggcgaccccatcaactggtgttgttgtgcctcgaaactttcgactacttgaagaactagaagccggtcaaaagggtgtttcagatggtactattagctggggcttagaaaatgatgatgatatgacacttacacattggatggggatgataatcgggccccctcgtacaccgtatgaaaataggatgtattctgttaaaattgaatgtggccaaaggtatcctgatgatgcacctactgcaaagtttatctctagaatcaatataaactgtataaacagtaacacaggggtggtcgataacagacaagtcccaatattggctaggtggcaaagggattacactattaaaacggttttgcaagaattacgaagaataatgacacttaaagagaacatgaagctaacacagcctcctgaaggcacttgcttctagcctttgaatcagcataacactcccccagtatcttctgttacaacttgtccattgagtgtcgatacctgcaccacgcaatcatgctgtcttctgtagcggattcaccttactcacaaactatctatggggtgtcttgaactggttcttggaagataacctgtctggtaatgaggacaaactggtgtatttaggttaaggtgtctaatgataagagtattttttaatattactgcttgtacaacttgtttaactctattagaggatgactcatgatcgaacttgtatttttgtaggaaacaaaaagtaatgttgatgtcaattataataaaccatctatgacgcatctcgtatttcaataaaattgaatgaataggcgtttgacacaatattgttcttgtataacccaaagttttaagaatgggtggtcacgattcattcgatatactagatttttgggttgattaaccacttatttgtttttgtatattctactgggcagtagttgacaatttatcggaactgtatttttaaacttttactagtattcactcactttgtgtacgtttttataccaaagatgaaattgtcaactgctgtggtatgaaaaaaatcaatttatgcttaaatacatgttacgctttattatggagaatcagcttcgaaaatctaaaattctaaaagacatttattgaataactacaaggttgtattgatatttagacattttttgaatgtcgtgtgtgtttataaagaagttatcctttattttgtagtagtttcggacaccccttttaacagtcagagagtagatatctatttgtatatcattgattacatatatcataaacattatctaaatcattattttttttgaaaacacagaaattaaaagtaaaggtagaatacaccattttaaaatttgacaatgttatctcaatacattattacattctcaatattcacacacacgcttcactagcactcataggtatttagcatctccttgtttgctgtcataccttggttttacatttaaaacttatatgagaaaagtgatacttagatgagactttactttataagtttaacttttttctttaaagtcttgagtctgatgaaagaatgagtagagatctacactctgatgacccaagttgtaacaaagatggctaaggtgtacagctttataagctatgtagttaagttaacattttagctaaagttattaggttgaaataagtttatatacagtaccagagcatatattccatatatagcagcttatagaaaggtaggaggaactgctaaaaactttgtttgccttaccaatagttttaataatcgagttttaagtcgagatattcacgcaggtggtctaaaatgcccaaatgttatttattatagagtaagcgccactctactagatacattggtaggtacctagttggtatgattattggctaatctggtccgttctcagatgtgactttcatccctgtcatgttactgtcatgaaactattcaaaataattgtttttccatacaaaagaatacattaattaatagtattgttactctgctttaaaataactttattcaagcaccaagcaatattacaatactttaaaactattacaactttaacaaaatgacaactataaacgtcaaacacagctgatctattatttgtcaactttttatgttaatatagggcattccaacatgctgtcaaaagtcaatatgacgactgggaggcaaacataaatgttattctatcagttcttaatttgttttagataattttagttgcgtttctttgtaattttgtttttaaaagaattgatttgacattctcactagaagaattaatctaaaaagataatatgcctaatttctgttgtgttttgaaatgtggaatacgaaattcatgatgaagttcagttttatcggttactatcagtggtatattttaagcgtaaacacgtgtaaaacaactaaataagttatcatctgagagacaaaaacaaacaactaaataagttatgatctgggagacaaaaacaatggttaaatgctacaaaacgtcctataaaatgctaaataattatttccatgttacttacgcttggaaaacgtctaaaccatgtgttctcaaacccctcgaggaaaagtggacctatattatttattttgtcaatcttttgcttgtacctaccactgtgcgtctaggtacctactaacaacattatgtattgtctaccaagaatttatatgcactcatgtttatttattcactgcttaaaaccaaataaagtcgttcaggtacttctacaactaaaaactacacaaaatctacaacaaaatgttcagaaaatacaacttaaaactgttaatacatgtgctgcaaatattataaacagacacaatgtttgacagtttgcctcccaaacgtcagtcttgaaatgccctattcagtttctatacattttctgacgttctaaacgtcactggacatacaaataaacattgcaacaagtgaagggtccaggactataatagctcaatgttcctatggatctagtagggtggcggtggttactgtatagcaatattacagtatttctcatgatcatttttcagtgcgtaacaaatgataggaaaaagggtaagtccgtgataatacacatttatgacatttattctaacatgacattttagttaaatctgacagttgtcacattttattttcaatttggaataaaaacaaatcaaaagtgtttcttgcatttataaaatggtattttctttgatttgtatagtcttataaattatacagattatatttgtaatattattatctaatttaaaaaaaaatttttattatggcgccatctatcgacaactagaataactagaataaatgttataaaaatgtcaccgacgaaatgtaatcaccgacgtgcctttttttctgtcacatacaatttaatgcgttagaaagaaatcgaaaaactgtgacgcactgaaagatgatcatgagaaatactgtataatctgaatttacataatatatcgtattcctaaagtcgaaaatgtaatttttcgactttgggatcggttatttcgaatttggtttgagatatcaaactcgcaagatgatattccttcttcttcttaaagtgcccatccgttctggatgttggcgatcatcatggctatcttgactttgtttaccacagcgcgaaatagttcagcggtagtcgtgttataccactttcgtaaattttgaagccaggaaatgcgtcttcttcccggtcctcttttaccatccgttggagaaggccgtagcatttctcattacatgtcctagatattctaattttttcgttatgatggtcatgagaatttcacactctttccccattctacgcagtacttctacattagtaattcggtcaacccaggatatacgtaagatgcgcctataacaccacatttcgaaagcttcggaccgattcatagatgcaacagttagtgtccacgcttccattccgtagagcagaactgtaaatatgtatcatttcaacagacggtattttgtttttaatgatatgtctagactctagactattgaaaaagggtctcattccaacgaatgctgcttttgcttttattattcactgtttaatttctgttgagtgggtccattggctatttaaattggtgcctagatatgtatattgctccactctttcaatattctgttgtttgattgtaagttgagtgtttagtatgattttcctaaactaggtaaaaaacacattgatttgatacctatatcatatgccataaatcaaaaattcgattttttgactttgaggtcggttgatatcgaaatggtttttaaatttggattcaggagacaaactgcataagaatccatcgtagatcgactcacaagtatttcaggggcggcgatgtacaaacgaacgaatcaacgaacagactttgcgaatttatatacgaaaacgaagttttcgttgaaaataaatgaattcatcgattaagctgtccttagtagcaaagtaatgtaaagcatgtagtgctatcaaacgctgtattgcgtatgccagtggcggctcgtatcactttaagtaggtagtgccagaattcgggcagctgcctaaatttttagtgacgggttcacaatattgtcaaaaaaggtataaaatagaaattaaaaaaaataggtacggatatttttacattatgtaggtatataccatttctggggtgtcaagaaatttaaacatttaaaatgcattcagtgattgatttgacatcatgtccgtccaacaagtaaaatctccaaaatctctcaacttatcgccctttacacaaatatcggaaaactataactaactgaaattcaccagcgacgcgacgtctgtcgtttcatcggcaatcactgcaacacaaagataattttcaatttctttccttatttcctcgtgataaacatctaagatgcactgaaggagttcattttgtgttgttttgaggtacatgcttttaaagatttggaactttgaatatgaaccgaagtcgttgtctaattcggctaacattgaacagttccataaagatgcctctattttctgaattttccttttcgtcgtgatttctcaaaactaactcgaaactccacaaaaccatatagatataatttttaatttgattcaaaacatatcgattcttatccacttcttgttcattgtgtttaattagactatcacgataagctgaatttaactcgggttttattaaaattaaaaattttaaattacttaaaaatataatagtttataataaaaagtttaatcattatgtaataaatacaaaaacgagcgagcgagcgcataaaaaaactggaaaatataatgtactaccctgtacgagaatctttttggatctacgatccactattcactcactattcactatgatgagcatagtaaaaaatattagatcttccttgtccttgtcgagcatcttgttgagccaggcacgaatagtctcatttaaacgtgtattaaaagtgcaatatagctctacctctgtcacttatatagaatgcccgtaaaatctttctcttttcagccgagccatctaagatttcggcacgatcatcccggccgctgtgagtggcgacggttgtattacactacacagttgccagattttatataatttataaagagaaaagaaatacgcacaaacaaatgaacgggcattaagacggtttaatgataaaaaaatatgtttctgcataaaaataagatagtgccatgactccatggcactacctcaccggccgccactgacttatacaggtagtcttcggtctgcttttctttttttccgggggttgccattccactctcggctttgggagtcgatgtttctccattctttttacattgccactccaacaaagttgtttttcctggatttcttctattatgtttgttttcctattcattgtatatcgtactcgttcattcgttatgtgtgagactctagagatgcaggccgatcttcgccagaagtccatttccagtgcgagcaacttatgttccgttcccttattctccatatatttatatccatatagtaccacactttttaagatgctattatatagctgtgttttcttttcttctgatatggttttttgaccaaagtagtgagttcaaagctcctattattcttccctttcataattctttcctctatttcgaattctgcccttccaatttgttgaattctctttccaacatatacataatcagagctttgttcgataaccatatcatcctctagttgtgactcatttttctctcctcctatactcatatatttggctttaggccccattttttgtattctcgtaacagccggtttgtcataaatattagatcatctttaccctgggc

SEQ ID NO: 428 - DNA, 640 bp, Diabrotica virgifera
  SmartBlast Evalue=3E-11; Info=Kakapo (Fragment) n=1 Tax=Aedes aegypti RepID=Q17GY9_AEDAE
cagtgcgttactttaggtccacaatactttgttcaacttcttggctaactggaataattggatctgtttttggatctgttatggtaatttttaagggaaattttatgttcagttaaagcagtggctatatccgacaactgattgttatctaaaaacgtaacatcgtgtgatgagggatcatatattacgttcggttctatcctcactaccgtaattgttactattttattcggttaatctgggtccattacttcttcaaatataataagccctttctctatagcttcttgcatacttatttttccctcggaagaaatataatgacccgttgaatctataatttccttctctagagctttattaactggcagtatatttttactgacggtatcgacaacagttattgaatttgaatttataagtttaagattaacacattcctcagaggtaactcacctcagaaggcaaagcgtaaatatgtttttcaaacgacttcttttcgttcgtaatgaagtctgttgtaatacccctatcattaaacgttttagttgatgttgttgtacttactgtaggagtttttattatttgacctgttactatcttttctgaatttttagagtcgggtgctagttttccttcg

SEQ ID NO: 429 - DNA, 617 bp, Diabrotica virgifera
  SmartBlast Evalue=0.000000001; Info="Nesprin-1, putative n=1 Tax=Pediculus humanus corporis RepID=E0VIH8_PEDHC"
gagtgcgttactttaggtccacaatattttgctcaacttcttggctaactggaataattgtatctgtttttggatctgttatggtaattttttaaaggaaattttatgttcagttaaagcagtggctatatccgacaactgattgttatctaaaaacgtaacatcgtgtgatgagggatcatacatttcgttcggttctatcctcactaccgtgattgtattttattcggttaatctgggtccattacttcttcaaatataataagccctttctctatagcttcttgcatacttatttttccctcggaagaaatataatgacccgttgaatctataattttcttctctagagctttattaactggcagattatttttactgacggtatcgacaacagttattgaatttgaatttataagtttaagattaacacattcctcagaggtaactcacctcagaaggcaaatcgtaaatatgtttttcaaacaactcttttcgttcgtagtgaagtctgttgtaattgtaatacccctatcattaaacgttttagttgatgttgttgtacttactgtaggagtttttattatttgacctgtcactatattttctgaattttt

SEQ ID NO: 430 - DNA, 1588 bp, Diabrotica virgifera
  SmartBlast Evalue=9E-33; Info="Bullous pemphigoid antigen 1, isoforms 6/9/10 n=1 Tax=Camponotus floridanus RepID=E2AVR2_ 9HYME"
ataagtcagaaaaaccagccacacacaagtaactagtgataaatggcatcaaaaacagcataacttgccggaagagcattggatactcggatttatatcccatccagaagtcaattaagaatttttctttaaaactgtcttctattaggtcgatgaatgtttcctgtaattccagctaatttggtggggttcctgcaaagtaatttctgatccagtcaagtttggaataatcttcagagaaatatttattaaaactttctggaagagatctcaagggactaattattatatcagcaaccaaatctggtattgaagatatttcgttttcgtcaaaaaatgatgacagcgaagaaagcagtacacgacccgacagaccgcagtggcacattcgcagacagaggatcagcgtaattgcttattttaccaacgcgtaccacctgaaatcttcccgcgtacgaccagtggtacgtgtaccaccggttgggaacccctgatctatattataaatgaaatttgcggaaataattttgccacatttaagacaatccgcatattgctcgaatgaaaagcacaacttattacaagtcgacagatatatctgaaagagcgaaggtcagaccgatcgaaaattttggttatgcgacgttgtcagatcaatcacgcttcaaaggtttttcggctttttatttgttacctgtttcacagtaaaatctcattctgcttctttctgcgtaaatttttaaacactgtgtacctgcaatattgattaaaaactacctcctgtgtagataatcattaatcaatgttaatacttgaatgagcaccagtttgtgcatggacaattttatgactactgggatctcatagtccctgtttcacaagttcaggaattgataggctacgagttaaaggcgctaaaagttcattcgtaccatctggatctaagataccacggtcaatggcttcagtaaagtaaatcacctctttgggaatctacgatcttaccttgctcttcatctaatttttgagcttccaaggcttcttgtaaggtaagagactcaccgctagaagatacaaatacgcttttttgatccaaaatctgagcagtttctggaacactaatctgcactaacagtgtctttggtttcactatcttcttccttagtttttgtaaaacaactttcttagcctcacgttcggggttaagtgactgtgctttgccaatttcaactttataggttctatcgttatacgagcacgagttttcttggcttcagaaagtccacgttgttcgtataagctaatagtggcagtacttaatgtctttattttggaaggctcaatttgagaaattccctgagtaggcaaataatcttatacttctttatgtgtcgcgttagtttgttattctaatttttttagagtgggtgggtctattataccttgttcaagggttacctcagcaggaatttgttcaccagtctttggattggcaaagaaaagatgtttgactatttttatggttgcgttgggagcaattactggagtaccttcgacagccaacatacctaatggagcagcatctttc

SEQ ID NO: 431 - DNA, 708 bp, Diabrotica virgifera
  SmartBlast Evalue=2E-27; Info="Bullous pemphigoid antigen 1, isoforms 6/9/10 n=1 Tax=Camponotus floridanus RepID=E2AVR2_ 9HYME"
ttgttgtcgaaaattctggcaaaaatataacattgaaagatgctgctccattaggtatgttggctgtcgaaggtactccagtaattgctcccaacgcaaccataaaaatagtcaaaaatcttttctttgccaatccaaagactggtgaacaaattcctgctgagataacccttgaaaaaggtataatagaccaacccactctagaaaaattagaataacaaaacaacgcgacacataaagaagtataagattatttgccttatcagggaatttctcaaattgagcgttccaaaataaagacattaagtactgccactattagcttatacgaacaacatggaccttctgaataatatagcgatagaacctataaagttgaaattggcaaagcacagtcacttaaccccgaacgtgaggctaagaaagttgttttacaaaaactaaagaagaacatcgtgaaaccaaagacactgttagtgtagattagtgttccagaaactgctcagattttggatcaaaaaagcgtatttgtatcttctagcggtgagtctcttaccttacaagaagccttggaagcccaaaaattagatgaagagcaaggtaaaatcgtagatccccaaagaggtgatttacttactataaacgaagccattgaccgtggtatcttagatccagatggtacgaatgaactcttagtgcctttaaatc

SEQ ID NO: 432 - DNA, 1589 bp, Diabrotica virgifera
  SmartBlast Evalue=4E-31; Info="Bullous pemphigoid antigen 1, isoforms 6/9/10 n=1 Tax=Camponotus floridanus RepID=E2AVR2_ 9HYME"
aataagtcagaaaaactagccacacacaagtaactagtgataaatggcatcaaaaacagcatagcttgccggaagagcattggatactcggatttatatcccatccagaagtcaattaagaatttttctttaaaactgtcttctattaggtcgatgaatgtttcctgtaattccagctaatttggtggggttcctgcaaaagaatttctgatccagtcaagtttggaataatcttcagagaaatatttattaaaactttctggaagagatctcaagggactaattattatatcagcaaccaaatctggtattgaagatatttcgttttcgtcaaaaaatgatgacagcgaaggaagcagtacccgaccccacagaccgcagtggcacattcgcagacagaggaccagcgtaattgcttattttaccaacgcgtaccacctgaaatcttcccgcgtacgaccagtggtacgtgtaccaccggttgggaacccctgatctatattataaatgaaatttgcggaaataattttgccacatttaatacaatccgcatattgctcgaatgtaaagcacaacttaatacaagtcgacatatatatctgaaacaacgaaggtcagaccgatcgaaaattttggttatgcgacgttgtcagatcaatcacgcgtcaaaggtttttcggccttttatttgttacctgtttcactgtacaatctcattctgcttctttctgcgtaaatttttaaacactgtgtacctgcaatattgattaaaaactacctcctgtgtagatagtcattaatcaatgttaatacttaaatgagcaccagtttgtgcatggacaattttatgactactgggatctcatagtccctgtttcacaagttcaggaattgataggctacgagtaaaaggcactaaaagttcattcgtaccatctggatctaagataccacggtcaatggcttcagtaaagtaaatcacctctttggggatctacgatcttaccttgctcttcagctaatttttgggcttccaatgcttcttgtaaggtaagagactcaccgctagaagatacaaatacgcttttttgatccaaaatctgagcagtttctggaacactaatctaccctaacagtgtctttggtttcacgatgttcttccttagtttttgtaaaacaactttcttagccttacgttcggggttaagtgactgtgctttgccaatttcaactttataggttctatcgttatacgagcacgagttttcttggcttcagaaagtccatgttgttcgtataagctaatagtggcagtacttaatgcctttgttttggaaggctcaatttgagaaattccctgggtaggcaagtaatcttatacttctttatgtgtcgcgttggtttgttattctaatttttctagtatgggttggtctattatacctttttcaagggttacctcagcaggaatttgttcaccagtttttggattggcaaagaaaagatgtttgactatttgtatggttgcgttgggagcaattactggagtaccttcgacaaccaacatacctaatggagcagcatctttc

SEQ ID NO: 433 - DNA, 1300 bp, Diabrotica virgifera
  SmartBlast Evalue=1E-15; Info=Transposase n=1 Tax=Aedes aegypti RepID=A9X5H4_AEDAE
ttagcctatcaattcctaaacttgtgaaacagggactattagatcagagtagtcataaaattgtccatccagaactggatggacaaattgtccactggtgctcatttaagtattatcattgggtaataactacctaaacagggggtagtttttgatcaatgcttcaggtacacagtgtttaaaaatttacgcaggaagaagcagaataaaattttactgtgaaacaggtaacaaataaaaagccgaaaaacctttgaagcgtgattgatccgacaacgtcgcataaccaaaattttcgatcggtctgaccttcgctgtttcagatatatctgtcgacttgtattaagttgtgctttacattcgagcaatatgcggattgtcttaaatgtggcaaaattatttccgcaaatttcatttataatatagatcaggggttcccaaccggtggtacacgtaccactggtcgtacgaggaaagatttcaggtggtacgcgttggtaaaataagcaattacgctggtcctctgtctgcgaatgtgccactgcggtctgtcgggtcgggtactgcttctttcgctgtcatcattttttgacgaaaacgaaatatcttcaataccagatttggttgctgatataataattattcccttgagatctcttccagaaagttttaataaatatttctctgaagattattccaaacttgactggatcagaaattcttttgcaggaaccccaccaaattagttggaattacaggaaacattcatcgacataatagaagacagttctatgaaagacagttttaaagaaaaatccttaattgacttctggatgggatataaatccgagtatccaatgctcttccggcaagctatgctgtttttgatgccatttatcactagttacttgtgtgtggctggtttttctgacttattgtgtgtaaaaaataaatatagaaacagactaacaagtacatattgaagaggactttttcactatatttttgtttagctatgagtaataaactgtaatgtgcataattgtcttacttttcctttattgtcaaaattttattaataaacggatttttaaataaaaatgagaaagcataattgacaactatttgtatttattgttgtcttgatagtcttggaaaagtgaatgaataagtaaataatataaagttatattagttatttaattaaaatgaaacaaaccaatagacatgtttctgagaataaatatattatttctaaaaaaataggatcaggaggagcttccttccactttatgccccc

SEQ ID NO: 434 - DNA, 7725 bp, Diabrotica virgifera
  SmartBlast Evalue=0; Info="ABC transporter, putative n=1 Tax= Pediculus humanus corporis RepID=E0W387_PEDHC"
cacaaatacgaatagataggcaatcacaatcttcgagagtacttactggttcagtcgctgacagtccgcgaatttcaatccgcaccatggaggcagttctgcacgagagtacttttgtagggcaatctaaagacgccgccgccgttgtcaaatcgaacggggtcaacggcgattcagtgaatttttccgtaaaggtgaatcttaaccaagaaaagactttgatttgtgacgatggtactaatggcaaaatgtgccaaaatacggtggacttggagtttcaaaatattagttttcgtgcgacgcaagggaatatatttaccaaaaggactacaaaagaaattttgcatcaagtcggaggacgtttccagcccgggcagctgatagccataatggggccatcgggtgcaggcaaaagtacattattggatgttttgagtgggtataggatacgtggcgtaacaggttcagtatacgttaacggccaaccaagaagtttaaaggaattcaggaaaacgtcatgttacattacgcaagatgaccgtctgcagcctttactcactgtggacgaaaatatgtgggtagctgcagatttgaaactaccttccagtgtcagcaacagtaataaacggagtataattaacaatattttaaaaacactaaatcttgaaaatacaaaaaaagtgagagcagctggtctttccggtggacagaaaaagaggttgtcaatagctttagagttagtaaataatccaatggtcatgttcttggatgaaccaaccacgggattggatagttcgtcttgttcaacatgtataacactacttaagaaactaactatgcaaggaaaaacaatcatatgtaccattcaccagccttcagctactttatttgcaatgtttgatcaggtgtacgtagtaggaaatgggtactgcctatatcaaggtagtacgaataaactggttccatttttgcaagactgtgggtttccctgtccgcagtatcacaatcctgctgactacgtaatagaactagcatgtattgagcacggacctgagaaacctgaatatatgagggatataattcagaacggacaatcttaccaatattttaacgagcctgaaaagatgaaaagcaccatttgtaactacccaggtcccaaacctattaaacgagttgttagcagtgatgaatcctcttttcccacatcacaattccatcaactaggagttcttatgagacggggatttattaaagcctacagagataagatgcttacctaccttcgtattggaacaaacataatagttggactgatgttgggcagcctctattggaaagctggaagtgatggatctaaagttttggataattttaatttattgtttgcgatattattgcaccatatgatgtccacaatgatgttgacgattttaacatttccccaggaaatgtcgattttaataaaagaacacttcaaccgttggtattcattaaaaatgtattacacatcggtaaccatagtggatattccggtttcggttattggctgcttcctgttttcactcataatatactatatgacagatcaaccaaacgataaagccagattcctgatattcttcgtcacttgcatgttggtagttctagtagctcaaggagttggtctaactattggcgcatattttgatgttgtgaacggaacttttgttggaccaaccctgatggtacccatgatgatgttctccggttttggcgttcgtctacgtgatctgccgaccataatgtactacggcagttttacttcttacttaaggtacggcttggaaggagtagtccaggcggtgtacggaatggacaggggtattcttcaatgtcccgaagacaaattttgcttctacaagtatccgaagactttcctggaaatagtagatgtcaggtcggatcagttcgataatgacatcattgctttactgcttttcttgtttgttttgagaattgcggcgtacgtagtgctgaggtacaaactggcatctgtgcgatagagcctgtttatgttttaataacttttattagaagtaggtgattgaagcctcggttttggtaaacagtgttgttagaaggacatttatttaaattttactcaaaaaaatatttttttttctttagaaaacatcattttttgtgacaatcaaaggaacttagagaaaatttacaataatgtttttaaaattttccaaagattatgatttattaaaagataaaagtatgagatcgtcactcagtacagtggttcccaagtagcaatttttcgacgcattggttgtcagtacaaacaaatgcactgtctacaactttgcccgagagcattttcagttgtttcggccaacgtcccctaccccgactgacattacgatgttacaacctgtagttatacgggcaactaatttattaccattttgacaactacatatcacaattcagttttttcaacaatcgcaacgacttaaaaatgttataatgctaaactaattattatatattttattttgatagaaattttggatttatttaacaacctgtttatttgtttttttaatagctggtttccattccattgttttatcagtagatttgagatttgataaccacctttgtatctgctttggtagacagggttgccaggtcagttttaactctttcagtagttttgttttcacaaaatcagtagattctttttaggccatgtaaatatacagtaatacagtgatatgcacatccgtcttaaatgtcccaagagcaattccacaaaattggaaacctaattattccaaaccaccaactggtaattatcattttttagctaaaatctactaaatcaaaaactaaaatatacttaagtattttgggatatatttgggattttttataataaaaacaacagctaacttaaggggataggcgcaaaatgtcgtctgttaaaatgttcaatgtattttaaatgttttcgttttttgcgaatccttagaaaactaataagtatttttgaaaaatttaaacgcacaaagaaagattacttaccaaggaccgaaagtccctgaaaacttctataatgtttattttaatacgttacaggggtgaaaaaagaaaaaatttagtgacttttaattccaaatatctcgttcaaaagaaacgttttggtttttctaaataatgcagtctttcattctgcgtttaaatttttcaaaaagacgtattatagtttcctcatgattcgaaaaaaatggatcaaattctgttgaaatataccaaaaatctactaaaaatattgcctactagaattttttaaaaaatatcaaaaatctaccaaaaaagtagaaatctactaaatgtggcaacgctgttaatgagaatgatacacttttgacactggtcacatgacctctgtcacccaataagagggtgcgttctaaaatggttttgatagtcggcgcggccgggtttggttggcgattggacttctaagttgtcttatccgtctaaggttggtaataaggtattttttagtaatattggtaatattgtttaatgcgccattttggttttacttgagatttttgggatgtaaagaaaatgaaaacacagaatataaaaaatgcaggcattttctgataactttaaaagcaccatcaatacattaaatttatacagaacatctttaacataaattttgacttttatattaaaatttgattttttaaatttgcatattttttgtcaaaaatgtcataaaaaaagcagcgcgtgtgttttttaaaggtgaaatatccatatttgacggtaatctgagatgcgtttataaatttcacatctggtaataagtcctttatgtatttatatcatataaatttaaatacccaatacgatgtcaaaacagtttactttttggttttcgcattcaccatacagttgttaaaaatataggtaaaaaaacataactagtctgactccttgagcaaccattgcacgcgcaggtgctttttatagtcgcttcagttgtcttatgcaacggttacgaaacgatgttgcttaaacaggaggttgcctaggcaacgtcaagacaactcaaaaatcgtccaccaaatcagtgcagaatagggtcgtcttttaggcaataacaacgttgtaagaaaacgttgccacgcggtagacaacgttgtcgcctcgacaaattgctacttgggttatacctattaatgagccaattctgtaaaaatcatgaactctcatacaattttggtagtacctagtgcaattaaaagtgaaataagaaatataatttcatacttacgttatgatattatccgttatggtatgtaggtactccattcaaatgttacatttagggttgcatttcttagaggagtcaatattattatttttttaatgtgtatggcggttcagtagaagcttaagttcaagtttttggggtcgccacccttgtcccccggccgccatcttggaaaaaggggtgcaaaggacgttcgcgctgtatctcctaaactagcaaccctacagaaaatttaattagaaataaaatgtagcaaattaaattttctacaattttatatttattactttttatcgtcaagtgatatacaaaaaagttataaaataaacaaaaataagaaaaaaatttgtaagaagtttccttttggaggttataacttttttccgttcatttcacaataaaataatatcattgcgattttatggaggatttctcaacgaacaatttccactatttataaagttgtttaattttacttatttatctgggctttacagcgctccaaacttgactagattctcgaaatctcataggaatacacagacaatttctagacaaaataatatttaatattatatgttgaaatagatctatcaaaggttattatttttttatggtcaaggcttcaagttaagatctgaatcagtatccgaggtgaatttttgtggtatagtgagagttagagagttagtgttagcgtcattgtcggtaattcatctttttcatcaataattaatgttgatatgtccaccccacataacaatttcatgttcttagtagattcatagaacatacttttcagaaaaagtatatactaagaatatgcgtaattaccattgcgaatgtgcagagcacatactgagtatatactacattacagtacttaaacgttctatgtatatacttagaatgtactaccgcacttcttctcagtatataccaagaatatactttttaggatattctaagaaggtgctataaaccttctatttatatacttagaatgtactacctcacatcttttagtatataggaagaatgtactttttagtatatgggaagaatattacaaggaagtgctatattgctcagaagcatgttttcagcatcaccgaatctcatcctaggttctactttctactaaatttacatattacatatgagaatgtagttagtacattctacaatattacttaaaaagtaaatataaaatattatataaattttagttagttatatcaatattatataggtaagtaggtatatatatttagttattatgtgcatataaaaataaaaatgctgaatatataaatttatatattcatattcatatacctatcgtacccaaataaatattatgtaacatatgtatgtaaataactaaaatttatatgttgcttatatgtacctatatacatacttactatttaagtaatattgaagtaccaaaatgaattttttatttgtaagttgacagcaaacaaaataaaacgtttaattatgcatgttcctattcctggttgaaatacttggtcttcctcacaacacagcatagacattgttagtgttaagtgtagacacaaatgccaaatgcctattcagtaactattttcatattttgtatttttcctttgttcccaaccccctacccgctaacccctatgcaggtatgcagcggtcgtttccgctttgtttgtgccggttgtgggttttggctcagccacacagcttacctgaatgtcaattccatgtaaaaataaaattcttcataagaatactcaataaacttaatcaaaatagtaaatgcatttcagttatgaaagcgaaacgacaatttctcctttttcgttaatacaattaattcttaaacatttttaccatacaattaaaacaattttaaataatgaattcggtagtttaattaatagtacctacatacataaatttttaaatttcattaattattcttaacgaagttgataatctataggctaacattattcttcctatacatacatatatattatttttaagatattttaaaagtatctacttataagtatgtgttaagtatgtacttataagtatgtgctaagaatattcggtaaaagtatattctgagaatagtatctacttataagtatgtgttaagaatgtacttataagtatgtgctaagaatattcggtaaaggtacattctaagaataaacttttacgaatattccgagttactacgtacacgaatgtactcagtatattcggtacgagaatatactttaaagtatgtgcaaagaacatgaaatttagaatgttttttaaggtacatgctatgcttgtactacgcatatactaaaaagaatatactctgacgaatgttggtagtatatgcttagaacatgatacgaacatcattgttatgtgggacgatgttgctgcaactttcaccaccacaatggaaacacactgctgaacatttgcatttgagatctgcttttcatcaaccacatgcacttccagtttccattgcatctgcaaaaggtgaatttaataagctcgggggtactggaggcttagaagtttggattagtatccaaaatttcccatgctttttccagtcccaatcttctggatcacaatgtttaccgagccatgactgaatctggtgatacactcggagtctttggaaacggactgcatcttgtgttggaggaagtgcgaagagattaaatgcattgttttcactgttttagcgaattgtttttatctccgggtttttagagattcgtctttatttccgccatataaagaggcgataaacgttcgtcgaccccaaaacttgaacttgagcttctactgataccccctacacattgaaaaaaaataaaattgactgctctaataaatgcaacgtatgccctaaaaaatgtaacatatcaatggactaatggtaaaagttgaacaaatacttcctagaactgcagaagaatctttcttacttactccacaaaccaattcaaaaagtactacgttaagagtgtatgaagagtatttcatataaatttccaacaaaaaatctagtcattttacccaattaggtaaatacatttttgtcatttttggcatttctctgattttggattgtcgtttcgtttcgatagggcttttcatcgattgtcatttgtttcgagcttctgtcatatgttgtataatctgtgtataatattaatatacacggattatacgacatatgacagaggctcgaaacaagtgactgtgaatgaaaagccctatacgctgtgagcttcgctggtgtcgctcctagcggactactaattcaactttcaccggtaatttttaaatttattatttaattg

SEQ ID NO: 435 - DNA, 6598 bp, Diabrotica virgifera
ttttgcatccagtatttacactaatactttatttcttttcaaaacttgaggatagtatgaagaaagtatgaaaacgttgaggatatggcaacggtgtcaaattttaaatttagatccagtcacagaacaataatttctctggttaatgcggggttgccaccacctcagaaccgcgtgaaatagaagtcagaggtttcgattacgatatgagttagagaatagcaatccaaacacaaaaatgacgcgatagatatcaaacattccgattttgggtaattacgattcgacttggtcatttctattcgatttgttaaaagttacagaatagggctgaatattattatttttttaatgtgtatggcggttcagtagaagcttaagttcaagtttttggggtcgccacccttgtcccccggccgccatcttggaaaaaggggtgcaaaggacgttcgcgctgtatctcctaaactagcaaccctacagaaaatttaattagaaataaaatgtagcaaattaaattttctacaattttatatttattactttttatcgtcaagtgatatacaaaaaagttataaaataaacaaaaataagaaaaaaatttgtaagaagtttccttttggaggttataacttttttccgttcatttcacaataaaataatatcattgcgattttatggaggatttctcaacgaacaatttccactatttataaagttgtttaattttacttatttatctgggctttacagcgctccaaacttgactagattctcgaaatctcataggaatacacagacaatttctagacaaaataatatttaatattatatgttgaaatagatctatcaaaggttattatttttttatggtcaaggcttcaagttaagatctgaatcagtatccgaggtgaatttttgtggtatagtgagagttagagagttagtgttagcgtcattgtcggtaattcatctttttcatcaataattaatgttgatatgtccaccccacataacaatttcatgttcttagtagattcatagaacatacttttcagaaaaagtatatactaagaatatgcgtaattaccattgcgaatgtgcagagcacatactgagtatatactacattacagtacttaaacgttctatgtatatacttagaatgtactaccgcacttcttctcagtatataccaagaatatactttttaggatattctaagaaggtgctataaaccttctatttatatacttagaatgtactacctcacatcttttagtatataggaagaatgtactttttagtatatgggaagaatattacaaggaagtgctatattgctcagaagcatgttttcagcatcaccgaatctcatcctaggttctactttctactaaatttacatattacatatgagaatgtagttagtacattctacaatattacttaaaaagtaaatataaaatattatataaattttagttagttatatcaatattatataggtaagtaggtatatatatttagttattatgtgcatataaaaataaaaatgctgaatatataaatttatatattcatattcatatacctatcgtacccaaataaatattatgtaacatatgtatgtaaataactaaaatttatatgttgcttatatgtacctatatacatacttactatttaagtaatattgaagtaccaaaatgaattttttatttgtaagttgacagcaaacaaaataaaacgtttaattatgcatgttcctattcctggttgaaatacttggtcttcctcacaacacagcatagacattgttagtgttaagtgtagacacaaatgccaaatgcctattcagtaactattttcatattttgtatttttcctttgttcccaaccccctacccgctaacccctatgcaggtatgcagcggtcgtttccgctttgtttgtgccggttgtgggttttggctcagccacacagcttacctgaatgtcaattccatgtaaaaataaaattcttcataagaatactcaataaacttaatcaaaatagtaaatgcatttcagttatgaaagcgaaacgacaatttctcctttttcgttaatacaattaattcttaaacatttttaccatacaattaaaacaattttaaataatgaattcggtagtttaattaatagtacctacatacataaatttttaaatttcattaattattcttaacgaagttgataatctataggctaacattattcttcctatacatacatatatattatttttaagatattttaaaagtatctacttataagtatgtgttaagtatgtacttataagtatgtgctaagaatattcggtaaaagtatattctgagaatagtatctacttataagtatgtgttaagaatgtacttataagtatgtgctaagaatattcggtaaaggtacattctaagaataaacttttacgaatattccgagttactacgtacacgaatgtactcagtatattcggtacgagaatatactttaaagtatgtgcaaagaacatgaaatttagaatgttttttaaggtacatgctatgcttgtactacgcatatactaaaaagaatatactctgacgaatgttggtagtatatgcttagaacatgatacgaacatcattgttatgtgggacgatgttgctgcaactttcaccaccacaatggaaacacactgctgaacatttgcatttgagatctgcttttcatcaaccacatgcacttccagtttccattgcatctgcaaaaggtgaatttaataagctcgggggtactggaggcttagaagtttggattagtatccaaaatttcccatgctttttccagtcccaatcttctggatcacaatgtttaccgagccatgactgaatctggtgatacactcggagtctttggaaacggactgcatcttgtgttggaggaagtgcgaagagattaaatgcattgttttcactgttttagcgaattgtttttatctccgggtttttagagattcgtctttatttccgccatataaagaggcgataaacgttcgtcgaccccaaaacttgaacttgagcttctactgataccccctacacattgaaaaaaaataaaattgactgctctaataaatgcaacgtatgccctaaaaaatgtaacatatcaatggactaatggtaaaagttgaacaaatacttcctagaactgcagaagaatctttcttacttactccacaaaccaattcaaaaagtactacgttaagagtgtatgaagagtatttcatataaatttccaacaaaaaatctagtcattttacccaattaggtaaatacatttttgtcatttttggcatttctctgattttggattgtcgtttcgtttcgatagggcttttcatcgattgtcatttgtttcgagcttctgtcatgtgttgtataatgtgtgtataatattaatatacacggattatatgacacatgacagaggctcgacacaaatgactgagaatgaaaagccctattctcactgccttaaatgaaacacagctcataatattttttataggaagttattgccataccacaaagtacaggcttcgtctgcagatatttttatggtaatagttttaacaattactcttatatcatggtataggttgtctggctctaaacagtgtcgtgtttattcttaagtatataaagaatgtttcatttaagtaatttttaaactttgctgtgatattgtattaccattttcttgttcatatagcatcatgattgcgcttgggatatgatgtttagaactatcctcttttattaggcaaaaaatgcctaataaacattaggcaactcaacatttatcttctttatgacgtcactgataattggaccgcattatgtaataacggattaaccgccaaaagtccaaaatcgagatattagtgccatcttgcagctagggtgcaaatctctgtataaaaatatgatttttgtaaaaaaattcaaaaaaaagctgtttttaaatgcctgtattaagcgacattttttattttattaaaaaaaaatctcgcactaggatttgtaatatcgaactaaacgccaataatggtacataatccattgtcataaacaaatatccgcatctttgtaagtgtaatattttaattaattctttaattcttattaacttaattctttattacaaaacataacatatttactaacgtttaagatatcgaattaaaagacatcctttgtcaggtaacatcagattaagcgccaaatatgtctcttaatccggtattcggatcttaactcatgcatatcttaaaaaatcattaacgaattaagcgacatttgatcgaataacttttaaaatataaattatttttaaaaaattttaaacacatgtaaaagtctatttacatttgccttaatgtattaaatatgaaacatgtcagtactatattttagaaatagtaccaaaaacaaatttaaaatctttaaaccgatttatctcaaaactacattttggcgcttaatccgctattacataacgcggtccagttgacgttagcgctaccagtagtagaatcatcacgaatcacgaaacgtaaacataaatatttcaccattgggatcatgatgatggttcatttcttattgttattatgaatagagtaccttaagttaacaatttcttatattaagttaaaaaaatatattatatatttattctgcatgtatctaggtatgcctagaaacccaagtcttagtaattaaatgtaaaaaataagtcattttaataattgttttgtactatattataagttatattaggcaatggtttgtaacatatttatttttaaagacaataataattatgtgtaggtataagtaatggattttgggaagagctatgacctcgaaaacatcacaaagaatataactaaatatctcttttcttactcagactctttcaagtcttttgcaatatttcagaatctaaaatatttactaatattactaaagtattggattttgacaaaaactatgaattatgccgatttagttgatacctacacaagtttatgtgaaattttcaaagtcatagctcgtcccaaaatccattaggtacctatacaattgtttgtattggtaacagtcaatctatgaaattttataggtgtgtaaatacaaaaataaatatttaaacatataaaataaaatatattttttgcacgattgatcatttttgactgtttaccgtgacagattttacgtcagtaggtgacatttactagcaactcgacggtaagtaatccaactcgacggtaagtactccaactcgacggtaagtaattcacttaccgtcgagttaaaaaatctcttaattttaatttattttttgaaagaataaagaaaactaacgaattatttattaatattgaaacttatggtacaatttgttaaattatttaatgaaatcccacttgtttgggctgtggtttcacttctaacagaaactcctgcagaatcgcatacattagtagtatccaacattttttctcttcaaatacgcgatcaaagttgaaaacttggaaatatcaatgccatcataaagaaaaacggtggatttaatcattgaatattctgcccagaggcttccaggagctttcaactgcatatgtctttgaacgaaatatgccaatagagtcttttcttcgattcttaaattcttgccttcgcaccattttttaaaactttggtaggtattttgataacggattttggatttttcgggaataattgcggaacacccttcttcccaagcccgttcaatttcttcaaattcactttcgctcatattttaatttataataatcaaaattgtacttaaaattattgacaactaaataaaaactcaattctccattgttgttatgcaccctagttactacctaacaaccaaagtatctatcttgataaaatgaatgaaactagtcaatatgacgaaaatgtttaattttataatttataatggtatcaatcgtgcaaaaaacgttataagcatgtcgaacgttaagggtaaccgatctcagacaataattggagtcgtcgctccgctcctcctccaaacaattgtcttcgatcggtataaaacccttaccgttctccatacttaatatactattactaaaatttacatttggcaacccggcagttttatttattttcacatagcgaagatatttaaaattgtaaacacaaacagtcatatcataattacctgtaacccaagaatacatcgtattgttttatttattatatttggtattgtcatgatatttcgatcgcgagtatcattattaattaccaatagtgtacaattagtgcaagatttacaccaaggcgatttaccttgaagattaaggatttatagacggtttcaaacaaaatcttcagagaacccgaatttttgtgtagtgttgtgtgcagataaagcttgttttaccagaaatggtgtgtttaactttcataattgccaaaagtatgaatttatgggctgg

SEQ ID NO: 436 - DNA, 6452 bp, Diabrotica virgifera
ttttgcatccagtatttacactaatactttatttcttttcaaaacttgaggatagtatgaagaaagtatgaaaacgttgaggatatggcaacggtgtcaaattttaaatttagatccagtcacagaacaataatttctctggttaatgcggggttgccaccacctcagaaccgcgtgaaatagaagtcagaggtttcgattacgatatgagttagagaatagcaatccaaacacaaaaatgacgcgatagatatcaaacattccgattttgggtaattacgattcgacttggtcatttctattcgatttgttaaaagttacagaatagggctgaatattattatttttttaatgtgtatggcggttcagtagaagcttaagttcaagtttttggggtcgccacccttgtcccccggccgccatcttggaaaaaggggtgcaaaggacgttcgcgctgtatctcctaaactagcaaccctacagaaaatttaattagaaataaaatgtagcaaattaaattttctacaattttatatttattactttttatcgtcaagtgatatacaaaaaagttataaaataaacaaaaataagaaaaaaatttgtaagaagtttccttttggaggttataacttttttccgttcatttcacaataaaataatatcattgcgattttatggaggatttctcaacgaacaatttccactatttataaagttgtttaattttacttatttatctgggctttacagcgctccaaacttgactagattctcgaaatctcataggaatacacagacaatttctagacaaaataatatttaatattatatgttgaaatagatctatcaaaggttattatttttttatggtcaaggcttcaagttaagatctgaatcagtatccgaggtgaatttttgtggtatagtgagagttagagagttagtgttagcgtcattgtcggtaattcatctttttcatcaataattaatgttgatatgtccaccccacataacaatttcatgttcttagtagattcatagaacatacttttcagaaaaagtatatactaagaatatgcgtaattaccattgcgaatgtgcagagcacatactgagtatatactacattacagtacttaaacgttctatgtatatacttagaatgtactaccgcacttcttctcagtatataccaagaatatactttttaggatattctaagaaggtgctataaaccttctatttatatacttagaatgtactacctcacatcttttagtatataggaagaatgtactttttagtatatgggaagaatattacaaggaagtgctatattgctcagaagcatgttttcagcatcaccgaatctcatcctaggttctactttctactaaatttacatattacatatgagaatgtagttagtacattctacaatattacttaaaaagtaaatataaaatattatataaattttagttagttatatcaatattatataggtaagtaggtatatatatttagttattatgtgcatataaaaataaaaatgctgaatatataaatttatatattcatattcatatacctatcgtacccaaataaatattatgtaacatatgtatgtaaataactaaaatttatatgttgcttatatgtacctatatacatacttactatttaagtaatattgaagtaccaaaatgaattttttatttgtaagttgacagcaaacaaaataaaacgtttaattatgcatgttcctattcctggttgaaatacttggtcttcctcacaacacagcatagacattgttagtgttaagtgtagacacaaatgccaaatgcctattcagtaactattttcatattttgtatttttcctttgttcccaaccccctacccgctaacccctatgcaggtatgcagcggtcgtttccgctttgtttgtgccggttgtgggttttggctcagccacacagcttacctgaatgtcaattccatgtaaaaataaaattcttcataagaatactcaataaacttaatcaaaatagtaaatgcatttcagttatgaaagcgaaacgacaatttctcctttttcgttaatacaattaattcttaaacatttttaccatacaattaaaacaattttaaataatgaattcggtagtttaattaatagtacctacatacataaatttttaaatttcattaattattcttaacgaagttgataatctataggctaacattattcttcctatacatacatatatattatttttaagatattttaaaagtatctacttataagtatgtgttaagtatgtacttataagtatgtgctaagaatattcggtaaaagtatattctgagaatagtatctacttataagtatgtgttaagaatgtacttataagtatgtgctaagaatattcggtaaaggtacattctaagaataaacttttacgaatattccgagttactacgtacacgaatgtactcagtatattcggtacgagaatatactttaaagtatgtgcaaagaacatgaaatttagaatgttttttaaggtacatgctatgcttgtactacgcatatactaaaaagaatatactctgacgaatgttggtagtatatgcttagaacatgatacgaacatcattgttatgtgggacgatgttgctgcaactttcaccaccacaatggaaacacactgctgaacatttgcatttgagatctgcttttcatcaaccacatgcacttccagtttccattgcatctgcaaaaggtgaatttaataagctcgggggtactggaggcttagaagtttggattagtatccaaaatttcccatgctttttccagtcccaatcttctggatcacaatgtttaccgagccatgactgaatctggtgatacactcggagtctttggaaacggactgcatcttgtgttggaggaagtgcgaagagattaaatgcattgttttcactgttttagcgaattgtttttatctccgggtttttagagattcgtctttatttccgccatataaagaggcgataaacgttcgtcgaccccaaaacttgaacttgagcttctactgataccccctacacattgaaaaaaaataaaattgactgctctaataaatgcaacgtatgccctaaaaaatgtaacatatcaatggactaatggtaaaagttgaacaaatacttcctagaactgcagaagaatctttcttacttactccacaaaccaattcaaaaagtactacgttaagagtgtatgaagagtatttcatataaatttccaacaaaaaatctagtcattttacccaattaggtaaatacatttttgtcatttttggcatttctctgattttggattgtcgtttcgtttcgatagggcttttcatcgattgtcatttgtttcgagcttctgtcatgtgttgtataatgtgtgtataatattaatatacacggattatatgacacatgacagaggctcgacacaaatgactgagaatgaaaagccctattctcactgccttaaatgaaacacagctcataatattttttataggaagttattgccataccacaaagtacaggcttcgtctgcagatatttttatggtaatagttttaacaattactcttatatcatggtataggttgtctggctctaaacagtgtcgtgtttattcttaagtatataaagaatgtttcatttaagtaatttttaaactttgctgtgatattgtattaccattttcttgttcatatagcatcatgattgcgcttgggatatgatgtttagaactatcctcttttattaggcaaaaaatgcctaataaacattaggcaactcaacatttatcttctttatgacgtcactgataattggaccgcattatgtaataacggattaaccgccaaaagtccaaaatcgagatattagtgccatcttgcagctagggtgcaaatctctgtataaaaatatgatttttgtaaaaaaattcaaaaaaaagctgtttttaaatgcctgtattaagcgacattttttattttattaaaaaaaaatctcgcactaggatttgtaatatcgaactaaacgccaataatggtacataatccattgtcataaacaaatatccgcatctttgtaagtgtaatattttaattaattctttaattcttattaacttaattctttattacaaaacataacatatttactaacgtttaagatatcgaattaaaagacatcctttgtcaggtaacatcagattaagcgccaaatatgtctcttaatccggtattcggatcttaactcatgcatatcttaaaaaatcattaacgaattaagcgacatttgatcgaataacttttaaaatataaattatttttaaaaaattttaaacacatgtaaaagtctatttacatttgccttaatgtattaaatatgaaacatgtcagtactatattttagaaatagtaccaaaaacaaatttaaaatctttaaaccgatttatctcaaaactacattttggcgcttaatccgctattacataacgcggtccagttgacgttagcgctaccagtagtagaatcatcacgaatcacgaaacgtaaacataaatatttcaccattgggatcatgatgatggttcatttcttattgttattatgaatagagtaccttaagttaacaatttcttatattaagttaaaaaaatatattatatatttattctgcatgtatctaggtatgcctagaaacccaagtcttagtaattaaatgtaaaaaataagtcattttaataattgttttgtactatattataagttatattaggcaatggtttgtaacatatttatttttaaagacaataataattatgtgtaggtataagtaatggattttgggaagagctatgacctcgaaaacatcacaaagaatataactaaatatctcttttcttactcagactctttcaagtcttttgcaatatttcagaatctaaaatatttactaatattactaaagtattggattttgacaaaaactatgaattatgccgatttagttgatacctacacaagtttatgtgaaattttcaaagtcatagctcgtcccaaaatccattaggtacctatacaattgtttgtattggtaacagtcaatctatgaaattttataggtgtgtaaatacaaaaataaatatttaaacatataaaataaaatatattttttgcacgattgatcatttttgactgtttaccgtgacagattttacgtcagtaggtgacatttactagcaactcgacggtaagtaatccaactcgacggtaagtactccaactcgacggtaagtaattcacttaccgtcgagttaaaaaatctcttaattttaatttattttttgaaagaataaagaaaactaacgaattatttattaatattgaaacttatggtacaatttgttaaattatttaatgaaatcccacttgtttgggctgtggtttcacttctaacagaaactcctgcagaatcgcatacattagtagtattactagtattgcacaatattttttcggcaaaatctattttattttgaagagaatcttctacatagctttctgccactgtcgatgaacgccaacctccatgacgctttaatccgaggacatcaacacctttattagccaaaagcgttgctgatgtcctcctgaacgaatggccagtatagttctcgggattaggcaaatttaagaatttggcaatttgagaaggccagcccccgattgtccctttccctattacttgagcacaacattttcctttggcgtatcttaagaacaaatgatttgattttacttgtaatggacgaagttttatatactttataatggtatcaatcgtgcaaaaaacgttataagcatgtcgaacgttaagggtaaccgatctcagacaataattggagtcgtcgctccgctcctcctccaaacaattgtcttcgatcggtataaaacccttaccgttctccatacttaatatactattactaaaatttacatttggcaacccggcagttttatttattttcacatagcgaagatatttaaaattgtaaacacaaacagtcatatcataattacctgtaacccaagaatacatcgtattgttttatttattatatttggtattgtcatgatatttcgatcgcgagtatcattattaattaccaatagtgtacaattagtgcaagatttacaccaaggcgatttaccttgaagattaaggatttatagacggtttcaaacaaaatcttcagagaacccgaatttttgtgtagtgttgtgtgcagataaagcttgttttaccagaaatggtgtgtttaactttcataattgccaaaagtatgaatttatgggctgg

SEQ ID NO: 437 - DNA, 6049 bp, Diabrotica virgifera
ttttgcatccagtatttacactaatactttatttcttttcaaaacttgaggatagtatgaagaaagtatgaaaacgttgaggatatggcaacggtgtcaaattttaaatttagatccagtcacagaacaataatttctctggttaatgcggggttgccaccacctcagaaccgcgtgaaatagaagtcagaggtttcgattacgatatgagttagagaatagcaatccaaacacaaaaatgacgcgatagatatcaaacattccgattttgggtaattacgattcgacttggtcatttctattcgatttgttaaaagttacagaatagggctgaatattattatttttttaatgtgtatggcggttcagtagaagcttaagttcaagtttttggggtcgccacccttgtcccccggccgccatcttggaaaaaggggtgcaaaggacgttcgcgctgtatctcctaaactagcaaccctacagaaaatttaattagaaataaaatgtagcaaattaaattttctacaattttatatttattactttttatcgtcaagtgatatacaaaaaagttataaaataaacaaaaataagaaaaaaatttgtaagaagtttccttttggaggttataacttttttccgttcatttcacaataaaataatatcattgcgattttatggaggatttctcaacgaacaatttccactatttataaagttgtttaattttacttatttatctgggctttacagcgctccaaacttgactagattctcgaaatctcataggaatacacagacaatttctagacaaaataatatttaatattatatgttgaaatagatctatcaaaggttattatttttttatggtcaaggcttcaagttaagatctgaatcagtatccgaggtgaatttttgtggtatagtgagagttagagagttagtgttagcgtcattgtcggtaattcatctttttcatcaataattaatgttgatatgtccaccccacataacaatttcatgttcttagtagattcatagaacatacttttcagaaaaagtatatactaagaatatgcgtaattaccattgcgaatgtgcagagcacatactgagtatatactacattacagtacttaaacgttctatgtatatacttagaatgtactaccgcacttcttctcagtatataccaagaatatactttttaggatattctaagaaggtgctataaaccttctatttatatacttagaatgtactacctcacatcttttagtatataggaagaatgtactttttagtatatgggaagaatattacaaggaagtgctatattgctcagaagcatgttttcagcatcaccgaatctcatcctaggttctactttctactaaatttacatattacatatgagaatgtagttagtacattctacaatattacttaaaaagtaaatataaaatattatataaattttagttagttatatcaatattatataggtaagtaggtatatatatttagttattatgtgcatataaaaataaaaatgctgaatatataaatttatatattcatattcatatacctatcgtacccaaataaatattatgtaacatatgtatgtaaataactaaaatttatatgttgcttatatgtacctatatacatacttactatttaagtaatattgaagtaccaaaatgaattttttatttgtaagttgacagcaaacaaaataaaacgtttaattatgcatgttcctattcctggttgaaatacttggtcttcctcacaacacagcatagacattgttagtgttaagtgtagacacaaatgccaaatgcctattcagtaactattttcatattttgtatttttcctttgttcccaaccccctacccgctaacccctatgcaggtatgcagcggtcgtttccgctttgtttgtgccggttgtgggttttggctcagccacacagcttacctgaatgtcaattccatgtaaaaataaaattcttcataagaatactcaataaacttaatcaaaatagtaaatgcatttcagttatgaaagcgaaacgacaatttctcctttttcgttaatacaattaattcttaaacatttttaccatacaattaaaacaattttaaataatgaattcggtagtttaattaatagtacctacatacataaatttttaaatttcattaattattcttaacgaagttgataatctataggctaacattattcttcctatacatacatatatattatttttaagatattttaaaagtatctacttataagtatgtgttaagtatgtacttataagtatgtgctaagaatattcggtaaaagtatattctgagaatagtatctacttataagtatgtgttaagaatgtacttataagtatgtgctaagaatattcggtaaaggtacattctaagaataaacttttacgaatattccgagttactacgtacacgaatgtactcagtatattcggtacgagaatatactttaaagtatgtgcaaagaacatgaaatttagaatgttttttaaggtacatgctatgcttgtactacgcatatactaaaaagaatatactctgacgaatgttggtagtatatgcttagaacatgatacgaacatcattgttatgtgggacgatgttgctgcaactttcaccaccacaatggaaacacactgctgaacatttgcatttgagatctgcttttcatcaaccacatgcacttccagtttccattgcatctgcaaaaggtgaatttaataagctcgggggtactggaggcttagaagtttggattagtatccaaaatttcccatgctttttccagtcccaatcttctggatcacaatgtttaccgagccatgactgaatctggtgatacactcggagtctttggaaacggactgcatcttgtgttggaggaagtgcgaagagattaaatgcattgttttcactgttttagcgaattgtttttatctccgggtttttagagattcgtctttatttccgccatataaagaggcgataaacgttcgtcgaccccaaaacttgaacttgagcttctactgataccccctacacattgaaaaaaaataaaattgactgctctaataaatgcaacgtatgccctaaaaaatgtaacatatcaatggactaatggtaaaagttgaacaaatacttcctagaactgcagaagaatctttcttacttactccacaaaccaattcaaaaagtactacgttaagagtgtatgaagagtatttcatataaatttccaacaaaaaatctagtcattttacccaattaggtaaatacatttttgtcatttttggcatttctctgattttggattgtcgtttcgtttcgatagggcttttcatcgattgtcatttgtttcgagcttctgtcatgtgttgtataatgtgtgtataatattaatatacacggattatatgacacatgacagaggctcgacacaaatgactgagaatgaaaagccctattctcactgccttaaatgaaacacagctcataatattttttataggaagttattgccataccacaaagtacaggcttcgtctgcagatatttttatggtaatagttttaacaattactcttatatcatggtataggttgtctggctctaaacagtgtcgtgtttattcttaagtatataaagaatgtttcatttaagtaatttttaaactttgctgtgatattgtattaccattttcttgttcatatagcatcatgattgcgcttgggatatgatgtttagaactatcctcttttattaggcaaaaaatgcctaataaacattaggcaactcaacatttatcttctttatgacgtcactgataattggaccgcattatgtaataacggattaaccgccaaaagtccaaaatcgagatattagtgccatcttgcagctagggtgcaaatctctgtataaaaatatgatttttgtaaaaaaattcaaaaaaaagctgtttttaaatgcctgtattaagcgacattttttattttattaaaaaaaaatctcgcactaggatttgtaatatcgaactaaacgccaataatggtacataatccattgtcataaacaaatatccgcatctttgtaagtgtaatattttaattaattctttaattcttattaacttaattctttattacaaaacataacatatttactaacgtttaagatatcgaattaaaagacatcctttgtcaggtaacatcagattaagcgccaaatatgtctcttaatccggtattcggatcttaactcatgcatatcttaaaaaatcattaacgaattaagcgacatttgatcgaataacttttaaaatataaattatttttaaaaaattttaaacacatgtaaaagtctatttacatttgccttaatgtattaaatatgaaacatgtcagtactatattttagaaatagtaccaaaaacaaatttaaaatctttaaaccgatttatctcaaaactacattttggcgcttaatccgctattacataacgcggtccagttgacgttagcgctaccagtagtagaatcatcacgaatcacgaaacgtaaacataaatatttcaccattgggatcatgatgatggttcatttcttattgttattatgaatagagtaccttaagttaacaatttcttatattaagttaaaaaaatatattatatatttattctgcatgtatctaggtatgcctagaaacccaagtcttagtaattaaatgtaaaaaataagtcattttaataattgttttgtactatattataagttatattaggcaatggtttgtaacatatttatttttaaagacaataataattatgtgtaggtataagtaatggattttgggaagagctatgacctcgaaaacatcacaaagaatataactaaatatctcttttcttactcagactctttcaagtcttttgcaatatttcagaatctaaaatatttactaatattactaaagtattggattttgacaaaaactatgaattatgccgatttagttgatacctacacaagtttatgtgaaattttcaaagtcatagctcgtcccaaaatccattaggtacctatacaattgtttgtattggtaacagtcaatctatgaaattttataggtgtgtaaatacaaaaataaatatttaaacatataaaataaaatatattttttgcacgattgatcatttttgactgtttaccgtgacagattttacgtcagtaggtgacatttactagcaactcgacggtaagtaatccaactcgacggtaagtactccaactcgacggtaagtaattcacttaccgtcgagttaaaaaatctcttaattttaatttattttttgaaagaataaagaaaactaacgaattatttattaatattgaaacttatggtacaatttgttaaattatttaatgaaatcccacttgtttgggctgtggtttcacttctaacagaaactcctgcagaatcgcatacattagtagtattactagtattgcacaatattttttcggcaaaatctattttattttgaagagaatcttctacatagctttctgccactgtcgatgaacgccaacctccatgacgctttaatccgaggacatcaacacctttattagccaaaagcgttgctgatgtcctcctgaacgaatggccagtatagttctcgggattaggcaaatttaagaatttggcaatttgagaaggccagcccccgattgtccctttccctattacttgagcacaacattttcctttggcgtatcttaagaacaaatgatttgattttacttgtaatggacgaagttttatatacttttgcagaatttctaaatatgaatttatcatctggtttattaacgactgtaaaagtcgctggatgttcgtttttgtattgggtacttttatagtcattaaaccatcggtttgttggatgtcattcatagtaa

SEQ ID NO: 438 - DNA, 5957 bp, Diabrotica virgifera
ttttgcatccagtatttacactaatactttatttcttttcaaaacttgaggatagtatgaagaaagtatgaaaacgttgaggatatggcaacggtgtcaaattttaaatttagatccagtcacagaacaataatttctctggttaatgcggggttgccaccacctcagaaccgcgtgaaatagaagtcagaggtttcgattacgatatgagttagagaatagcaatccaaacacaaaaatgacgcgatagatatcaaacattccgattttgggtaattacgattcgacttggtcatttctattcgatttgttaaaagttacagaatagggctgaatattattatttttttaatgtgtatggcggttcagtagaagcttaagttcaagtttttggggtcgccacccttgtcccccggccgccatcttggaaaaaggggtgcaaaggacgttcgcgctgtatctcctaaactagcaaccctacagaaaatttaattagaaataaaatgtagcaaattaaattttctacaattttatatttattactttttatcgtcaagtgatatacaaaaaagttataaaataaacaaaaataagaaaaaaatttgtaagaagtttccttttggaggttataacttttttccgttcatttcacaataaaataatatcattgcgattttatggaggatttctcaacgaacaatttccactatttataaagttgtttaattttacttatttatctgggctttacagcgctccaaacttgactagattctcgaaatctcataggaatacacagacaatttctagacaaaataatatttaatattatatgttgaaatagatctatcaaaggttattatttttttatggtcaaggcttcaagttaagatctgaatcagtatccgaggtgaatttttgtggtatagtgagagttagagagttagtgttagcgtcattgtcggtaattcatctttttcatcaataattaatgttgatatgtccaccccacataacaatttcatgttcttagtagattcatagaacatacttttcagaaaaagtatatactaagaatatgcgtaattaccattgcgaatgtgcagagcacatactgagtatatactacattacagtacttaaacgttctatgtatatacttagaatgtactaccgcacttcttctcagtatataccaagaatatactttttaggatattctaagaaggtgctataaaccttctatttatatacttagaatgtactacctcacatcttttagtatataggaagaatgtactttttagtatatgggaagaatattacaaggaagtgctatattgctcagaagcatgttttcagcatcaccgaatctcatcctaggttctactttctactaaatttacatattacatatgagaatgtagttagtacattctacaatattacttaaaaagtaaatataaaatattatataaattttagttagttatatcaatattatataggtaagtaggtatatatatttagttattatgtgcatataaaaataaaaatgctgaatatataaatttatatattcatattcatatacctatcgtacccaaataaatattatgtaacatatgtatgtaaataactaaaatttatatgttgcttatatgtacctatatacatacttactatttaagtaatattgaagtaccaaaatgaattttttatttgtaagttgacagcaaacaaaataaaacgtttaattatgcatgttcctattcctggttgaaatacttggtcttcctcacaacacagcatagacattgttagtgttaagtgtagacacaaatgccaaatgcctattcagtaactattttcatattttgtatttttcctttgttcccaaccccctacccgctaacccctatgcaggtatgcagcggtcgtttccgctttgtttgtgccggttgtgggttttggctcagccacacagcttacctgaatgtcaattccatgtaaaaataaaattcttcataagaatactcaataaacttaatcaaaatagtaaatgcatttcagttatgaaagcgaaacgacaatttctcctttttcgttaatacaattaattcttaaacatttttaccatacaattaaaacaattttaaataatgaattcggtagtttaattaatagtacctacatacataaatttttaaatttcattaattattcttaacgaagttgataatctataggctaacattattcttcctatacatacatatatattatttttaagatattttaaaagtatctacttataagtatgtgttaagtatgtacttataagtatgtgctaagaatattcggtaaaagtatattctgagaatagtatctacttataagtatgtgttaagaatgtacttataagtatgtgctaagaatattcggtaaaggtacattctaagaataaacttttacgaatattccgagttactacgtacacgaatgtactcagtatattcggtacgagaatatactttaaagtatgtgcaaagaacatgaaatttagaatgttttttaaggtacatgctatgcttgtactacgcatatactaaaaagaatatactctgacgaatgttggtagtatatgcttagaacatgatacgaacatcattgttatgtgggacgatgttgctgcaactttcaccaccacaatggaaacacactgctgaacatttgcatttgagatctgcttttcatcaaccacatgcacttccagtttccattgcatctgcaaaaggtgaatttaataagctcgggggtactggaggcttagaagtttggattagtatccaaaatttcccatgctttttccagtcccaatcttctggatcacaatgtttaccgagccatgactgaatctggtgatacactcggagtctttggaaacggactgcatcttgtgttggaggaagtgcgaagagattaaatgcattgttttcactgttttagcgaattgtttttatctccgggtttttagagattcgtctttatttccgccatataaagaggcgataaacgttcgtcgaccccaaaacttgaacttgagcttctactgataccccctacacattgaaaaaaaataaaattgactgctctaataaatgcaacgtatgccctaaaaaatgtaacatatcaatggactaatggtaaaagttgaacaaatacttcctagaactgcagaagaatctttcttacttactccacaaaccaattcaaaaagtactacgttaagagtgtatgaagagtatttcatataaatttccaacaaaaaatctagtcattttacccaattaggtaaatacatttttgtcatttttggcatttctctgattttggattgtcgtttcgtttcgatagggcttttcatcgattgtcatttgtttcgagcttctgtcatgtgttgtataatgtgtgtataatattaatatacacggattatatgacacatgacagaggctcgacacaaatgactgagaatgaaaagccctattctcactgccttaaatgaaacacagctcataatattttttataggaagttattgccataccacaaagtacaggcttcgtctgcagatatttttatggtaatagttttaacaattactcttatatcatggtataggttgtctggctctaaacagtgtcgtgtttattcttaagtatataaagaatgtttcatttaagtaatttttaaactttgctgtgatattgtattaccattttcttgttcatatagcatcatgattctagaagtagatatgcgcttggctatttattattcaatattgcgcttgggatatgatgtttagaactatcctcttttattaggcaaaaaatgcctaataaacattaggcaactcaacatttatcttctttatgacgtcactgacaattgacgttagcgctaccagtagtagaatcatcacgaatcacgaaacgtaaacataaatatttcaccattgggatcatgatgatggttcatttcttattgttattatgaatagagtaccttaagttaacaatttcttatattaagttaaaaaaatatattatatatttattctgcatgtatctaggtatgcctagaaacccaagtcttagtaattaaatgtaaaaaataagtcattttaataattgttttgtactatattataagttatattaggcaatggtttgtaacatatttatttttaaagacaataataattatgtgtaggtataagtaatggattttgggaagagctatgacctcgaaaacatcacaaagaatataactaaatatctcttttcttactcagactctttcaagtcttttgcaatatttcagaatctaaaatatttactaatattactaaagtattggattttgacaaaaactatgaattatgccgatttagttgatacctacacaagtttatgtgaaattttcaaagtcatagctcgtcccaaaatccattaggtacctatacaattgtttgtattggtaacagtcaatctatgaaattttataggtgtgtaaatacaaaaataaatatttaaacatataaaataaaatatattttttgcacgattgatcatttttgactgtttaccgtgacagattttacgtcagtaggtgacatttactagcaactcgacggtaagtaatccaactcgacggtaagtactccaactcgacggtaagtaattcacttaccgtcgagttaaaaaatctcttaattttaatttattttttgaaagaataaagaaaactaacgaattatttattaatattgaaacttatggtacaatttgttaaattatttaatgaaatcccacttgtttgggctgtggtttcacttctaacagaaactcctgcagaatcgcatacattagtagtatccaacattttttctcttcaaatacgcgatcaaagttgaaaacttggaaatatcaatgccatcataaagaaaaacggtggatttaatcattgaatattctgcccagaggcttccaggagctttcaactgcatatgtctttgaacgaaatatgccaatagagtcttttcttcgattcttaaattcttgccttcgcaccattttttaaaactttggtaggtattttgataacggattttggatttttcgggaataattgcggaacacccttcttcccaagcccgttcaatttcttcaaattcactttcgctcatattttaatttataataatcaaaattgtacttaaaattattgacaactaaataaaaactcaattctccattgttgttatgcaccctagttactacctaacaaccaaagtatctatcttgataaaatgaatgaaactagtcaatatgacgaaaatgtttaattttataatttataatggtatcaatcgtgcaaaaaacgttataagcatgtcgaacgttaagggtaaccgatctcagacaataattggagtcgtcgctccgctcctcctccaaacaattgtcttcgatcggtataaaacccttaccgttctccatacttaatatactattactaaaatttacatttggcaacccggcagttttatttattttcacatagcgaagatatttaaaattgtaaacacaaacagtcatatcataattacctgtaacccaagaatacatcgtattgttttatttattatatttggtattgtcatgatatttcgatcgcgagtatcattattaattaccaatagtgtacaattagtgcaagatttacaccaaggcgatttaccttgaagattaaggatttatagacggtttcaaacaaaatcttcagagaacccgaatttttgtgtagtgttgtgtgcagataaagcttgttttaccagaaatggtgtgtttaactttcataattgccaaaagtatgaatttatgggctgg

SEQ ID NO: 439 - DNA, 5811 bp, Diabrotica virgifera
ttttgcatccagtatttacactaatactttatttcttttcaaaacttgaggatagtatgaagaaagtatgaaaacgttgaggatatggcaacggtgtcaaattttaaatttagatccagtcacagaacaataatttctctggttaatgcggggttgccaccacctcagaaccgcgtgaaatagaagtcagaggtttcgattacgatatgagttagagaatagcaatccaaacacaaaaatgacgcgatagatatcaaacattccgattttgggtaattacgattcgacttggtcatttctattcgatttgttaaaagttacagaatagggctgaatattattatttttttaatgtgtatggcggttcagtagaagcttaagttcaagtttttggggtcgccacccttgtcccccggccgccatcttggaaaaaggggtgcaaaggacgttcgcgctgtatctcctaaactagcaaccctacagaaaatttaattagaaataaaatgtagcaaattaaattttctacaattttatatttattactttttatcgtcaagtgatatacaaaaaagttataaaataaacaaaaataagaaaaaaatttgtaagaagtttccttttggaggttataacttttttccgttcatttcacaataaaataatatcattgcgattttatggaggatttctcaacgaacaatttccactatttataaagttgtttaattttacttatttatctgggctttacagcgctccaaacttgactagattctcgaaatctcataggaatacacagacaatttctagacaaaataatatttaatattatatgttgaaatagatctatcaaaggttattatttttttatggtcaaggcttcaagttaagatctgaatcagtatccgaggtgaatttttgtggtatagtgagagttagagagttagtgttagcgtcattgtcggtaattcatctttttcatcaataattaatgttgatatgtccaccccacataacaatttcatgttcttagtagattcatagaacatacttttcagaaaaagtatatactaagaatatgcgtaattaccattgcgaatgtgcagagcacatactgagtatatactacattacagtacttaaacgttctatgtatatacttagaatgtactaccgcacttcttctcagtatataccaagaatatactttttaggatattctaagaaggtgctataaaccttctatttatatacttagaatgtactacctcacatcttttagtatataggaagaatgtactttttagtatatgggaagaatattacaaggaagtgctatattgctcagaagcatgttttcagcatcaccgaatctcatcctaggttctactttctactaaatttacatattacatatgagaatgtagttagtacattctacaatattacttaaaaagtaaatataaaatattatataaattttagttagttatatcaatattatataggtaagtaggtatatatatttagttattatgtgcatataaaaataaaaatgctgaatatataaatttatatattcatattcatatacctatcgtacccaaataaatattatgtaacatatgtatgtaaataactaaaatttatatgttgcttatatgtacctatatacatacttactatttaagtaatattgaagtaccaaaatgaattttttatttgtaagttgacagcaaacaaaataaaacgtttaattatgcatgttcctattcctggttgaaatacttggtcttcctcacaacacagcatagacattgttagtgttaagtgtagacacaaatgccaaatgcctattcagtaactattttcatattttgtatttttcctttgttcccaaccccctacccgctaacccctatgcaggtatgcagcggtcgtttccgctttgtttgtgccggttgtgggttttggctcagccacacagcttacctgaatgtcaattccatgtaaaaataaaattcttcataagaatactcaataaacttaatcaaaatagtaaatgcatttcagttatgaaagcgaaacgacaatttctcctttttcgttaatacaattaattcttaaacatttttaccatacaattaaaacaattttaaataatgaattcggtagtttaattaatagtacctacatacataaatttttaaatttcattaattattcttaacgaagttgataatctataggctaacattattcttcctatacatacatatatattatttttaagatattttaaaagtatctacttataagtatgtgttaagtatgtacttataagtatgtgctaagaatattcggtaaaagtatattctgagaatagtatctacttataagtatgtgttaagaatgtacttataagtatgtgctaagaatattcggtaaaggtacattctaagaataaacttttacgaatattccgagttactacgtacacgaatgtactcagtatattcggtacgagaatatactttaaagtatgtgcaaagaacatgaaatttagaatgttttttaaggtacatgctatgcttgtactacgcatatactaaaaagaatatactctgacgaatgttggtagtatatgcttagaacatgatacgaacatcattgttatgtgggacgatgttgctgcaactttcaccaccacaatggaaacacactgctgaacatttgcatttgagatctgcttttcatcaaccacatgcacttccagtttccattgcatctgcaaaaggtgaatttaataagctcgggggtactggaggcttagaagtttggattagtatccaaaatttcccatgctttttccagtcccaatcttctggatcacaatgtttaccgagccatgactgaatctggtgatacactcggagtctttggaaacggactgcatcttgtgttggaggaagtgcgaagagattaaatgcattgttttcactgttttagcgaattgtttttatctccgggtttttagagattcgtctttatttccgccatataaagaggcgataaacgttcgtcgaccccaaaacttgaacttgagcttctactgataccccctacacattgaaaaaaaataaaattgactgctctaataaatgcaacgtatgccctaaaaaatgtaacatatcaatggactaatggtaaaagttgaacaaatacttcctagaactgcagaagaatctttcttacttactccacaaaccaattcaaaaagtactacgttaagagtgtatgaagagtatttcatataaatttccaacaaaaaatctagtcattttacccaattaggtaaatacatttttgtcatttttggcatttctctgattttggattgtcgtttcgtttcgatagggcttttcatcgattgtcatttgtttcgagcttctgtcatgtgttgtataatgtgtgtataatattaatatacacggattatatgacacatgacagaggctcgacacaaatgactgagaatgaaaagccctattctcactgccttaaatgaaacacagctcataatattttttataggaagttattgccataccacaaagtacaggcttcgtctgcagatatttttatggtaatagttttaacaattactcttatatcatggtataggttgtctggctctaaacagtgtcgtgtttattcttaagtatataaagaatgtttcatttaagtaatttttaaactttgctgtgatattgtattaccattttcttgttcatatagcatcatgattctagaagtagatatgcgcttggctatttattattcaatattgcgcttgggatatgatgtttagaactatcctcttttattaggcaaaaaatgcctaataaacattaggcaactcaacatttatcttctttatgacgtcactgacaattgacgttagcgctaccagtagtagaatcatcacgaatcacgaaacgtaaacataaatatttcaccattgggatcatgatgatggttcatttcttattgttattatgaatagagtaccttaagttaacaatttcttatattaagttaaaaaaatatattatatatttattctgcatgtatctaggtatgcctagaaacccaagtcttagtaattaaatgtaaaaaataagtcattttaataattgttttgtactatattataagttatattaggcaatggtttgtaacatatttatttttaaagacaataataattatgtgtaggtataagtaatggattttgggaagagctatgacctcgaaaacatcacaaagaatataactaaatatctcttttcttactcagactctttcaagtcttttgcaatatttcagaatctaaaatatttactaatattactaaagtattggattttgacaaaaactatgaattatgccgatttagttgatacctacacaagtttatgtgaaattttcaaagtcatagctcgtcccaaaatccattaggtacctatacaattgtttgtattggtaacagtcaatctatgaaattttataggtgtgtaaatacaaaaataaatatttaaacatataaaataaaatatattttttgcacgattgatcatttttgactgtttaccgtgacagattttacgtcagtaggtgacatttactagcaactcgacggtaagtaatccaactcgacggtaagtactccaactcgacggtaagtaattcacttaccgtcgagttaaaaaatctcttaattttaatttattttttgaaagaataaagaaaactaacgaattatttattaatattgaaacttatggtacaatttgttaaattatttaatgaaatcccacttgtttgggctgtggtttcacttctaacagaaactcctgcagaatcgcatacattagtagtattactagtattgcacaatattttttcggcaaaatctattttattttgaagagaatcttctacatagctttctgccactgtcgatgaacgccaacctccatgacgctttaatccgaggacatcaacacctttattagccaaaagcgttgctgatgtcctcctgaacgaatggccagtatagttctcgggattaggcaaatttaagaatttggcaatttgagaaggccagcccccgattgtccctttccctattacttgagcacaacattttcctttggcgtatcttaagaacaaatgatttgattttacttgtaatggacgaagttttatatactttataatggtatcaatcgtgcaaaaaacgttataagcatgtcgaacgttaagggtaaccgatctcagacaataattggagtcgtcgctccgctcctcctccaaacaattgtcttcgatcggtataaaacccttaccgttctccatacttaatatactattactaaaatttacatttggcaacccggcagttttatttattttcacatagcgaagatatttaaaattgtaaacacaaacagtcatatcataattacctgtaacccaagaatacatcgtattgttttatttattatatttggtattgtcatgatatttcgatcgcgagtatcattattaattaccaatagtgtacaattagtgcaagatttacaccaaggcgatttaccttgaagattaaggatttatagacggtttcaaacaaaatcttcagagaacccgaatttttgtgtagtgttgtgtgcagataaagcttgttttaccagaaatggtgtgtttaactttcataattgccaaaagtatgaatttatgggctgg

SEQ ID NO: 440 - DNA, 5409 bp, Diabrotica virgifera
ttttgcatccagtatttacactaatactttatttcttttcaaaacttgaggatagtatgaagaaagtatgaaaacgttgaggatatggcaacggtgtcaaattttaaatttagatccagtcacagaacaataatttctctggttaatgcggggttgccaccacctcagaaccgcgtgaaatagaagtcagaggtttcgattacgatatgagttagagaatagcaatccaaacacaaaaatgacgcgatagatatcaaacattccgattttgggtaattacgattcgacttggtcatttctattcgatttgttaaaagttacagaatagggctgaatattattatttttttaatgtgtatggcggttcagtagaagcttaagttcaagtttttggggtcgccacccttgtcccccggccgccatcttggaaaaaggggtgcaaaggacgttcgcgctgtatctcctaaactagcaaccctacagaaaatttaattagaaataaaatgtagcaaattaaattttctacaattttatatttattactttttatcgtcaagtgatatacaaaaaagttataaaataaacaaaaataagaaaaaaatttgtaagaagtttccttttggaggttataacttttttccgttcatttcacaataaaataatatcattgcgattttatggaggatttctcaacgaacaatttccactatttataaagttgtttaattttacttatttatctgggctttacagcgctccaaacttgactagattctcgaaatctcataggaatacacagacaatttctagacaaaataatatttaatattatatgttgaaatagatctatcaaaggttattatttttttatggtcaaggcttcaagttaagatctgaatcagtatccgaggtgaatttttgtggtatagtgagagttagagagttagtgttagcgtcattgtcggtaattcatctttttcatcaataattaatgttgatatgtccaccccacataacaatttcatgttcttagtagattcatagaacatacttttcagaaaaagtatatactaagaatatgcgtaattaccattgcgaatgtgcagagcacatactgagtatatactacattacagtacttaaacgttctatgtatatacttagaatgtactaccgcacttcttctcagtatataccaagaatatactttttaggatattctaagaaggtgctataaaccttctatttatatacttagaatgtactacctcacatcttttagtatataggaagaatgtactttttagtatatgggaagaatattacaaggaagtgctatattgctcagaagcatgttttcagcatcaccgaatctcatcctaggttctactttctactaaatttacatattacatatgagaatgtagttagtacattctacaatattacttaaaaagtaaatataaaatattatataaattttagttagttatatcaatattatataggtaagtaggtatatatatttagttattatgtgcatataaaaataaaaatgctgaatatataaatttatatattcatattcatatacctatcgtacccaaataaatattatgtaacatatgtatgtaaataactaaaatttatatgttgcttatatgtacctatatacatacttactatttaagtaatattgaagtaccaaaatgaattttttatttgtaagttgacagcaaacaaaataaaacgtttaattatgcatgttcctattcctggttgaaatacttggtcttcctcacaacacagcatagacattgttagtgttaagtgtagacacaaatgccaaatgcctattcagtaactattttcatattttgtatttttcctttgttcccaaccccctacccgctaacccctatgcaggtatgcagcggtcgtttccgctttgtttgtgccggttgtgggttttggctcagccacacagcttacctgaatgtcaattccatgtaaaaataaaattcttcataagaatactcaataaacttaatcaaaatagtaaatgcatttcagttatgaaagcgaaacgacaatttctcctttttcgttaatacaattaattcttaaacatttttaccatacaattaaaacaattttaaataatgaattcggtagtttaattaatagtacctacatacataaatttttaaatttcattaattattcttaacgaagttgataatctataggctaacattattcttcctatacatacatatatattatttttaagatattttaaaagtatctacttataagtatgtgttaagtatgtacttataagtatgtgctaagaatattcggtaaaagtatattctgagaatagtatctacttataagtatgtgttaagaatgtacttataagtatgtgctaagaatattcggtaaaggtacattctaagaataaacttttacgaatattccgagttactacgtacacgaatgtactcagtatattcggtacgagaatatactttaaagtatgtgcaaagaacatgaaatttagaatgttttttaaggtacatgctatgcttgtactacgcatatactaaaaagaatatactctgacgaatgttggtagtatatgcttagaacatgatacgaacatcattgttatgtgggacgatgttgctgcaactttcaccaccacaatggaaacacactgctgaacatttgcatttgagatctgcttttcatcaaccacatgcacttccagtttccattgcatctgcaaaaggtgaatttaataagctcgggggtactggaggcttagaagtttggattagtatccaaaatttcccatgctttttccagtcccaatcttctggatcacaatgtttaccgagccatgactgaatctggtgatacactcggagtctttggaaacggactgcatcttgtgttggaggaagtgcgaagagattaaatgcattgttttcactgttttagcgaattgtttttatctccgggtttttagagattcgtctttatttccgccatataaagaggcgataaacgttcgtcgaccccaaaacttgaacttgagcttctactgataccccctacacattgaaaaaaaataaaattgactgctctaataaatgcaacgtatgccctaaaaaatgtaacatatcaatggactaatggtaaaagttgaacaaatacttcctagaactgcagaagaatctttcttacttactccacaaaccaattcaaaaagtactacgttaagagtgtatgaagagtatttcatataaatttccaacaaaaaatctagtcattttacccaattaggtaaatacatttttgtcatttttggcatttctctgattttggattgtcgtttcgtttcgatagggcttttcatcgattgtcatttgtttcgagcttctgtcatgtgttgtataatgtgtgtataatattaatatacacggattatatgacacatgacagaggctcgacacaaatgactgagaatgaaaagccctattctcactgccttaaatgaaacacagctcataatattttttataggaagttattgccataccacaaagtacaggcttcgtctgcagatatttttatggtaatagttttaacaattactcttatatcatggtataggttgtctggctctaaacagtgtcgtgtttattcttaagtatataaagaatgtttcatttaagtaatttttaaactttgctgtgatattgtattaccattttcttgttcatatagcatcatgattgcgcttgggatatgatgtttagaactatcctcttttattaggcaaaaaatgcctaataaacattaggcaactcaacatttatcttctttatgacgtcactgataattggaccgcattatgtaataacggattaaccgccaaaagtccaaaatcgagatattagtgccatcttgcagctagggtgcaaatctctgtataaaaatatgatttttgtaaaaaaattcaaaaaaaagctgtttttaaatgcctgtattaagcgacattttttattttattaaaaaaaaatctcgcactaggatttgtaatatcgaactaaacgccaataatggtacataatccattgtcataaacaaatatccgcatctttgtaagtgtaatattttaattaattctttaattcttattaacttaattctttattacaaaacataacatatttactaacgtttaagatatcgaattaaaagacatcctttgtcaggtaacatcagattaagcgccaaatatgtctcttaatccggtattcggatcttaactcatgcatatcttaaaaaatcattaacgaattaagcgacatttgatcgaataacttttaaaatataaattatttttaaaaaattttaaacacatgtaaaagtctatttacatttgccttaatgtattaaatatgaaacatgtcagtactatattttagaaatagtaccaaaaacaaatttaaaatctttaaaccgatttatctcaaaactacattttggcgcttaatccgctattacataacgcggtccagttgacgttagcgctaccagtagtagaatcatcacgaatcacgaaacgtaaacataaatatttcaccattgggatcatgatgatggttcatttcttattgttattatgaatagagtaccttaagttaacaatttcttatattaagttaaaaaaatatattatatatttattctgcatgtatctaggtatgcctagaaacccaagtcttagtaattaaatgtaaaaaataagtcattttaataattgttttgtactatattataagttatattaggcaatggtttgtaacatatttatttttaaagacaataataattatgtgtaggtataagtaatggattttgggaagagctatgacctcgaaaacatcacaaagaatataactaaatatctcttttcttactcagactctttcaagtcttttgcaatatttcagaatctaaaatatttactaatattactaaagtattggattttgacaaaaactatgaattatgccgatttagttgatacctacacaagtttatgtgaaattttcaaagtcatagctcgtcccaaaatccattaggtacctatacaattgtttgtattggtaacagtcaatctatgaaattttataggtgtgtaaatacaaaaataaatatttaaacatataaaataaaatatatttaaagacaagtaaataattggtggtattgatatttattccgtgttatattcccaatttattttcttaattatggtgttattactagtaattttgaaatggtccagcaatgcaattattgtgatgttatataataaatataagtata

SEQ ID NO: 441 - DNA, 5408 bp, Diabrotica virgifera
ttttgcatccagtatttacactaatactttatttcttttcaaaacttgaggatagtatgaagaaagtatgaaaacgttgaggatatggcaacggtgtcaaattttaaatttagatccagtcacagaacaataatttctctggttaatgcggggttgccaccacctcagaaccgcgtgaaatagaagtcagaggtttcgattacgatatgagttagagaatagcaatccaaacacaaaaatgacgcgatagatatcaaacattccgattttgggtaattacgattcgacttggtcatttctattcgatttgttaaaagttacagaatagggctgaatattattatttttttaatgtgtatggcggttcagtagaagcttaagttcaagtttttggggtcgccacccttgtcccccggccgccatcttggaaaaaggggtgcaaaggacgttcgcgctgtatctcctaaactagcaaccctacagaaaatttaattagaaataaaatgtagcaaattaaattttctacaattttatatttattactttttatcgtcaagtgatatacaaaaaagttataaaataaacaaaaataagaaaaaaatttgtaagaagtttccttttggaggttataacttttttccgttcatttcacaataaaataatatcattgcgattttatggaggatttctcaacgaacaatttccactatttataaagttgtttaattttacttatttatctgggctttacagcgctccaaacttgactagattctcgaaatctcataggaatacacagacaatttctagacaaaataatatttaatattatatgttgaaatagatctatcaaaggttattatttttttatggtcaaggcttcaagttaagatctgaatcagtatccgaggtgaatttttgtggtatagtgagagttagagagttagtgttagcgtcattgtcggtaattcatctttttcatcaataattaatgttgatatgtccaccccacataacaatttcatgttcttagtagattcatagaacatacttttcagaaaaagtatatactaagaatatgcgtaattaccattgcgaatgtgcagagcacatactgagtatatactacattacagtacttaaacgttctatgtatatacttagaatgtactaccgcacttcttctcagtatataccaagaatatactttttaggatattctaagaaggtgctataaaccttctatttatatacttagaatgtactacctcacatcttttagtatataggaagaatgtactttttagtatatgggaagaatattacaaggaagtgctatattgctcagaagcatgttttcagcatcaccgaatctcatcctaggttctactttctactaaatttacatattacatatgagaatgtagttagtacattctacaatattacttaaaaagtaaatataaaatattatataaattttagttagttatatcaatattatataggtaagtaggtatatatatttagttattatgtgcatataaaaataaaaatgctgaatatataaatttatatattcatattcatatacctatcgtacccaaataaatattatgtaacatatgtatgtaaataactaaaatttatatgttgcttatatgtacctatatacatacttactatttaagtaatattgaagtaccaaaatgaattttttatttgtaagttgacagcaaacaaaataaaacgtttaattatgcatgttcctattcctggttgaaatacttggtcttcctcacaacacagcatagacattgttagtgttaagtgtagacacaaatgccaaatgcctattcagtaactattttcatattttgtatttttcctttgttcccaaccccctacccgctaacccctatgcaggtatgcagcggtcgtttccgctttgtttgtgccggttgtgggttttggctcagccacacagcttacctgaatgtcaattccatgtaaaaataaaattcttcataagaatactcaataaacttaatcaaaatagtaaatgcatttcagttatgaaagcgaaacgacaatttctcctttttcgttaatacaattaattcttaaacatttttaccatacaattaaaacaattttaaataatgaattcggtagtttaattaatagtacctacatacataaatttttaaatttcattaattattcttaacgaagttgataatctataggctaacattattcttcctatacatacatatatattatttttaagatattttaaaagtatctacttataagtatgtgttaagtatgtacttataagtatgtgctaagaatattcggtaaaagtatattctgagaatagtatctacttataagtatgtgttaagaatgtacttataagtatgtgctaagaatattcggtaaaggtacattctaagaataaacttttacgaatattccgagttactacgtacacgaatgtactcagtatattcggtacgagaatatactttaaagtatgtgcaaagaacatgaaatttagaatgttttttaaggtacatgctatgcttgtactacgcatatactaaaaagaatatactctgacgaatgttggtagtatatgcttagaacatgatacgaacatcattgttatgtgggacgatgttgctgcaactttcaccaccacaatggaaacacactgctgaacatttgcatttgagatctgcttttcatcaaccacatgcacttccagtttccattgcatctgcaaaaggtgaatttaataagctcgggggtactggaggcttagaagtttggattagtatccaaaatttcccatgctttttccagtcccaatcttctggatcacaatgtttaccgagccatgactgaatctggtgatacactcggagtctttggaaacggactgcatcttgtgttggaggaagtgcgaagagattaaatgcattgttttcactgttttagcgaattgtttttatctccgggtttttagagattcgtctttatttccgccatataaagaggcgataaacgttcgtcgaccccaaaacttgaacttgagcttctactgataccccctacacattgaaaaaaaataaaattgactgctctaataaatgcaacgtatgccctaaaaaatgtaacatatcaatggactaatggtaaaagttgaacaaatacttcctagaactgcagaagaatctttcttacttactccacaaaccaattcaaaaagtactacgttaagagtgtatgaagagtatttcatataaatttccaacaaaaaatctagtcattttacccaattaggtaaatacatttttgtcatttttggcatttctctgattttggattgtcgtttcgtttcgatagggcttttcatcgattgtcatttgtttcgagcttctgtcatgtgttgtataatgtgtgtataatattaatatacacggattatatgacacatgacagaggctcgacacaaatgactgagaatgaaaagccctattctcactgccttaaatgaaacacagctcataatattttttataggaagttattgccataccacaaagtacaggcttcgtctgcagatatttttatggtaatagttttaacaattactcttatatcatggtataggttgtctggctctaaacagtgtcgtgtttattcttaagtatataaagaatgtttcatttaagtaatttttaaactttgctgtgatattgtattaccattttcttgttcatatagcatcatgattctagaagtagatatgcgcttggctatttattattcaatattgcgcttgggatatgatgtttagaactatcctcttttattaggcaaaaaatgcctaataaacattaggcaactcaacatttatcttctttatgacgtcactgacaattgacgttagcgctaccagtagtagaatcatcacgaatcacgaaacgtaaacataaatatttcaccattgggatcatgatgatggttcatttcttattgttattatgaatagagtaccttaagttaacaatttcttatattaagttaaaaaaatatattatatatttattctgcatgtatctaggtatgcctagaaacccaagtcttagtaattaaatgtaaaaaataagtcattttaataattgttttgtactatattataagttatattaggcaatggtttgtaacatatttatttttaaagacaataataattatgtgtaggtataagtaatggattttgggaagagctatgacctcgaaaacatcacaaagaatataactaaatatctcttttcttactcagactctttcaagtcttttgcaatatttcagaatctaaaatatttactaatattactaaagtattggattttgacaaaaactatgaattatgccgatttagttgatacctacacaagtttatgtgaaattttcaaagtcatagctcgtcccaaaatccattaggtacctatacaattgtttgtattggtaacagtcaatctatgaaattttataggtgtgtaaatacaaaaataaatatttaaacatataaaataaaatatattttttgcacgattgatcatttttgactgtttaccgtgacagattttacgtcagtaggtgacatttactagcaactcgacggtaagtaatccaactcgacggtaagtactccaactcgacggtaagtaattcacttaccgtcgagttaaaaaatctcttaattttaatttattttttgaaagaataaagaaaactaacgaattatttattaatattgaaacttatggtacaatttgttaaattatttaatgaaatcccacttgtttgggctgtggtttcacttctaacagaaactcctgcagaatcgcatacattagtagtattactagtattgcacaatattttttcggcaaaatctattttattttgaagagaatcttctacatagctttctgccactgtcgatgaacgccaacctccatgacgctttaatccgaggacatcaacacctttattagccaaaagcgttgctgatgtcctcctgaacgaatggccagtatagttctcgggattaggcaaatttaagaatttggcaatttgagaaggccagcccccgattgtccctttccctattacttgagcacaacattttcctttggcgtatcttaagaacaaatgatttgattttacttgtaatggacgaagttttatatacttttgcagaatttctaaatatgaatttatcatctggtttattaacgactgtaaaagtcgctggatgttcgtttttgtattgggtacttttatagtcattaaaccatcggtttgttggatgtcattcatagtaa

SEQ ID NO: 442 - DNA, 4768 bp, Diabrotica virgifera
ttttgcatccagtatttacactaatactttatttcttttcaaaacttgaggatagtatgaagaaagtatgaaaacgttgaggatatggcaacggtgtcaaattttaaatttagatccagtcacagaacaataatttctctggttaatgcggggttgccaccacctcagaaccgcgtgaaatagaagtcagaggtttcgattacgatatgagttagagaatagcaatccaaacacaaaaatgacgcgatagatatcaaacattccgattttgggtaattacgattcgacttggtcatttctattcgatttgttaaaagttacagaatagggctgaatattattatttttttaatgtgtatggcggttcagtagaagcttaagttcaagtttttggggtcgccacccttgtcccccggccgccatcttggaaaaaggggtgcaaaggacgttcgcgctgtatctcctaaactagcaaccctacagaaaatttaattagaaataaaatgtagcaaattaaattttctacaattttatatttattactttttatcgtcaagtgatatacaaaaaagttataaaataaacaaaaataagaaaaaaatttgtaagaagtttccttttggaggttataacttttttccgttcatttcacaataaaataatatcattgcgattttatggaggatttctcaacgaacaatttccactatttataaagttgtttaattttacttatttatctgggctttacagcgctccaaacttgactagattctcgaaatctcataggaatacacagacaatttctagacaaaataatatttaatattatatgttgaaatagatctatcaaaggttattatttttttatggtcaaggcttcaagttaagatctgaatcagtatccgaggtgaatttttgtggtatagtgagagttagagagttagtgttagcgtcattgtcggtaattcatctttttcatcaataattaatgttgatatgtccaccccacataacaatttcatgttcttagtagattcatagaacatacttttcagaaaaagtatatactaagaatatgcgtaattaccattgcgaatgtgcagagcacatactgagtatatactacattacagtacttaaacgttctatgtatatacttagaatgtactaccgcacttcttctcagtatataccaagaatatactttttaggatattctaagaaggtgctataaaccttctatttatatacttagaatgtactacctcacatcttttagtatataggaagaatgtactttttagtatatgggaagaatattacaaggaagtgctatattgctcagaagcatgttttcagcatcaccgaatctcatcctaggttctactttctactaaatttacatattacatatgagaatgtagttagtacattctacaatattacttaaaaagtaaatataaaatattatataaattttagttagttatatcaatattatataggtaagtaggtatatatatttagttattatgtgcatataaaaataaaaatgctgaatatataaatttatatattcatattcatatacctatcgtacccaaataaatattatgtaacatatgtatgtaaataactaaaatttatatgttgcttatatgtacctatatacatacttactatttaagtaatattgaagtaccaaaatgaattttttatttgtaagttgacagcaaacaaaataaaacgtttaattatgcatgttcctattcctggttgaaatacttggtcttcctcacaacacagcatagacattgttagtgttaagtgtagacacaaatgccaaatgcctattcagtaactattttcatattttgtatttttcctttgttcccaaccccctacccgctaacccctatgcaggtatgcagcggtcgtttccgctttgtttgtgccggttgtgggttttggctcagccacacagcttacctgaatgtcaattccatgtaaaaataaaattcttcataagaatactcaataaacttaatcaaaatagtaaatgcatttcagttatgaaagcgaaacgacaatttctcctttttcgttaatacaattaattcttaaacatttttaccatacaattaaaacaattttaaataatgaattcggtagtttaattaatagtacctacatacataaatttttaaatttcattaattattcttaacgaagttgataatctataggctaacattattcttcctatacatacatatatattatttttaagatattttaaaagtatctacttataagtatgtgttaagtatgtacttataagtatgtgctaagaatattcggtaaaagtatattctgagaatagtatctacttataagtatgtgttaagaatgtacttataagtatgtgctaagaatattcggtaaaggtacattctaagaataaacttttacgaatattccgagttactacgtacacgaatgtactcagtatattcggtacgagaatatactttaaagtatgtgcaaagaacatgaaatttagaatgttttttaaggtacatgctatgcttgtactacgcatatactaaaaagaatatactctgacgaatgttggtagtatatgcttagaacatgatacgaacatcattgttatgtgggacgatgttgctgcaactttcaccaccacaatggaaacacactgctgaacatttgcatttgagatctgcttttcatcaaccacatgcacttccagtttccattgcatctgcaaaaggtgaatttaataagctcgggggtactggaggcttagaagtttggattagtatccaaaatttcccatgctttttccagtcccaatcttctggatcacaatgtttaccgagccatgactgaatctggtgatacactcggagtctttggaaacggactgcatcttgtgttggaggaagtgcgaagagattaaatgcattgttttcactgttttagcgaattgtttttatctccgggtttttagagattcgtctttatttccgccatataaagaggcgataaacgttcgtcgaccccaaaacttgaacttgagcttctactgataccccctacacattgaaaaaaaataaaattgactgctctaataaatgcaacgtatgccctaaaaaatgtaacatatcaatggactaatggtaaaagttgaacaaatacttcctagaactgcagaagaatctttcttacttactccacaaaccaattcaaaaagtactacgttaagagtgtatgaagagtatttcatataaatttccaacaaaaaatctagtcattttacccaattaggtaaatacatttttgtcatttttggcatttctctgattttggattgtcgtttcgtttcgatagggcttttcatcgattgtcatttgtttcgagcttctgtcatgtgttgtataatgtgtgtataatattaatatacacggattatatgacacatgacagaggctcgacacaaatgactgagaatgaaaagccctattctcactgccttaaatgaaacacagctcataatattttttataggaagttattgccataccacaaagtacaggcttcgtctgcagatatttttatggtaatagttttaacaattactcttatatcatggtataggttgtctggctctaaacagtgtcgtgtttattcttaagtatataaagaatgtttcatttaagtaatttttaaactttgctgtgatattgtattaccattttcttgttcatatagcatcatgattctagaagtagatatgcgcttggctatttattattcaatattgcgcttgggatatgatgtttagaactatcctcttttattaggcaaaaaatgcctaataaacattaggcaactcaacatttatcttctttatgacgtcactgacaattgacgttagcgctaccagtagtagaatcatcacgaatcacgaaacgtaaacataaatatttcaccattgggatcatgatgatggttcatttcttattgttattatgaatagagtaccttaagttaacaatttcttatattaagttaaaaaaatatattatatatttattctgcatgtatctaggtatgcctagaaacccaagtcttagtaattaaatgtaaaaaataagtcattttaataattgttttgtactatattataagttatattaggcaatggtttgtaacatatttatttttaaagacaataataattatgtgtaggtataagtaatggattttgggaagagctatgacctcgaaaacatcacaaagaatataactaaatatctcttttcttactcagactctttcaagtcttttgcaatatttcagaatctaaaatatttactaatattactaaagtattggattttgacaaaaactatgaattatgccgatttagttgatacctacacaagtttatgtgaaattttcaaagtcatagctcgtcccaaaatccattaggtacctatacaattgtttgtattggtaacagtcaatctatgaaattttataggtgtgtaaatacaaaaataaatatttaaacatataaaataaaatatatttaaagacaagtaaataattggtggtattgatatttattccgtgttatattcccaatttattttcttaattatggtgttattactagtaattttgaaatggtccagcaatgcaattattgtgatgttatataataaatataagtata

SEQ ID NO: 443 - DNA, 4558 bp, Diabrotica virgifera
  SmartBlast Evalue=0; Info="ABC transporter, putative n=1 Tax= Pediculus humanus corporis RepID=E0W387_PEDHC"
cacaaatacgaatagataggcaatcacaatcttcgagagtacttactggttcagtcgctgacagtccgcgaatttcaatccgcaccatggaggcagttctgcacgagagtacttttgtagggcaatctaaagacgccgccgccgttgtcaaatcgaacggggtcaacggcgattcagtgaatttttccgtaaaggtgaatcttaaccaagaaaagactttgatttgtgacgatggtactaatggcaaaatgtgccaaaatacggtggacttggagtttcaaaatattagttttcgtgcgacgcaagggaatatatttaccaaaaggactacaaaagaaattttgcatcaagtcggaggacgtttccagcccgggcagctgatagccataatggggccatcgggtgcaggcaaaagtacattattggatgttttgagtgggtataggatacgtggcgtaacaggttcagtatacgttaacggccaaccaagaagtttaaaggaattcaggaaaacgtcatgttacattacgcaagatgaccgtctgcagcctttactcactgtggacgaaaatatgtgggtagctgcagatttgaaactaccttccagtgtcagcaacagtaataaacggagtataattaacaatattttaaaaacactaaatcttgaaaatacaaaaaaagtgagagcagctggtctttccggtggacagaaaaagaggttgtcaatagctttagagttagtaaataatccaatggtcatgttcttggatgaaccaaccacgggattggatagttcgtcttgttcaacatgtataacactacttaagaaactaactatgcaaggaaaaacaatcatatgtaccattcaccagccttcagctactttatttgcaatgtttgatcaggtgtacgtagtaggaaatgggtactgcctatatcaaggtagtacgaataaactggttccatttttgcaagactgtgggtttccctgtccgcagtatcacaatcctgctgactacgtaatagaactagcatgtattgagcacggacctgagaaacctgaatatatgagggatataattcagaacggacaatcttaccaatattttaacgagcctgaaaagatgaaaagcaccatttgtaactacccaggtcccaaacctattaaacgagttgttagcagtgatgaatcctcttttcccacatcacaattccatcaactaggagttcttatgagacggggatttattaaagcctacagagataagatgcttacctaccttcgtattggaacaaacataatagttggactgatgttgggcagcctctattggaaagctggaagtgatggatctaaagttttggataattttaatttattgtttgcgatattattgcaccatatgatgtccacaatgatgttgacgattttaacatttccccaggaaatgtcgattttaataaaagaacacttcaaccgttggtattcattaaaaatgtattacacatcggtaaccatagtggatattccggtttcggttattggctgcttcctgttttcactcataatatactatatgacagatcaaccaaacgataaagccagattcctgatattcttcgtcacttgcatgttggtagttctagtagctcaaggagttggtctaactattggcgcatattttgatgttgtgaacggaacttttgttggaccaaccctgatggtacccatgatgatgttctccggttttggcgttcgtctacgtgatctgccgaccataatgtactacggcagttttacttcttacttaaggtacggcttggaaggagtagtccaggcggtgtacggaatggacaggggtattcttcaatgtcccgaagacaaattttgcttctacaagtatccgaagactttcctggaaatagtagatgtcaggtcggatcagttcgataatgacatcattgctttactgcttttcttgtttgttttgagaattgcggcgtacgtagtgctgaggtacaaactggcatctgtgcgatagagcctgtttatgttttaataacttttattagaagtaggtgattgaagcctcggttttggtaaacagtgttgttagaaggacatttatttaaattttactcaaaaaaatatttttttttctttagaaaacatcattttttgtgacaatcaaaggaacttagagaaaatttacaataatgtttttaaaattttccaaagattatgatttattaaaagataaaagtatgagatcgtcactcagtacagtggttcccaagtagcaatttttcgacgcattggttgtcagtacaaacaaatgcactgtctacaactttgcccgagagcattttcagttgtttcggccaacgtcccctaccccgactgacattacgatgttacaacctgtagttatacgggcaactaatttattaccattttgacaactacatatcacaattcagttttttcaacaatcgcaacgacttaaaaatgttataatgctaaactaattattatatattttattttgatagaaattttggatttatttaacaacctgtttatttgtttttttaatagctggtttccattccattgttttatcagtagatttgagatttgataaccacctttgtatctgctttggtagacagggttgccaggtcagttttaactctttcagtagttttgttttcacaaaatcagtagattctttttaggccatgtaaatatacagtaatacagtgatatgcacatccgtcttaaatgtcccaagagcaattccacaaaattggaaacctaattattccaaaccaccaactggtaattatcattttttagctaaaatctactaaatcaaaaactaaaatatacttaagtattttgggatatatttgggattttttataataaaaacaacagctaacttaaggggataggcgcaaaatgtcgtctgttaaaatgttcaatgtattttaaatgttttcgttttttgcgaatccttagaaaactaataagtatttttgaaaaatttaaacgcacaaagaaagattacttaccaaggaccgaaagtccctgaaaacttctataatgtttattttaatacgttacaggggtgaaaaaagaaaaaatttagtgacttttaattccaaatatctcgttcaaaagaaacgttttggtttttctaaataatgcagtctttcattctgcgtttaaatttttcaaaaagacgtattatagtttcctcatgattcgaaaaaaatggatcaaattctgttgaaatataccaaaaatctactaaaaatattgcctactagaattttttaaaaaatatcaaaaatctaccaaaaaagtagaaatctactaaatgtggcaacgctgttaatgagaatgatacacttttgacactggtcacatgacctctgtcacccaataagagggtgcgttctaaaatggttttgatagtcggcgcggccgggtttggttggcgattggacttctaagttgtcttatccgtctaaggttggtaataaggtattttttagtaatattggtaatattgtttaatgcgccattttggttttacttgagatttttgggatgtaaagaaaatgaaaacacagaatataaaaaatgcaggcattttctgataactttaaaagcaccatcaatacattaaatttatacagaacatctttaacataaattttgacttttatattaaaatttgattttttaaatttgcatattttttgtcaaaaatgtcataaaaaaagcagcgcgtgtgttttttaaaggtgaaatatccatatttgacggtaatctgagatgcgtttataaatttcacatctggtaataagtcctttatgtatttatatcatataaatttaaatacccaatacgatgtcaaaacagtttactttttggttttcgcattcaccatacagttgttaaaaatataggtaaaaaaacataactagtctgactccttgagcaaccattgcacgcgcaggtgctttttatagtcgcttcagttgtcttatgcaacggttacgaaacgatgttgcttaaacaggaggttgcctaggcaacgtcaagacaactcaaaaatcgtccaccaaatcagtgcagaatagggtcgtcttttaggcaataacaacgttgtaagaaaacgttgccacgcggtagacaacgttgtcgcgtcgacaaattgctacttgggtaggtgcatatgttttatattatgatgtctcagattgatagtgaaatattaataacattaatggaagctcttcattgggacaaaacaatagaaatatataaagatcgaaacttgacgagaaatgcttggaatggtgtatgccgtgcacttaacagtgcacgaattaatttgaattaattaatttgacgaattaggtgataaagaaaaaacacattttataagtacagcaaaattaattatattatgttactgataacagtaattaaaactgctaagtatattataaaaaactttattttacatagttgcaattaacg

SEQ ID NO: 444 - DNA, 10690 bp, Diabrotica virgifera
  SmartBlast Evalue=0; Info="ABC transporter, putative n=1 Tax= Pediculus humanus corporis RepID=E0W387_PEDHC"
cacaaatacgaatagataggcaatcacaatcttcgagagtacttactggttcagtcgctgacagtccgcgaatttcaatccgcaccatggaggcagttctgcacgagagtacttttgtagggcaatctaaagacgccgccgccgttgtcaaatcgaacggggtcaacggcgattcagtgaatttttccgtaaaggtgaatcttaaccaagaaaagactttgatttgtgacgatggtactaatggcaaaatgtgccaaaatacggtggacttggagtttcaaaatattagttttcgtgcgacgcaagggaatatatttaccaaaaggactacaaaagaaattttgcatcaagtcggaggacgtttccagcccgggcagctgatagccataatggggccatcgggtgcaggcaaaagtacattattggatgttttgagtgggtataggatacgtggcgtaacaggttcagtatacgttaacggccaaccaagaagtttaaaggaattcaggaaaacgtcatgttacattacgcaagatgaccgtctgcagcctttactcactgtggacgaaaatatgtgggtagctgcagatttgaaactaccttccagtgtcagcaacagtaataaacggagtataattaacaatattttaaaaacactaaatcttgaaaatacaaaaaaagtgagagcagctggtctttccggtggacagaaaaagaggttgtcaatagctttagagttagtaaataatccaatggtcatgttcttggatgaaccaaccacgggattggatagttcgtcttgttcaacatgtataacactacttaagaaactaactatgcaaggaaaaacaatcatatgtaccattcaccagccttcagctactttatttgcaatgtttgatcaggtgtacgtagtaggaaatgggtactgcctatatcaaggtagtacgaataaactggttccatttttgcaagactgtgggtttccctgtccgcagtatcacaatcctgctgactacgtaatagaactagcatgtattgagcacggacctgagaaacctgaatatatgagggatataattcagaacggacaatcttaccaatattttaacgagcctgaaaagatgaaaagcaccatttgtaactacccaggtcccaaacctattaaacgagttgttagcagtgatgaatcctcttttcccacatcacaattccatcaactaggagttcttatgagacggggatttattaaagcctacagagataagatgcttacctaccttcgtattggaacaaacataatagttggactgatgttgggcagcctctattggaaagctggaagtgatggatctaaagttttggataattttaatttattgtttgcgatattattgcaccatatgatgtccacaatgatgttgacgattttaacatttccccaggaaatgtcgattttaataaaagaacacttcaaccgttggtattcattaaaaatgtattacacatcggtaaccatagtggatattccggtttcggttattggctgcttcctgttttcactcataatatactatatgacagatcaaccaaacgataaagccagattcctgatattcttcgtcacttgcatgttggtagttctagtagctcaaggagttggtctaactattggcgcatattttgatgttgtgaacggaacttttgttggaccaaccctgatggtacccatgatgatgttctccggttttggcgttcgtctacgtgatctgccgaccataatgtactacggcagttttacttcttacttaaggtacggcttggaaggagtagtccaggcggtgtacggaatggacaggggtattcttcaatgtcccgaagacaaattttgcttctacaagtatccgaagactttcctggaaatagtagatgtcaggtcggatcagttcgataatgacatcattgctttactgcttttcttgtttgttttgagaattgcggcgtacgtagtgctgaggtacaaactggcatctgtgcgatagagcctgtttatgttttaataacttttattagaagtaggtgattgaagcctcggttttggtaaacagtgttgttagaaggacatttatttaaattttactcaaaaaaatatttttttttctttagaaaacatcattttttgtgacaatcaaaggaacttagagaaaatttacaataatgtttttaaaattttccaaagattatgatttattaaaagataaaagtatgagatcgtcactcagtacagtggttcccaagtagcaatttttcgacgcattggttgtcagtacaaacaaatgcactgtctacaactttgcccgagagcattttcagttgtttcggccaacgtcccctaccccgactgacattacgatgttacaacctgtagttatacgggcaactaatttattaccattttgacaactacatatcacaattcagttttttcaacaatcgcaacgacttaaaaatgttataatgctaaactaattattatatattttattttgatagaaattttggatttatttaacaacctgtttatttgtttttttaatagctggtttccattccattgttttatcagtagatttgagatttgataaccacctttgtatctgctttggtagacagggttgccaggtcagttttaactctttcagtagttttgttttcacaaaatcagtagattctttttaggccatgtaaatatacagtaatacagtgatatgcacatccgtcttaaatgtcccaagagcaattccacaaaattggaaacctaattattccaaaccaccaactggtaattatcattttttagctaaaatctactaaatcaaaaactaaaatatacttaagtattttgggatatatttgggattttttataataaaaacaacagctaacttaaggggataggcgcaaaatgtcgtctgttaaaatgttcaatgtattttaaatgttttcgttttttgcgaatccttagaaaactaataagtatttttgaaaaatttaaacgcacaaagaaagattacttaccaaggaccgaaagtccctgaaaacttctataatgtttattttaatacgttacaggggtgaaaaaagaaaaaatttagtgacttttaattccaaatatctcgttcaaaagaaacgttttggtttttctaaataatgcagtctttcattctgcgtttaaatttttcaaaaagacgtattatagtttcctcatgattcgaaaaaaatggatcaaattctgttgaaatataccaaaaatctactaaaaatattgcctactagaattttttaaaaaatatcaaaaatctaccaaaaaagtagaaatctactaaatgtggcaacgctgttaatgagaatgatacacttttgacactggtcacatgacctctgtcacccaataagagggtgcgttctaaaatggttttgatagtcggcgcggccgggtttggttggcgattggacttctaagttgtcttatccgtctaaggttggtaataaggtattttttagtaatattggtaatattgtttaatgcgccattttggttttacttgagatttttgggatgtaaagaaaatgaaaacacagaatataaaaaatgcaggcattttctgataactttaaaagcaccatcaatacattaaatttatacagaacatctttaacataaattttgacttttatattaaaatttgattttttaaatttgcatattttttgtcaaaaatgtcataaaaaaagcagcgcgtgtgttttttaaaggtgaaatatccatatttgacggtaatctgagatgcgtttataaatttcacatctggtaataagtcctttatgtatttatatcatataaatttaaatacccaatacgatgtcaaaacagtttactttttggttttcgcattcaccatacagttgttaaaaatataggtaaaaaaacataactagtctgactccttgagcaaccattgcacgcgcaggtgctttttatagtcgcttcagttgtcttatgcaacggttacgaaacgatgttgcttaaacaggaggttgcctaggcaacgtcaagacaactcaaaaatcgtccaccaaatcagtgcagaatagggtcgtcttttaggcaataacaacgttgtaagaaaacgttgccacgcggtagacaacgttgtcgcctcgacaaattgctacttgggttatacctattaatgagccaattctgtaaaaatcatgaactctcatacaattttggtagtacctagtgcaattaaaagtgaaataagaaatataatttcatacttacgttatgatattatccgttatggtatgtaggtactccattcaaatgttacatttagggttgcatttcttagaggagtcaatattattatttttttaatgtgtatggcggttcagtagaagcttaagttcaagtttttggggtcgccacccttgtcccccggccgccatcttggaaaaaggggtgcaaaggacgttcgcgctgtatctcctaaactagcaaccctacagaaaatttaattagaaataaaatgtagcaaattaaattttctacaattttatatttattactttttatcgtcaagtgatatacaaaaaagttataaaataaacaaaaataagaaaaaaatttgtaagaagtttccttttggaggttataacttttttccgttcatttcacaataaaataatatcattgcgattttatggaggatttctcaacgaacaatttccactatttataaagttgtttaattttacttatttatctgggctttacagcgctccaaacttgactagattctcgaaatctcataggaatacacagacaatttctagacaaaataatatttaatattatatgttgaaatagatctatcaaaggttattatttttttatggtcaaggcttcaagttaagatctgaatcagtatccgaggtgaatttttgtggtatagtgagagttagagagttagtgttagcgtcattgtcggtaattcatctttttcatcaataattaatgttgatatgtccaccccacataacaatttcatgttcttagtagattcatagaacatacttttcagaaaaagtatatactaagaatatgcgtaattaccattgcgaatgtgcagagcacatactgagtatatactacattacagtacttaaacgttctatgtatatacttagaatgtactaccgcacttcttctcagtatataccaagaatatactttttaggatattctaagaaggtgctataaaccttctatttatatacttagaatgtactacctcacatcttttagtatataggaagaatgtactttttagtatatgggaagaatattacaaggaagtgctatattgctcagaagcatgttttcagcatcaccgaatctcatcctaggttctactttctactaaatttacatattacatatgagaatgtagttagtacattctacaatattacttaaaaagtaaatataaaatattatataaattttagttagttatatcaatattatataggtaagtaggtatatatatttagttattatgtgcatataaaaataaaaatgctgaatatataaatttatatattcatattcatatacctatcgtacccaaataaatattatgtaacatatgtatgtaaataactaaaatttatatgttgcttatatgtacctatatacatacttactatttaagtaatattgaagtaccaaaatgaattttttatttgtaagttgacagcaaacaaaataaaacgtttaattatgcatgttcctattcctggttgaaatacttggtcttcctcacaacacagcatagacattgttagtgttaagtgtagacacaaatgccaaatgcctattcagtaactattttcatattttgtatttttcctttgttcccaaccccctacccgctaacccctatgcaggtatgcagcggtcgtttccgctttgtttgtgccggttgtgggttttggctcagccacacagcttacctgaatgtcaattccatgtaaaaataaaattcttcataagaatactcaataaacttaatcaaaatagtaaatgcatttcagttatgaaagcgaaacgacaatttctcctttttcgttaatacaattaattcttaaacatttttaccatacaattaaaacaattttaaataatgaattcggtagtttaattaatagtacctacatacataaatttttaaatttcattaattattcttaacgaagttgataatctataggctaacattattcttcctatacatacatatatattatttttaagatattttaaaagtatctacttataagtatgtgttaagtatgtacttataagtatgtgctaagaatattcggtaaaagtatattctgagaatagtatctacttataagtatgtgttaagaatgtacttataagtatgtgctaagaatattcggtaaaggtacattctaagaataaacttttacgaatattccgagttactacgtacacgaatgtactcagtatattcggtacgagaatatactttaaagtatgtgcaaagaacatgaaatttagaatgttttttaaggtacatgctatgcttgtactacgcatatactaaaaagaatatactctgacgaatgttggtagtatatgcttagaacatgatacgaacatcattgttatgtgggacgatgttgctgcaactttcaccaccacaatggaaacacactgctgaacatttgcatttgagatctgcttttcatcaaccacatgcacttccagtttccattgcatctgcaaaaggtgaatttaataagctcgggggtactggaggcttagaagtttggattagtatccaaaatttcccatgctttttccagtcccaatcttctggatcacaatgtttaccgagccatgactgaatctggtgatacactcggagtctttggaaacggactgcatcttgtgttggaggaagtgcgaagagattaaatgcattgttttcactgttttagcgaattgtttttatctccgggtttttagagattcgtctttatttccgccatataaagaggcgataaacgttcgtcgaccccaaaacttgaacttgagcttctactgataccccctacacattgaaaaaaaataaaattgactgctctaataaatgcaacgtatgccctaaaaaatgtaacatatcaatggactaatggtaaaagttgaacaaatacttcctagaactgcagaagaatctttcttacttactccacaaaccaattcaaaaagtactacgttaagagtgtatgaagagtatttcatataaatttccaacaaaaaatctagtcattttacccaattaggtaaatacatttttgtcatttttggcatttctctgattttggattgtcgtttcgtttcgatagggcttttcatcgattgtcatttgtttcgagcttctgtcatgtgttgtataatgtgtgtataatattaatatacacggattatatgacacatgacagaggctcgacacaaatgactgagaatgaaaagccctattctcactgccttaaatgaaacacagctcataatattttttataggaagttattgccataccacaaagtacaggcttcgtctgcagatatttttatggtaatagttttaacaattactcttatatcatggtataggttgtctggctctaaacagtgtcgtgtttattcttaagtatataaagaatgtttcatttaagtaatttttaaactttgctgtgatattgtattaccattttcttgttcatatagcatcatgattgcgcttgggatatgatgtttagaactatcctcttttattaggcaaaaaatgcctaataaacattaggcaactcaacatttatcttctttatgacgtcactgataattggaccgcattatgtaataacggattaaccgccaaaagtccaaaatcgagatattagtgccatcttgcagctagggtgcaaatctctgtataaaaatatgatttttgtaaaaaaattcaaaaaaaagctgtttttaaatgcctgtattaagcgacattttttattttattaaaaaaaaatctcgcactaggatttgtaatatcgaactaaacgccaataatggtacataatccattgtcataaacaaatatccgcatctttgtaagtgtaatattttaattaattctttaattcttattaacttaattctttattacaaaacataacatatttactaacgtttaagatatcgaattaaaagacatcctttgtcaggtaacatcagattaagcgccaaatatgtctcttaatccggtattcggatcttaactcatgcatatcttaaaaaatcattaacgaattaagcgacatttgatcgaataacttttaaaatataaattatttttaaaaaattttaaacacatgtaaaagtctatttacatttgccttaatgtattaaatatgaaacatgtcagtactatattttagaaatagtaccaaaaacaaatttaaaatctttaaaccgatttatctcaaaactacattttggcgcttaatccgctattacataacgcggtccagttgacgttagcgctaccagtagtagaatcatcacgaatcacgaaacgtaaacataaatatttcaccattgggatcatgatgatggttcatttcttattgttattatgaatagagtaccttaagttaacaatttcttatattaagttaaaaaaatatattatatatttattctgcatgtatctaggtatgcctagaaacccaagtcttagtaattaaatgtaaaaaataagtcattttaataattgttttgtactatattataagttatattaggcaatggtttgtaacatatttatttttaaagacaataataattatgtgtaggtataagtaatggattttgggaagagctatgacctcgaaaacatcacaaagaatataactaaatatctcttttcttactcagactctttcaagtcttttgcaatatttcagaatctaaaatatttactaatattactaaagtattggattttgacaaaaactatgaattatgccgatttagttgatacctacacaagtttatgtgaaattttcaaagtcatagctcgtcccaaaatccattaggtacctatacaattgtttgtattggtaacagtcaatctatgaaattttataggtgtgtaaatacaaaaataaatatttaaacatataaaataaaatatattttttgcacgattgatcatttttgactgtttaccgtgacagattttacgtcagtaggtgacatttactagcaactcgacggtaagtaatccaactcgacggtaagtactccaactcgacggtaagtaattcacttaccgtcgagttaaaaaatctcttaattttaatttattttttgaaagaataaagaaaactaacgaattatttattaatattgaaacttatggtacaatttgttaaattatttaatgaaatcccacttgtttgggctgtggtttcacttctaacagaaactcctgcagaatcgcatacattagtagtatccaacattttttctcttcaaatacgcgatcaaagttgaaaacttggaaatatcaatgccatcataaagaaaaacggtggatttaatcattgaatattctgcccagaggcttccaggagctttcaactgcatatgtctttgaacgaaatatgccaatagagtcttttcttcgattcttaaattcttgccttcgcaccattttttaaaactttggtaggtattttgataacggattttggatttttcgggaataattgcggaacacccttcttcccaagcccgttcaatttcttcaaattcactttcgctcatattttaatttataataatcaaaattgtacttaaaattattgacaactaaataaaaactcaattctccattgttgttatgcaccctagttactacctaacaaccaaagtatctatcttgataaaatgaatgaaactagtcaatatgacgaaaatgtttaattttataatttataatggtatcaatcgtgcaaaaaacgttataagcatgtcgaacgttaagggtaaccgatctcagacaataattggagtcgtcgctccgctcctcctccaaacaattgtcttcgatcggtataaaacccttaccgttctccatacttaatatactattactaaaatttacatttggcaacccggcagttttatttattttcacatagcgaagatatttaaaattgtaaacacaaacagtcatatcataattacctgtaacccaagaatacatcgtattgttttatttattatatttggtattgtcatgatatttcgatcgcgagtatcattattaattaccaatagtgtacaattagtgcaagatttacaccaaggcgatttaccttgaagattaaggatttatagacggtttcaaacaaaatcttcagagaacccgaatttttgtgtagtgttgtgtgcagataaagcttgttttaccagaaatggtgtgtttaactttcataattgccaaaagtatgaatttatgggctgg

SEQ ID NO: 445 - DNA, 4225 bp, Diabrotica virgifera
  SmartBlast Evalue=2E-71; Info=TRAS3 protein n=1 Tax=Bombyx mori RepID=Q9BLI5_BOMMO
tggaattcaactcaaacagatcaaaaaggattattagtagaagatatgattaatgaactagagttgatagtacacaataaaccaggaaacccaccaacttttcagaacagagctggtgcggctagcaatatagatataacaatatcaaatgttgcagtagcacacctagttaaggattggaaagtgatggagcatgcaacaataagtgatcacaaccttataactttcaatcttaataacctaaatccacgtaatacggaaatatcttcggtaagatacaatataggtaaagcaaattatgaactattaaagtctgagtttcgaccaccttgtctggtacaaaggggatctaatataaatattgcaacaaaagaattaaccaaacaaattaaaaaagcaatggatatagcaataccaaaaataaaagaaaatagtaaagtaaaaaactcagcctggaaggaaaacctcacaagaatgagaagcagagttagatatgcgcgaaagcgatatcaacgatgtggtatctatcttgagaggcaaatccttctaggtgagtatagaagactaaaacaagaatataaacaagaaataaaaataacaaaagctaaaagttgggaaaccttcgtatcaagacacttagaattagatatgtggggaataccatataaaatagtttctaaaaaaattagatgtccgacaatgctttctactttaaaaaaagaagatggaacatttacagaaagttgggaagaatcggccgaaacattacttaatgtattattacctccagataaattagaaggagaaacagtagaacaaagaaatataagagaagaaatgatacaagaataccaaatagaagaagaaagagaaatagaggaattcacagaagaagaagtatatgaaagtatgagagaaatgaaaagaaagaaggcacctggaccggataatattcatgttgaaatacttcaagcattgtcggaacaaataattccagtactaacatcattatataatgaatgtcttagacaaagaaggtttcccaataattttaaacaagcagaagttataataatacataaaggggaagataaagatcctgccttaccgaaatcatatagaccggtatgtttattgaatacaatgggaaaattacaagaaaaattactatgtaaaaaattaaatcaaataagaacagaaattggattacatcctggtcagtatggttttaggaaaggtagatcaacagaagatgcaataaataaagtatttgaaatagtaaacgaaagcataaaaaagtatgttttaatgatctttatagacgtgtctggggcttttgacaatctttggtggccgtcattctttgaaagacttcgaagaatgagatgtccaaagaatctgtacggaagtctcagaaactactgtcaagaccgatatgcaagcctaagctgtccaacaggaaaaaagacaaaacatatcacaaaaggatgtccacaaggatcagtttgtggacctatgttctgggatgtaatgctagaggaactgttggaacaattgactatagatcctgaagtgcttggaagcatagcatatgcagatgatttgttgttgatcatagatgcaaactcaagaagagaattagaaaataaatcaaatgaagtattaataagagtaaatgattggatgaataaagtaaaattaacaatatcagattcaaaaacaacatatagtttaataaaaggaaatttagaaagagatccaattataaaaattagagggaaaacaataaaaagaaaaatggaaacaagatatttaggtattataatagacgaacaaaaattatttacaaaacacatgagttgtgtctgtgaaaaggcaacaaagatcatgcatagcattgctagtctagcacagaaggaatatagaatttcgttccgacagatgagaatatacctaagtacaatacttgcatcaattgtagggtacggttcaagtgtatgggcacatagattaataaataaaaaaaaacgcagaaaaattaaatagagctcagagaggatttcttgtaagaatgacgggagcatttggaacaactgcaacacaggcactcacagttttaactggagtaatgccaatgcatttagaaacacaaaaaagagcatgtaattattggctaaaaaagaaaaatatgaaaaaataatacaaataataggattagatataagaaataaaagagaattaaaagaaataataaatagaaaaagacaaaatgaatgggaaaattcaacaaaatctagacgtttatacaattttataccaatattagaaaacattccaaattattttaatccaaaacaaggtttaatacactttttaacaggacatggaccgtacccaacatatttggaaagatttaacttaaaagatgatgcatattgtgaatgtggagaactaggtacaccagaacatatagtgttacattgtgaaaatactatagaaaatgaagaacatagagaaatgagaagaagattagaaagaattgaaataagagatatattacaaaatgaagaatattttgaaatattaaacaatctcacacaaataatatctaaaaaacaacaagaaatctataataatagaagaagacaaccaataatccaaccctgatgaagttgagtaagataaagttaaaataaataaaataaaatataaattcaaaaatagatatttacaattataataataataattcaatataaaatatataaataaaaataataattcaataaataattcattaaattaaaaaaaaaaagctaccaactctcttctgaaaatagagggactgtctttataacttagaagggagttgatagtaccaaaaatatttttttgcacgattgatcatttttgactgtttaccgtgacagattttacgtcagtaggtgacatttactagcaactcgacggtaagtaatccaactcgacggtaagtactccaactcgacggtaagtaattcacttaccgtcgagttaaaaaatctcttaattttaatttattttttgaaagaataaagaaaactaacgaattatttattaatattgaaacttatggtacaatttgttaaattatttaatgaaatcccacttgtttgggctgtggtttcacttctaacagaaactcctgcagaatcgcatacattagtagtatccaacattttttctcttcaaatacgcgatcaaagttgaaaacttggaaatatcaatgccatcataaagaaaaacggtggatttaatcattgaatattctgcccagaggcttccaggagctttcaactgcatatgtctttgaacgaaatatgccaatagagtcttttcttcgattcttaaattcttgccttcgcaccattttttaaaactttggtaggtattttgataacggattttggatttttcgggaataattgcggaacacccttcttcccaagcccgttcaatttcttcaaattcactttcgctcatattttaatttataataatcaaaattgtacttaaaattattgacaactaaataaaaactcaattctccattgttgttatgcaccctagttactacctaacaaccaaagtatctatcttgataaaatgaatgaaactagtcaatatgacgaaaatgtttaattttataatttataatggtatcaatcgtgcaaaaaacgttataagcatgtcgaacgttaagggtaaccgatctcagacaataattggagtcgtcgctccgctcctcctccaaacaattgtcttcgatcggtataaaacccttaccgttctccatacttaatatactattactaaaatttacatttggcaacccggcagttttatttattttcacatagcgaagatatttaaaattgtaaacacaaacagtcatatcataattacctgtaacccaagaatacatcgtattgttttatttattatatttggtattgtcatgatatttcgatcgcgagtatcattattaattaccaatagtgtacaattagtgcaagatttacaccaaggcgatttaccttgaagattaaggatttatagacggtttcaaacaaaatcttcagagaacccgaatttttgtgtagtgttgtgtgcagataaagcttgttttaccagaaatggtgtgtttaactttcataattgccaaaagtatgaatttatgggctgg

SEQ ID NO: 446 - DNA, 4079 bp, Diabrotica virgifera
  SmartBlast Evalue=2E-71; Info=TRAS3 protein n=1 Tax=Bombyx mori RepID=Q9BLI5_BOMMO
tggaattcaactcaaacagatcaaaaaggattattagtagaagatatgattaatgaactagagttgatagtacacaataaaccaggaaacccaccaacttttcagaacagagctggtgcggctagcaatatagatataacaatatcaaatgttgcagtagcacacctagttaaggattggaaagtgatggagcatgcaacaataagtgatcacaaccttataactttcaatcttaataacctaaatccacgtaatacggaaatatcttcggtaagatacaatataggtaaagcaaattatgaactattaaagtctgagtttcgaccaccttgtctggtacaaaggggatctaatataaatattgcaacaaaagaattaaccaaacaaattaaaaaagcaatggatatagcaataccaaaaataaaagaaaatagtaaagtaaaaaactcagcctggaaggaaaacctcacaagaatgagaagcagagttagatatgcgcgaaagcgatatcaacgatgtggtatctatcttgagaggcaaatccttctaggtgagtatagaagactaaaacaagaatataaacaagaaataaaaataacaaaagctaaaagttgggaaaccttcgtatcaagacacttagaattagatatgtggggaataccatataaaatagtttctaaaaaaattagatgtccgacaatgctttctactttaaaaaaagaagatggaacatttacagaaagttgggaagaatcggccgaaacattacttaatgtattattacctccagataaattagaaggagaaacagtagaacaaagaaatataagagaagaaatgatacaagaataccaaatagaagaagaaagagaaatagaggaattcacagaagaagaagtatatgaaagtatgagagaaatgaaaagaaagaaggcacctggaccggataatattcatgttgaaatacttcaagcattgtcggaacaaataattccagtactaacatcattatataatgaatgtcttagacaaagaaggtttcccaataattttaaacaagcagaagttataataatacataaaggggaagataaagatcctgccttaccgaaatcatatagaccggtatgtttattgaatacaatgggaaaattacaagaaaaattactatgtaaaaaattaaatcaaataagaacagaaattggattacatcctggtcagtatggttttaggaaaggtagatcaacagaagatgcaataaataaagtatttgaaatagtaaacgaaagcataaaaaagtatgttttaatgatctttatagacgtgtctggggcttttgacaatctttggtggccgtcattctttgaaagacttcgaagaatgagatgtccaaagaatctgtacggaagtctcagaaactactgtcaagaccgatatgcaagcctaagctgtccaacaggaaaaaagacaaaacatatcacaaaaggatgtccacaaggatcagtttgtggacctatgttctgggatgtaatgctagaggaactgttggaacaattgactatagatcctgaagtgcttggaagcatagcatatgcagatgatttgttgttgatcatagatgcaaactcaagaagagaattagaaaataaatcaaatgaagtattaataagagtaaatgattggatgaataaagtaaaattaacaatatcagattcaaaaacaacatatagtttaataaaaggaaatttagaaagagatccaattataaaaattagagggaaaacaataaaaagaaaaatggaaacaagatatttaggtattataatagacgaacaaaaattatttacaaaacacatgagttgtgtctgtgaaaaggcaacaaagatcatgcatagcattgctagtctagcacagaaggaatatagaatttcgttccgacagatgagaatatacctaagtacaatacttgcatcaattgtagggtacggttcaagtgtatgggcacatagattaataaataaaaaaaaacgcagaaaaattaaatagagctcagagaggatttcttgtaagaatgacgggagcatttggaacaactgcaacacaggcactcacagttttaactggagtaatgccaatgcatttagaaacacaaaaaagagcatgtaattattggctaaaaaagaaaaatatgaaaaaataatacaaataataggattagatataagaaataaaagagaattaaaagaaataataaatagaaaaagacaaaatgaatgggaaaattcaacaaaatctagacgtttatacaattttataccaatattagaaaacattccaaattattttaatccaaaacaaggtttaatacactttttaacaggacatggaccgtacccaacatatttggaaagatttaacttaaaagatgatgcatattgtgaatgtggagaactaggtacaccagaacatatagtgttacattgtgaaaatactatagaaaatgaagaacatagagaaatgagaagaagattagaaagaattgaaataagagatatattacaaaatgaagaatattttgaaatattaaacaatctcacacaaataatatctaaaaaacaacaagaaatctataataatagaagaagacaaccaataatccaaccctgatgaagttgagtaagataaagttaaaataaataaaataaaatataaattcaaaaatagatatttacaattataataataataattcaatataaaatatataaataaaaataataattcaataaataattcattaaattaaaaaaaaaaagctaccaactctcttctgaaaatagagggactgtctttataacttagaagggagttgatagtaccaaaaatatttttttgcacgattgatcatttttgactgtttaccgtgacagattttacgtcagtaggtgacatttactagcaactcgacggtaagtaatccaactcgacggtaagtactccaactcgacggtaagtaattcacttaccgtcgagttaaaaaatctcttaattttaatttattttttgaaagaataaagaaaactaacgaattatttattaatattgaaacttatggtacaatttgttaaattatttaatgaaatcccacttgtttgggctgtggtttcacttctaacagaaactcctgcagaatcgcatacattagtagtattactagtattgcacaatattttttcggcaaaatctattttattttgaagagaatcttctacatagctttctgccactgtcgatgaacgccaacctccatgacgctttaatccgaggacatcaacacctttattagccaaaagcgttgctgatgtcctcctgaacgaatggccagtatagttctcgggattaggcaaatttaagaatttggcaatttgagaaggccagcccccgattgtccctttccctattacttgagcacaacattttcctttggcgtatcttaagaacaaatgatttgattttacttgtaatggacgaagttttatatactttataatggtatcaatcgtgcaaaaaacgttataagcatgtcgaacgttaagggtaaccgatctcagacaataattggagtcgtcgctccgctcctcctccaaacaattgtcttcgatcggtataaaacccttaccgttctccatacttaatatactattactaaaatttacatttggcaacccggcagttttatttattttcacatagcgaagatatttaaaattgtaaacacaaacagtcatatcataattacctgtaacccaagaatacatcgtattgttttatttattatatttggtattgtcatgatatttcgatcgcgagtatcattattaattaccaatagtgtacaattagtgcaagatttacaccaaggcgatttaccttgaagattaaggatttatagacggtttcaaacaaaatcttcagagaacccgaatttttgtgtagtgttgtgtgcagataaagcttgttttaccagaaatggtgtgtttaactttcataattgccaaaagtatgaatttatgggctgg

SEQ ID NO: 447 - DNA, 3843 bp, Diabrotica virgifera
  SmartBlast Evalue=1E-98; Info=Hydroxyacid oxidase 1 n=1 Tax= Harpegnathos saltator RepID=E2BJY7_9HYME
aagtacttgatataattcttacaacagagaaataattttcttgtcaaaatgtctgatttatttagcgtttcggaatttgagaaacatgctttggaagttttgcctaaaaatattcgagattactacagaagtggtgcaggacgacaggagacattggctgataacagaaaagcattcttcaggtataaagtaagaccaagatatttaagaaatgtagaaaatatagatttatctacagtagttcttggagagaagatttccatgccaattggaattgctccgtctggtatgcaaaaaatggctcatccaatgggcgaactggctgttgttaaagctgcccaagaaatgggtgtagtttacactcttagcaccatgtcaacatacagcattgaagaagttgctcaagctgctccaatggctgtgaaatggtttcaagtatatatttataaggacagagatttaactagaaatttaattttgagagcggagaaagctggttttaaagcaatagtattaactgtggatgcaccgttatttggtttgcgtattcctgatttaaagaacaagttcacattacctccacatcttaaattggcgaatttcgaaggaagagtttcggaaatgagccaggaccccacaaaaggatcaggtcttaacaactacgttaatgatttgttcgatccgtccattaatgggaagacattaaatggttgaagagtattacaaaccttcccatagttctgaaaggatattgactgcagaggatgcattactcgctgtggaggctggggtagctgccgttcaagtctccaaccatgggtctaggcagttggatggaacacctgctgcgattgacgctctatgtgatgtagtaaaggcggtaggagacaaaatagaagtttacatcgatggtggagtgacagatggcgttgatgttctcaaagctgttgctcttggagcaaagatggctctggtaggacgatctgctttatggggattggttcatagtggacaacaaggagtcgagagagttctcaatattcttaaaaacgaactcaggaccggcttgggaatatcaggttattcaaaaataaatcaaattgatagaagcttggtggtacatgaaagttattatgctaagctttaagatgactgaagttggaccgcattatgtaataacggattaaccgccaaaagtccaaaatcgagatattagtgccatcttgcagctagggtgcaaatctctgtataaaaatatgatttttgtaaaaaaattcaaaaaaaagctgtttttaaatgcctgtattaagcgacattttttattttattaaaaaaaaatctcgcactaggatttgtaatatcgaactaaacgccaataatggtacataatccattgtcataaacaaatatccgcatctttgtaagtgtaatattttaattaattctttaattcttattaacttaattctttattacaaaacataacatatttactaacgtttaagatatcgaattaaaagacatcctttgtcaggtaacatcagattaagcgccaaatatgtctcttaatccggtattcggatcttaactcatgcatatcttaaaaaatcattaacgaattaagcgacatttgatcgaataacttttaaaatataaattatttttaaaaaattttaaacacatgtaaaagtctatttacatttgccttaatgtattaaatatgaaacatgtcagtactatattttagaaatagtaccaaaaacaaatttaaaatctttaaaccgatttatctcaaaactacattttggcgcttaatccgctattacataacgcggtccagttgacgttagcgctaccagtagtagaatcatcacgaatcacgaaacgtaaacataaatatttcaccattgggatcatgatgatggttcatttcttattgttattatgaatagagtaccttaagttaacaatttcttatattaagttaaaaaaatatattatatatttattctgcatgtatctaggtatgcctagaaacccaagtcttagtaattaaatgtaaaaaataagtcattttaataattgttttgtactatattataagttatattaggcaatggtttgtaacatatttatttttaaagacaataataattatgtgtaggtataagtaatggattttgggaagagctatgacctcgaaaacatcacaaagaatataactaaatatctcttttcttactcagactctttcaagtcttttgcaatatttcagaatctaaaatatttactaatattactaaagtattggattttgacaaaaactatgaattatgccgatttagttgatacctacacaagtttatgtgaaattttcaaagtcatagctcgtcccaaaatccattaggtacctatacaattgtttgtattggtaacagtcaatctatgaaattttataggtgtgtaaatacaaaaataaatatttaaacatataaaataaaatatattttttgcacgattgatcatttttgactgtttaccgtgacagattttacgtcagtaggtgacatttactagcaactcgacggtaagtaatccaactcgacggtaagtactccaactcgacggtaagtaattcacttaccgtcgagttaaaaaatctcttaattttaatttattttttgaaagaataaagaaaactaacgaattatttattaatattgaaacttatggtacaatttgttaaattatttaatgaaatcccacttgtttgggctgtggtttcacttctaacagaaactcctgcagaatcgcatacattagtagtatccaacattttttctcttcaaatacgcgatcaaagttgaaaacttggaaatatcaatgccatcataaagaaaaacggtggatttaatcattgaatattctgcccagaggcttccaggagctttcaactgcatatgtctttgaacgaaatatgccaatagagtcttttcttcgattcttaaattcttgccttcgcaccattttttaaaactttggtaggtattttgataacggattttggatttttcgggaataattgcggaacacccttcttcccaagcccgttcaatttcttcaaattcactttcgctcatattttaatttataataatcaaaattgtacttaaaattattgacaactaaataaaaactcaattctccattgttgttatgcaccctagttactacctaacaaccaaagtatctatcttgataaaatgaatgaaactagtcaatatgacgaaaatgtttaattttataatttataatggtatcaatcgtgcaaaaaacgttataagcatgtcgaacgttaagggtaaccgatctcagacaataattggagtcgtcgctccgctcctcctccaaacaattgtcttcgatcggtataaaacccttaccgttctccatacttaatatactattactaaaatttacatttggcaacccggcagttttatttattttcacatagcgaagatatttaaaattgtaaacacaaacagtcatatcataattacctgtaacccaagaatacatcgtattgttttatttattatatttggtattgtcatgatatttcgatcgcgagtatcattattaattaccaatagtgtacaattagtgcaagatttacaccaaggcgatttaccttgaagattaaggatttatagacggtttcaaacaaaatcttcagagaacccgaatttttgtgtagtgttgtgtgcagataaagcttgttttaccagaaatggtgtgtttaactttcataattgccaaaagtatgaatttatgggctgg

SEQ ID NO: 448 - DNA, 3853 bp, Diabrotica virgifera
ttttgcatccagtatttacactaatactttatttcttttcaaaacttgaggatagtatgaagaaagtatgaaaacgttgaggatatggcaacggtgtcaaattttaaatttagatccagtcacagaacaataatttctctggttaatgcggggttgccaccacctcagaaccgcgtgaaatagaagtcagaggtttcgattacgatatgagttagagaatagcaatccaaacacaaaaatgacgcgatagatatcaaacattccgattttgggtaattacgattcgacttggtcatttctattcgatttgttaaaagttacagaatagggctgaatattattatttttttaatgtgtatggcggttcagtagaagcttaagttcaagtttttggggtcgccacccttgtcccccggccgccatcttggaaaaaggggtgcaaaggacgttcgcgctgtatctcctaaactagcaaccctacagaaaatttaattagaaataaaatgtagcaaattaaattttctacaattttatatttattactttttatcgtcaagtgatatacaaaaaagttataaaataaacaaaaataagaaaaaaatttgtaagaagtttccttttggaggttataacttttttccgttcatttcacaataaaataatatcattgcgattttatggaggatttctcaacgaacaatttccactatttataaagttgtttaattttacttatttatctgggctttacagcgctccaaacttgactagattctcgaaatctcataggaatacacagacaatttctagacaaaataatatttaatattatatgttgaaatagatctatcaaaggttattatttttttatggtcaaggcttcaagttaagatctgaatcagtatccgaggtgaatttttgtggtatagtgagagttagagagttagtgttagcgtcattgtcggtaattcatctttttcatcaataattaatgttgatatgtccaccccacataacaatttcatgttcttagtagattcatagaacatacttttcagaaaaagtatatactaagaatatgcgtaattaccattgcgaatgtgcagagcacatactgagtatatactacattacagtacttaaacgttctatgtatatacttagaatgtactaccgcacttcttctcagtatataccaagaatatactttttaggatattctaagaaggtgctataaaccttctatttatatacttagaatgtactacctcacatcttttagtatataggaagaatgtactttttagtatatgggaagaatattacaaggaagtgctatattgctcagaagcatgttttcagcatcaccgaatctcatcctaggttctactttctactaaatttacatattacatatgagaatgtagttagtacattctacaatattacttaaaaagtaaatataaaatattatataaattttagttagttatatcaatattatataggtaagtaggtatatatatttagttattatgtgcatataaaaataaaaatgctgaatatataaatttatatattcatattcatatacctatcgtacccaaataaatattatgtaacatatgtatgtaaataactaaaatttatatgttgcttatatgtacctatatacatacttactatttaagtaatattgaagtaccaaaatgaattttttatttgtaagttgacagcaaacaaaataaaacgtttaattatgcatgttcctattcctggttgaaatacttggtcttcctcacaacacagcatagacattgttagtgttaagtgtagacacaaatgccaaatgcctattcagtaactattttcatattttgtatttttcctttgttcccaaccccctacccgctaacccctatgcaggtatgcagcggtcgtttccgctttgtttgtgccggttgtgggttttggctcagccacacagcttacctgaatgtcaattccatgtaaaaataaaattcttcataagaatactcaataaacttaatcaaaatagtaaatgcatttcagttatgaaagcgaaacgacaatttctcctttttcgttaatacaattaattcttaaacatttttaccatacaattaaaacaattttaaataatgaattcggtagtttaattaatagtacctacatacataaatttttaaatttcattaattattcttaacgaagttgataatctataggctaacattattcttcctatacatacatatatattatttttaagatattttaaaagtatctacttataagtatgtgttaagtatgtacttataagtatgtgctaagaatattcggtaaaagtatattctgagaatagtatctacttataagtatgtgttaagaatgtacttataagtatgtgctaagaatattcggtaaaggtacattctaagaataaacttttacgaatattccgagttactacgtacacgaatgtactcagtatattcggtacgagaatatactttaaagtatgtgcaaagaacatgaaatttagaatgttttttaaggtacatgctatgcttgtactacgcatatactaaaaagaatatactctgacgaatgttggtagtatatgcttagaacatgatacgaacatcattgttatgtgggacgatgttgctgcaactttcaccaccacaatggaaacacactgctgaacatttgcatttgagatctgcttttcatcaaccacatgcacttccagtttccattgcatctgcaaaaggtgaatttaataagctcgggggtactggaggcttagaagtttggattagtatccaaaatttcccatgctttttccagtcccaatcttctggatcacaatgtttaccgagccatgactgaatctggtgatacactcggagtctttggaaacggactgcatcttgtgttggaggaagtgcgaagagattaaatgcattgttttcactgttttagcgaattgtttttatctccgggtttttagagattcgtctttatttccgccatataaagaggcgataaacgttcgtcgaccccaaaacttgaacttgagcttctactgataccccctacacattgaaaaaaaataaaattgactgctctaataaatgcaacgtatgccctaaaaaatgtaacatatcaatggactaatggtaaaagttgaacaaatacttcctagaactgcagaagaatctttcttacttactccacaaaccaattcaaaaagtactacgttaagagtgtatgaagagtatttcatataaatttccaacaaaaaatctagtcattttacccaattaggtaaatacatttttgtcatttttggcatttctctgattttggattgtcgtttcgtttcgatagggcttttcatcgattgtcatttgtttcgagcttctgtcatatgttgtataatctgtgtataatattaatatgcacggattatacgacatatgacagaggctcgagacagatgactgaatgaaaagtcctattgatgtggaataatagaaaagtgattaaatccgacaaaaaacaaagcagtattgttagaagatcggtgaaagctcaagtggttagatattagcgtagagggggtgcagattctgacgaataagaatttgagttgggttgaattgtcaacgccatcttaggatgtcgcatgttgagcgagttttattgataaataaacactttcatagtttgaaagtcgtactgtactgactttcttccaattgcattcataaaatttcgttatttcttttactactatttcaaagaagtttttctttgatacaag

SEQ ID NO: 449 - DNA, 3914 bp, Diabrotica virgifera
gctccgtaaagtagtatacctttgatgcagttgttaaagctattattttttttgtttccgatgtttcctttgtttgccaattttttttaacattaaatgcatgcaaggttctgtaactattttcttgtggcatgtttaatttagtattatgtttatatgggattgagccacaattattcattaggctcattcataaaagacagctcaaggtcttacgacatgctgcgtttcctagggatttgacaacctaacctacttatgcttccataactttccacgaagatggactatctgttgatagaatcaacataaaattgcttttctacaccctaggtgtacacacaagacggcttaatatcgtttctcaaattttccgtataacgtgtaatgtggtttgcctaccactttcattgcaaacattctaactattacatcaagtttattttcattttaacggattatttaccacagtgggagtgattgtggtcactgtttcgtaatttaacaagctttacaatatatttcatataactaacagagaaattttaacttcctgtggaactgtcatttctgtcatgtcatccttcagaatttccgctatcagagccacttgctaccatacagtcatgatgtaaacaagtcagattcgagctcaatggtacctagagcatgaaacattggatattttgaacatccatgtttaatttcacatttcatttctatgttcctatgacggattaattgtaaagggttttacccaaatatattttactttggtggttagcatgttagattcacgtgagtataacctataacttttaaaatcgtagtcaaaattttaaatagtttgcattatcttatcaggttatacacattttaggtaaacactgatgatgatcggtcatccgatcgaaaactagttctgttctgtgatgtagccctgttttgggattttaacaaatataccttttataaaggattttatgttttttccacaaatattggtgtaatgaaaattacatttttaattaactactgtttgacgtttcgatttccactccagaaatcgttctcaaaaaaggatataattctgaaaaaaatgttagaaagattttataacctgagttttatttttttttaacctaaaaaactgtgttggctggcctgctaattgtggccaaatagccggaaaatctcatccgcaaattgcagatcttttgtttggttaaagttccatataatgcctgttcgatcgtcagttacttttctcattatccaatctatcataataagaaataggataggagttagtacgcaaccctgattggctccactttctgtggttatttcttctgatgttatctactttatctgagtgtttcagtttggctctgtatccttcaaagagaagtttgaaaaagttgatcatttttagtgggatcccataatatgtagacttaaaattttccatatttgtactgtatttacacggtcgaaggctctttaaaagacaaacaaagataaacctttcatctatatttttatttgctttttccaaaataattttagcaatgcaaatgtggtcaatggtggagtgttttccacagaggcctgcttggttacttctcagtttcttgtatggttccggcttcaatttttcattatgattttagtcaacaatttatatgtggtgcttagtagtaattgcacgccaattcttgcatcgagtcatatctcatttttttttgtattttaattctcaatctcccttttacttctttggtaattctttattcgttcaaaaaagattagcactgatgaattcagtgttcataaattaggtgtactcaccagattcacgtattgagcaactagcacagtgtaataaatactcataaataattaatagaaatcttctctactggaacatactttacaaatttttttctagtaatgtgtttgtctttctcgaatattagttctataatgataatcttgttaagactcttatgaaatggtgatcattttggttgatcaattacaactatcgcggaaattgccaaatgtcctccgccaaatgtaaattgccaaatgtaaaccgtgaagtcagcctcaaaagaagtacttgggaaaaacctacggttgacagttggttcttcaactggtcattgccaactaagcaaacacctccacacgcggacgggctagtggacacacctctatgtaggtgtacaggagaagacgaaacgagcatgtcctgtgagtatccgtaggtaccgtcaataatagagtactcgttccgccagccgtggcctacacctgcccacataagggagatgtctgacgacttgtccaccttcgtgtggaaaagacaggatatgcaatgagctagagactaaaactccctggtaggatgcacaatggataaattgtggcccaattgatatgtgacttgattcactctcgctactctgcagatacagttacaggatgatacaaatgtatatatcattataaagagcttttaacttgtcaaagctatctttggcactcaaacactctaatacaataataatattttttgcacgattgatcatttttgactgtttaccgtgacagattttacgtcagtaggtgacatttactagcaactcgacggtaagtaatccaactcgacggtaagtactccaactcgacggtaagtaattcacttaccgtcgagttaaaaaatctcttaattttaatttattttttgaaagaataaagaaaactaacgaattatttattaatattgaaacttatggtacaatttgttaaattatttaatgaaatcccacttgtttgggctgtggtttcacttctaacagaaactcctgcagaatcgcatacattagtagtatccaacattttttctcttcaaatacgcgatcaaagttgaaaacttggaaatatcaatgccatcataaagaaaaacggtggatttaatcattgaatattctgcccagaggcttccaggagctttcaactgcatatgtctttgaacgaaatatgccaatagagtcttttcttcgattcttaaattcttgccttcgcaccattttttaaaactttggtaggtattttgataacggattttggatttttcgggaataattgcggaacacccttcttcccaagcccgttcaatttcttcaaattcactttcgctcatattttaatttataataatcaaaattgtacttaaaattattgacaactaaataaaaactcaattctccattgttgttatgcaccctagttactacctaacaaccaaagtatctatcttgataaaatgaatgaaactagtcaatatgacgaaaatgtttaattttataatttataatggtatcaatcgtgcaaaaaacgttataagcatgtcgaacgttaagggtaaccgatctcagacaataattggagtcgtcgctccgctcctcctccaaacaattgtcttcgatcggtataaaacccttaccgttctccatacttaatatactattactaaaatttacatttggcaacccggcagttttatttattttcacatagcgaagatatttaaaattgtaaacacaaacagtcatatcataattacctgtaacccaagaatacatcgtattgttttatttattatatttggtattgtcatgatatttcgatcgcgagtatcattattaattaccaatagtgtacaattagtgcaagatttacaccaaggcgatttaccttgaagattaaggatttatagacggtttcaaacaaaatcttcagagaacccgaatttttgtgtagtgttgtgtgcagataaagcttgttttaccagaaatggtgtgtttaactttcataattgccaaaagtatgaatttatgggctgg

SEQ ID NO: 450 - DNA, 3869 bp, Diabrotica virgifera
gctccgtaaagtagtatacctttgatgcagttgttaaagctattattttttttgtttccgatgtttcctttgtttgccaattttttttaacattaaatgcatgcaaggttctgtaactattttcttgtggcatgtttaatttagtattatgtttatatgggattgagccacaattattcattaggctcattcataaaagacagctcaaggtcttacgacatgctgcgtttcctagggatttgacaacctaacctacttatgcttccataactttccacgaagatggactatctgttgatagaatcaacataaaattgcttttctacaccctaggtgtacacacaagacggcttaatatcgtttctcaaattttccgtataacgtgtaatgtggtttgcctaccactttcattgcaaacattctaactattacatcaagtttattttcattttaacggattatttaccacagtgggagtgattgtggtcactgtttcgtaatttaacaagctttacaatatatttcatataactaacagagaaattttaacttcctgtggaactgtcatttctgtcatgtcatccttcagaatttccgctatcagagccacttgctaccatacagtcatgatgtaaacaagtcagattcgagctcaatggtacctagagcatgaaacattggatattttgaacatccatgtttaatttcacatttcatttctatgttcctatgacggattaattgtaaagggttttacccaaatatattttactttggtggttagcatgttagattcacgtgagtataacctataacttttaaaatcgtagtcaaaattttaaatagtttgcattatcttatcaggttatacacattttaggtaaacactgatgatgatcggtcatccgatcgaaaactagttctgttctgtgatgtagccctgttttgggattttaacaaatataccttttataaaggattttatgttttttccacaaatattggtgtaatgaaaattacatttttaattaactactgtttgacgtttcgatttccactccagaaatcgttctcaaaaaaggatataattctgaaaaaaatgttagaaagattttataacctgagttttatttttttttaacctaaaaaactgtgttggctggcctgctaattgtggccaaatagccggaaaatctcatccgcaaattgcagatcttttgtttggttaaagttccatataatgcctgttcgatcgtcagttacttttctcattatccaatctatcataataagaaataggataggagttagtacgcaaccctgattggctccactttctgtggttatttcttctgatgttatctactttatctgagtgtttcagtttggctctgtatccttcaaagagaagtttgaaaaagttgatcatttttagtgggatcccataatatgtagacttaaaattttccatatttgtactgtatttacacggtcgaaggctctttaaaagacaaacaaagataaacctttcatctatatttttatttgctttttccaaaataattttagcaatgcaaatgtggtcaatggtggagtgttttccacagaggcctgcttggttacttctcagtttcttgtatggttccggcttcaatttttcattatgattttagtcaacaatttatatgtggtgcttagtagtaattgcacgccaattcttgcatcgagtcatatctcatttttttttgtattttaattctcaatctcccttttacttctttggtaattctttattcgttcaaaaaagattagcactgatgaattcagtgttcataaattaggtgtactcaccagattcacgtattgagcaactagcacagtgtaataaatactcataaataattaatagaaatcttctctactggaacatactttacaaatttttttctagtaatgtgtttgtctttctcgaatattagttctataatgataatcttgttaagactcttatgaaatggtgatcattttggttgatcaattacaactatcgcggaaattgccaaatgtctcaaagaagtacttgggaaaaacctacggttgacagttggttcttcaactggtcattgccaactaagcaaacacctccacacgcggacgggctagtggacacacctctatgtaggtgtacaggagaagacgaaacgagcatgtcctgtgagtatccgtaggtaccgtcaataatagagtactcgttccgccagccgtggcctacacctgcccacataagggagatgtctgacgacttgtccaccttcgtgtggaaaagacaggatatgcaatgagctagagactaaaactccctggtaggatgcacaatggataaattgtggcccaattgatatgtgacttgattcactctcgctactctgcagatacagttacaggatgatacaaatgtatatatcattataaagagcttttaacttgtcaaagctatctttggcactcaaacactctaatacaataataatattttttgcacgattgatcatttttgactgtttaccgtgacagattttacgtcagtaggtgacatttactagcaactcgacggtaagtaatccaactcgacggtaagtactccaactcgacggtaagtaattcacttaccgtcgagttaaaaaatctcttaattttaatttattttttgaaagaataaagaaaactaacgaattatttattaatattgaaacttatggtacaatttgttaaattatttaatgaaatcccacttgtttgggctgtggtttcacttctaacagaaactcctgcagaatcgcatacattagtagtatccaacattttttctcttcaaatacgcgatcaaagttgaaaacttggaaatatcaatgccatcataaagaaaaacggtggatttaatcattgaatattctgcccagaggcttccaggagctttcaactgcatatgtctttgaacgaaatatgccaatagagtcttttcttcgattcttaaattcttgccttcgcaccattttttaaaactttggtaggtattttgataacggattttggatttttcgggaataattgcggaacacccttcttcccaagcccgttcaatttcttcaaattcactttcgctcatattttaatttataataatcaaaattgtacttaaaattattgacaactaaataaaaactcaattctccattgttgttatgcaccctagttactacctaacaaccaaagtatctatcttgataaaatgaatgaaactagtcaatatgacgaaaatgtttaattttataatttataatggtatcaatcgtgcaaaaaacgttataagcatgtcgaacgttaagggtaaccgatctcagacaataattggagtcgtcgctccgctcctcctccaaacaattgtcttcgatcggtataaaacccttaccgttctccatacttaatatactattactaaaatttacatttggcaacccggcagttttatttattttcacatagcgaagatatttaaaattgtaaacacaaacagtcatatcataattacctgtaacccaagaatacatcgtattgttttatttattatatttggtattgtcatgatatttcgatcgcgagtatcattattaattaccaatagtgtacaattagtgcaagatttacaccaaggcgatttaccttgaagattaaggatttatagacggtttcaaacaaaatcttcagagaacccgaatttttgtgtagtgttgtgtgcagataaagcttgttttaccagaaatggtgtgtttaactttcataattgccaaaagtatgaatttatgggctgg

SEQ ID NO: 451 - DNA, 3697 bp, Diabrotica virgifera
  SmartBlast Evalue=1E-98; Info=Hydroxyacid oxidase 1 n=1 Tax= Harpegnathos saltator RepID=E2BJY7_9HYME
aagtacttgatataattcttacaacagagaaataattttcttgtcaaaatgtctgatttatttagcgtttcggaatttgagaaacatgctttggaagttttgcctaaaaatattcgagattactacagaagtggtgcaggacgacaggagacattggctgataacagaaaagcattcttcaggtataaagtaagaccaagatatttaagaaatgtagaaaatatagatttatctacagtagttcttggagagaagatttccatgccaattggaattgctccgtctggtatgcaaaaaatggctcatccaatgggcgaactggctgttgttaaagctgcccaagaaatgggtgtagtttacactcttagcaccatgtcaacatacagcattgaagaagttgctcaagctgctccaatggctgtgaaatggtttcaagtatatatttataaggacagagatttaactagaaatttaattttgagagcggagaaagctggttttaaagcaatagtattaactgtggatgcaccgttatttggtttgcgtattcctgatttaaagaacaagttcacattacctccacatcttaaattggcgaatttcgaaggaagagtttcggaaatgagccaggaccccacaaaaggatcaggtcttaacaactacgttaatgatttgttcgatccgtccattaatgggaagacattaaatggttgaagagtattacaaaccttcccatagttctgaaaggatattgactgcagaggatgcattactcgctgtggaggctggggtagctgccgttcaagtctccaaccatgggtctaggcagttggatggaacacctgctgcgattgacgctctatgtgatgtagtaaaggcggtaggagacaaaatagaagtttacatcgatggtggagtgacagatggcgttgatgttctcaaagctgttgctcttggagcaaagatggctctggtaggacgatctgctttatggggattggttcatagtggacaacaaggagtcgagagagttctcaatattcttaaaaacgaactcaggaccggcttgggaatatcaggttattcaaaaataaatcaaattgatagaagcttggtggtacatgaaagttattatgctaagctttaagatgactgaagttggaccgcattatgtaataacggattaaccgccaaaagtccaaaatcgagatattagtgccatcttgcagctagggtgcaaatctctgtataaaaatatgatttttgtaaaaaaattcaaaaaaaagctgtttttaaatgcctgtattaagcgacattttttattttattaaaaaaaaatctcgcactaggatttgtaatatcgaactaaacgccaataatggtacataatccattgtcataaacaaatatccgcatctttgtaagtgtaatattttaattaattctttaattcttattaacttaattctttattacaaaacataacatatttactaacgtttaagatatcgaattaaaagacatcctttgtcaggtaacatcagattaagcgccaaatatgtctcttaatccggtattcggatcttaactcatgcatatcttaaaaaatcattaacgaattaagcgacatttgatcgaataacttttaaaatataaattatttttaaaaaattttaaacacatgtaaaagtctatttacatttgccttaatgtattaaatatgaaacatgtcagtactatattttagaaatagtaccaaaaacaaatttaaaatctttaaaccgatttatctcaaaactacattttggcgcttaatccgctattacataacgcggtccagttgacgttagcgctaccagtagtagaatcatcacgaatcacgaaacgtaaacataaatatttcaccattgggatcatgatgatggttcatttcttattgttattatgaatagagtaccttaagttaacaatttcttatattaagttaaaaaaatatattatatatttattctgcatgtatctaggtatgcctagaaacccaagtcttagtaattaaatgtaaaaaataagtcattttaataattgttttgtactatattataagttatattaggcaatggtttgtaacatatttatttttaaagacaataataattatgtgtaggtataagtaatggattttgggaagagctatgacctcgaaaacatcacaaagaatataactaaatatctcttttcttactcagactctttcaagtcttttgcaatatttcagaatctaaaatatttactaatattactaaagtattggattttgacaaaaactatgaattatgccgatttagttgatacctacacaagtttatgtgaaattttcaaagtcatagctcgtcccaaaatccattaggtacctatacaattgtttgtattggtaacagtcaatctatgaaattttataggtgtgtaaatacaaaaataaatatttaaacatataaaataaaatatattttttgcacgattgatcatttttgactgtttaccgtgacagattttacgtcagtaggtgacatttactagcaactcgacggtaagtaatccaactcgacggtaagtactccaactcgacggtaagtaattcacttaccgtcgagttaaaaaatctcttaattttaatttattttttgaaagaataaagaaaactaacgaattatttattaatattgaaacttatggtacaatttgttaaattatttaatgaaatcccacttgtttgggctgtggtttcacttctaacagaaactcctgcagaatcgcatacattagtagtattactagtattgcacaatattttttcggcaaaatctattttattttgaagagaatcttctacatagctttctgccactgtcgatgaacgccaacctccatgacgctttaatccgaggacatcaacacctttattagccaaaagcgttgctgatgtcctcctgaacgaatggccagtatagttctcgggattaggcaaatttaagaatttggcaatttgagaaggccagcccccgattgtccctttccctattacttgagcacaacattttcctttggcgtatcttaagaacaaatgatttgattttacttgtaatggacgaagttttatatactttataatggtatcaatcgtgcaaaaaacgttataagcatgtcgaacgttaagggtaaccgatctcagacaataattggagtcgtcgctccgctcctcctccaaacaattgtcttcgatcggtataaaacccttaccgttctccatacttaatatactattactaaaatttacatttggcaacccggcagttttatttattttcacatagcgaagatatttaaaattgtaaacacaaacagtcatatcataattacctgtaacccaagaatacatcgtattgttttatttattatatttggtattgtcatgatatttcgatcgcgagtatcattattaattaccaatagtgtacaattagtgcaagatttacaccaaggcgatttaccttgaagattaaggatttatagacggtttcaaacaaaatcttcagagaacccgaatttttgtgtagtgttgtgtgcagataaagcttgttttaccagaaatggtgtgtttaactttcataattgccaaaagtatgaatttatgggctgg

SEQ ID NO: 452 - DNA, 3633 bp, Diabrotica virgifera
ttttgcatccagtatttacactaatactttatttcttttcaaaacttgaggatagtatgaagaaagtatgaaaacgttgaggatatggcaacggtgtcaaattttaaatttagatccagtcacagaacaataatttctctggttaatgcggggttgccaccacctcagaaccgcgtgaaatagaagtcagaggtttcgattacgatatgagttagagaatagcaatccaaacacaaaaatgacgcgatagatatcaaacattccgattttgggtaattacgattcgacttggtcatttctattcgatttgttaaaagttacagaatagggctgaatattattatttttttaatgtgtatggcggttcagtagaagcttaagttcaagtttttggggtcgccacccttgtcccccggccgccatcttggaaaaaggggtgcaaaggacgttcgcgctgtatctcctaaactagcaaccctacagaaaatttaattagaaataaaatgtagcaaattaaattttctacaattttatatttattactttttatcgtcaagtgatatacaaaaaagttataaaataaacaaaaataagaaaaaaatttgtaagaagtttccttttggaggttataacttttttccgttcatttcacaataaaataatatcattgcgattttatggaggatttctcaacgaacaatttccactatttataaagttgtttaattttacttatttatctgggctttacagcgctccaaacttgactagattctcgaaatctcataggaatacacagacaatttctagacaaaataatatttaatattatatgttgaaatagatctatcaaaggttattatttttttatggtcaaggcttcaagttaagatctgaatcagtatccgaggtgaatttttgtggtatagtgagagttagagagttagtgttagcgtcattgtcggtaattcatctttttcatcaataattaatgttgatatgtccaccccacataacaatttcatgttcttagtagattcatagaacatacttttcagaaaaagtatatactaagaatatgcgtaattaccattgcgaatgtgcagagcacatactgagtatatactacattacagtacttaaacgttctatgtatatacttagaatgtactaccgcacttcttctcagtatataccaagaatatactttttaggatattctaagaaggtgctataaaccttctatttatatacttagaatgtactacctcacatcttttagtatataggaagaatgtactttttagtatatgggaagaatattacaaggaagtgctatattgctcagaagcatgttttcagcatcaccgaatctcatcctaggttctactttctactaaatttacatattacatatgagaatgtagttagtacattctacaatattacttaaaaagtaaatataaaatattatataaattttagttagttatatcaatattatataggtaagtaggtatatatatttagttattatgtgcatataaaaataaaaatgctgaatatataaatttatatattcatattcatatacctatcgtacccaaataaatattatgtaacatatgtatgtaaataactaaaatttatatgttgcttatatgtacctatatacatacttactatttaagtaatattgaagtaccaaaatgaattttttatttgtaagttgacagcaaacaaaataaaacgtttaattatgcatgttcctattcctggttgaaatacttggtcttcctcacaacacagcatagacattgttagtgttaagtgtagacacaaatgccaaatgcctattcagtaactattttcatattttgtatttttcctttgttcccaaccccctacccgctaacccctatgcaggtatgcagcggtcgtttccgctttgtttgtgccggttgtgggttttggctcagccacacagcttacctgaatgtcaattccatgtaaaaataaaattcttcataagaatactcaataaacttaatcaaaatagtaaatgcatttcagttatgaaagcgaaacgacaatttctcctttttcgttaatacaattaattcttaaacatttttaccatacaattaaaacaattttaaataatgaattcggtagtttaattaatagtacctacatacataaatttttaaatttcattaattattcttaacgaagttgataatctataggctaacattattcttcctatacatacatatatattatttttaagatattttaaaagtatctacttataagtatgtgttaagtatgtacttataagtatgtgctaagaatattcggtaaaagtatattctgagaatagtatctacttataagtatgtgttaagaatgtacttataagtatgtgctaagaatattcggtaaaggtacattctaagaataaacttttacgaatattccgagttactacgtacacgaatgtactcagtatattcggtacgagaatatactttaaagtatgtgcaaagaacatgaaatttagaatgttttttaaggtacatgctatgcttgtactacgcatatactaaaaagaatatactctgacgaatgttggtagtatatgcttagaacatgatacgaacatcattgttatgtgggacgatgttgctgcaactttcaccaccacaatggaaacacactgctgaacatttgcatttgagatctgcttttcatcaaccacatgcacttccagtttccattgcatctgcaaaaggtgaatttaataagctcgggggtactggaggcttagaagtttggattagtatccaaaatttcccatgctttttccagtcccaatcttctggatcacaatgtttaccgagccatgactgaatctggtgatacactcggagtctttggaaacggactgcatcttgtgttggaggaagtgcgaagagattaaatgcattgttttcactgttttagcgaattgtttttatctccgggtttttagagattcgtctttatttccgccatataaagaggcgataaacgttcgtcgaccccaaaacttgaacttgagcttctactgataccccctacacattgaaaaaaaataaaattgactgctctaataaatgcaacgtatgccctaaaaaatgtaacatatcaatggactaatggtaaaagttgaacaaatacttcctagaactgcagaagaatctttcttacttactccacaaaccaattcaaaaagtactacgttaagagtgtatgaagagtatttcatataaatttccaacaaaaaatctagtcattttacccaattaggtaaatacatttttgtcatttttggcatttctctgattttggattgtcgtttcgtttcgatagggcttttcatcgattgtcatttgtttcgagcttctgtcatatgttgtataatctgtgtataatattaatatacacggattatacgacatatgacagaggctcgaaacaagtgactgtgaatgaaaagccctatacgctgtgagcttcgctggtgtcgctcctagcggactactaattcaactttcaccggtaatttttaaatttattatttaattg

SEQ ID NO: 453 - DNA, 3768 bp, Diabrotica virgifera
gctccgtaaagtagtatacctttgatgcagttgttaaagctattattttttttgtttccgatgtttcctttgtttgccaattttttttaacattaaatgcatgcaaggttctgtaactattttcttgtggcatgtttaatttagtattatgtttatatgggattgagccacaattattcattaggctcattcataaaagacagctcaaggtcttacgacatgctgcgtttcctagggatttgacaacctaacctacttatgcttccataactttccacgaagatggactatctgttgatagaatcaacataaaattgcttttctacaccctaggtgtacacacaagacggcttaatatcgtttctcaaattttccgtataacgtgtaatgtggtttgcctaccactttcattgcaaacattctaactattacatcaagtttattttcattttaacggattatttaccacagtgggagtgattgtggtcactgtttcgtaatttaacaagctttacaatatatttcatataactaacagagaaattttaacttcctgtggaactgtcatttctgtcatgtcatccttcagaatttccgctatcagagccacttgctaccatacagtcatgatgtaaacaagtcagattcgagctcaatggtacctagagcatgaaacattggatattttgaacatccatgtttaatttcacatttcatttctatgttcctatgacggattaattgtaaagggttttacccaaatatattttactttggtggttagcatgttagattcacgtgagtataacctataacttttaaaatcgtagtcaaaattttaaatagtttgcattatcttatcaggttatacacattttaggtaaacactgatgatgatcggtcatccgatcgaaaactagttctgttctgtgatgtagccctgttttgggattttaacaaatataccttttataaaggattttatgttttttccacaaatattggtgtaatgaaaattacatttttaattaactactgtttgacgtttcgatttccactccagaaatcgttctcaaaaaaggatataattctgaaaaaaatgttagaaagattttataacctgagttttatttttttttaacctaaaaaactgtgttggctggcctgctaattgtggccaaatagccggaaaatctcatccgcaaattgcagatcttttgtttggttaaagttccatataatgcctgttcgatcgtcagttacttttctcattatccaatctatcataataagaaataggataggagttagtacgcaaccctgattggctccactttctgtggttatttcttctgatgttatctactttatctgagtgtttcagtttggctctgtatccttcaaagagaagtttgaaaaagttgatcatttttagtgggatcccataatatgtagacttaaaattttccatatttgtactgtatttacacggtcgaaggctctttaaaagacaaacaaagataaacctttcatctatatttttatttgctttttccaaaataattttagcaatgcaaatgtggtcaatggtggagtgttttccacagaggcctgcttggttacttctcagtttcttgtatggttccggcttcaatttttcattatgattttagtcaacaatttatatgtggtgcttagtagtaattgcacgccaattcttgcatcgagtcatatctcatttttttttgtattttaattctcaatctcccttttacttctttggtaattctttattcgttcaaaaaagattagcactgatgaattcagtgttcataaattaggtgtactcaccagattcacgtattgagcaactagcacagtgtaataaatactcataaataattaatagaaatcttctctactggaacatactttacaaatttttttctagtaatgtgtttgtctttctcgaatattagttctataatgataatcttgttaagactcttatgaaatggtgatcattttggttgatcaattacaactatcgcggaaattgccaaatgtcctccgccaaatgtaaattgccaaatgtaaaccgtgaagtcagcctcaaaagaagtacttgggaaaaacctacggttgacagttggttcttcaactggtcattgccaactaagcaaacacctccacacgcggacgggctagtggacacacctctatgtaggtgtacaggagaagacgaaacgagcatgtcctgtgagtatccgtaggtaccgtcaataatagagtactcgttccgccagccgtggcctacacctgcccacataagggagatgtctgacgacttgtccaccttcgtgtggaaaagacaggatatgcaatgagctagagactaaaactccctggtaggatgcacaatggataaattgtggcccaattgatatgtgacttgattcactctcgctactctgcagatacagttacaggatgatacaaatgtatatatcattataaagagcttttaacttgtcaaagctatctttggcactcaaacactctaatacaataataatattttttgcacgattgatcatttttgactgtttaccgtgacagattttacgtcagtaggtgacatttactagcaactcgacggtaagtaatccaactcgacggtaagtactccaactcgacggtaagtaattcacttaccgtcgagttaaaaaatctcttaattttaatttattttttgaaagaataaagaaaactaacgaattatttattaatattgaaacttatggtacaatttgttaaattatttaatgaaatcccacttgtttgggctgtggtttcacttctaacagaaactcctgcagaatcgcatacattagtagtattactagtattgcacaatattttttcggcaaaatctattttattttgaagagaatcttctacatagctttctgccactgtcgatgaacgccaacctccatgacgctttaatccgaggacatcaacacctttattagccaaaagcgttgctgatgtcctcctgaacgaatggccagtatagttctcgggattaggcaaatttaagaatttggcaatttgagaaggccagcccccgattgtccctttccctattacttgagcacaacattttcctttggcgtatcttaagaacaaatgatttgattttacttgtaatggacgaagttttatatactttataatggtatcaatcgtgcaaaaaacgttataagcatgtcgaacgttaagggtaaccgatctcagacaataattggagtcgtcgctccgctcctcctccaaacaattgtcttcgatcggtataaaacccttaccgttctccatacttaatatactattactaaaatttacatttggcaacccggcagttttatttattttcacatagcgaagatatttaaaattgtaaacacaaacagtcatatcataattacctgtaacccaagaatacatcgtattgttttatttattatatttggtattgtcatgatatttcgatcgcgagtatcattattaattaccaatagtgtacaattagtgcaagatttacaccaaggcgatttaccttgaagattaaggatttatagacggtttcaaacaaaatcttcagagaacccgaatttttgtgtagtgttgtgtgcagataaagcttgttttaccagaaatggtgtgtttaactttcataattgccaaaagtatgaatttatgggctgg

SEQ ID NO: 454 - DNA, 3723 bp, Diabrotica virgifera
gctccgtaaagtagtatacctttgatgcagttgttaaagctattattttttttgtttccgatgtttcctttgtttgccaattttttttaacattaaatgcatgcaaggttctgtaactattttcttgtggcatgtttaatttagtattatgtttatatgggattgagccacaattattcattaggctcattcataaaagacagctcaaggtcttacgacatgctgcgtttcctagggatttgacaacctaacctacttatgcttccataactttccacgaagatggactatctgttgatagaatcaacataaaattgcttttctacaccctaggtgtacacacaagacggcttaatatcgtttctcaaattttccgtataacgtgtaatgtggtttgcctaccactttcattgcaaacattctaactattacatcaagtttattttcattttaacggattatttaccacagtgggagtgattgtggtcactgtttcgtaatttaacaagctttacaatatatttcatataactaacagagaaattttaacttcctgtggaactgtcatttctgtcatgtcatccttcagaatttccgctatcagagccacttgctaccatacagtcatgatgtaaacaagtcagattcgagctcaatggtacctagagcatgaaacattggatattttgaacatccatgtttaatttcacatttcatttctatgttcctatgacggattaattgtaaagggttttacccaaatatattttactttggtggttagcatgttagattcacgtgagtataacctataacttttaaaatcgtagtcaaaattttaaatagtttgcattatcttatcaggttatacacattttaggtaaacactgatgatgatcggtcatccgatcgaaaactagttctgttctgtgatgtagccctgttttgggattttaacaaatataccttttataaaggattttatgttttttccacaaatattggtgtaatgaaaattacatttttaattaactactgtttgacgtttcgatttccactccagaaatcgttctcaaaaaaggatataattctgaaaaaaatgttagaaagattttataacctgagttttatttttttttaacctaaaaaactgtgttggctggcctgctaattgtggccaaatagccggaaaatctcatccgcaaattgcagatcttttgtttggttaaagttccatataatgcctgttcgatcgtcagttacttttctcattatccaatctatcataataagaaataggataggagttagtacgcaaccctgattggctccactttctgtggttatttcttctgatgttatctactttatctgagtgtttcagtttggctctgtatccttcaaagagaagtttgaaaaagttgatcatttttagtgggatcccataatatgtagacttaaaattttccatatttgtactgtatttacacggtcgaaggctctttaaaagacaaacaaagataaacctttcatctatatttttatttgctttttccaaaataattttagcaatgcaaatgtggtcaatggtggagtgttttccacagaggcctgcttggttacttctcagtttcttgtatggttccggcttcaatttttcattatgattttagtcaacaatttatatgtggtgcttagtagtaattgcacgccaattcttgcatcgagtcatatctcatttttttttgtattttaattctcaatctcccttttacttctttggtaattctttattcgttcaaaaaagattagcactgatgaattcagtgttcataaattaggtgtactcaccagattcacgtattgagcaactagcacagtgtaataaatactcataaataattaatagaaatcttctctactggaacatactttacaaatttttttctagtaatgtgtttgtctttctcgaatattagttctataatgataatcttgttaagactcttatgaaatggtgatcattttggttgatcaattacaactatcgcggaaattgccaaatgtctcaaagaagtacttgggaaaaacctacggttgacagttggttcttcaactggtcattgccaactaagcaaacacctccacacgcggacgggctagtggacacacctctatgtaggtgtacaggagaagacgaaacgagcatgtcctgtgagtatccgtaggtaccgtcaataatagagtactcgttccgccagccgtggcctacacctgcccacataagggagatgtctgacgacttgtccaccttcgtgtggaaaagacaggatatgcaatgagctagagactaaaactccctggtaggatgcacaatggataaattgtggcccaattgatatgtgacttgattcactctcgctactctgcagatacagttacaggatgatacaaatgtatatatcattataaagagcttttaacttgtcaaagctatctttggcactcaaacactctaatacaataataatattttttgcacgattgatcatttttgactgtttaccgtgacagattttacgtcagtaggtgacatttactagcaactcgacggtaagtaatccaactcgacggtaagtactccaactcgacggtaagtaattcacttaccgtcgagttaaaaaatctcttaattttaatttattttttgaaagaataaagaaaactaacgaattatttattaatattgaaacttatggtacaatttgttaaattatttaatgaaatcccacttgtttgggctgtggtttcacttctaacagaaactcctgcagaatcgcatacattagtagtattactagtattgcacaatattttttcggcaaaatctattttattttgaagagaatcttctacatagctttctgccactgtcgatgaacgccaacctccatgacgctttaatccgaggacatcaacacctttattagccaaaagcgttgctgatgtcctcctgaacgaatggccagtatagttctcgggattaggcaaatttaagaatttggcaatttgagaaggccagcccccgattgtccctttccctattacttgagcacaacattttcctttggcgtatcttaagaacaaatgatttgattttacttgtaatggacgaagttttatatactttataatggtatcaatcgtgcaaaaaacgttataagcatgtcgaacgttaagggtaaccgatctcagacaataattggagtcgtcgctccgctcctcctccaaacaattgtcttcgatcggtataaaacccttaccgttctccatacttaatatactattactaaaatttacatttggcaacccggcagttttatttattttcacatagcgaagatatttaaaattgtaaacacaaacagtcatatcataattacctgtaacccaagaatacatcgtattgttttatttattatatttggtattgtcatgatatttcgatcgcgagtatcattattaattaccaatagtgtacaattagtgcaagatttacaccaaggcgatttaccttgaagattaaggatttatagacggtttcaaacaaaatcttcagagaacccgaatttttgtgtagtgttgtgtgcagataaagcttgttttaccagaaatggtgtgtttaactttcataattgccaaaagtatgaatttatgggctgg

SEQ ID NO: 455 - DNA, 10544 bp, Diabrotica virgifera
  SmartBlast Evalue=0; Info="ABC transporter, putative n=1 Tax= Pediculus humanus corporis RepID=E0W387_PEDHC"
cacaaatacgaatagataggcaatcacaatcttcgagagtacttactggttcagtcgctgacagtccgcgaatttcaatccgcaccatggaggcagttctgcacgagagtacttttgtagggcaatctaaagacgccgccgccgttgtcaaatcgaacggggtcaacggcgattcagtgaatttttccgtaaaggtgaatcttaaccaagaaaagactttgatttgtgacgatggtactaatggcaaaatgtgccaaaatacggtggacttggagtttcaaaatattagttttcgtgcgacgcaagggaatatatttaccaaaaggactacaaaagaaattttgcatcaagtcggaggacgtttccagcccgggcagctgatagccataatggggccatcgggtgcaggcaaaagtacattattggatgttttgagtgggtataggatacgtggcgtaacaggttcagtatacgttaacggccaaccaagaagtttaaaggaattcaggaaaacgtcatgttacattacgcaagatgaccgtctgcagcctttactcactgtggacgaaaatatgtgggtagctgcagatttgaaactaccttccagtgtcagcaacagtaataaacggagtataattaacaatattttaaaaacactaaatcttgaaaatacaaaaaaagtgagagcagctggtctttccggtggacagaaaaagaggttgtcaatagctttagagttagtaaataatccaatggtcatgttcttggatgaaccaaccacgggattggatagttcgtcttgttcaacatgtataacactacttaagaaactaactatgcaaggaaaaacaatcatatgtaccattcaccagccttcagctactttatttgcaatgtttgatcaggtgtacgtagtaggaaatgggtactgcctatatcaaggtagtacgaataaactggttccatttttgcaagactgtgggtttccctgtccgcagtatcacaatcctgctgactacgtaatagaactagcatgtattgagcacggacctgagaaacctgaatatatgagggatataattcagaacggacaatcttaccaatattttaacgagcctgaaaagatgaaaagcaccatttgtaactacccaggtcccaaacctattaaacgagttgttagcagtgatgaatcctcttttcccacatcacaattccatcaactaggagttcttatgagacggggatttattaaagcctacagagataagatgcttacctaccttcgtattggaacaaacataatagttggactgatgttgggcagcctctattggaaagctggaagtgatggatctaaagttttggataattttaatttattgtttgcgatattattgcaccatatgatgtccacaatgatgttgacgattttaacatttccccaggaaatgtcgattttaataaaagaacacttcaaccgttggtattcattaaaaatgtattacacatcggtaaccatagtggatattccggtttcggttattggctgcttcctgttttcactcataatatactatatgacagatcaaccaaacgataaagccagattcctgatattcttcgtcacttgcatgttggtagttctagtagctcaaggagttggtctaactattggcgcatattttgatgttgtgaacggaacttttgttggaccaaccctgatggtacccatgatgatgttctccggttttggcgttcgtctacgtgatctgccgaccataatgtactacggcagttttacttcttacttaaggtacggcttggaaggagtagtccaggcggtgtacggaatggacaggggtattcttcaatgtcccgaagacaaattttgcttctacaagtatccgaagactttcctggaaatagtagatgtcaggtcggatcagttcgataatgacatcattgctttactgcttttcttgtttgttttgagaattgcggcgtacgtagtgctgaggtacaaactggcatctgtgcgatagagcctgtttatgttttaataacttttattagaagtaggtgattgaagcctcggttttggtaaacagtgttgttagaaggacatttatttaaattttactcaaaaaaatatttttttttctttagaaaacatcattttttgtgacaatcaaaggaacttagagaaaatttacaataatgtttttaaaattttccaaagattatgatttattaaaagataaaagtatgagatcgtcactcagtacagtggttcccaagtagcaatttttcgacgcattggttgtcagtacaaacaaatgcactgtctacaactttgcccgagagcattttcagttgtttcggccaacgtcccctaccccgactgacattacgatgttacaacctgtagttatacgggcaactaatttattaccattttgacaactacatatcacaattcagttttttcaacaatcgcaacgacttaaaaatgttataatgctaaactaattattatatattttattttgatagaaattttggatttatttaacaacctgtttatttgtttttttaatagctggtttccattccattgttttatcagtagatttgagatttgataaccacctttgtatctgctttggtagacagggttgccaggtcagttttaactctttcagtagttttgttttcacaaaatcagtagattctttttaggccatgtaaatatacagtaatacagtgatatgcacatccgtcttaaatgtcccaagagcaattccacaaaattggaaacctaattattccaaaccaccaactggtaattatcattttttagctaaaatctactaaatcaaaaactaaaatatacttaagtattttgggatatatttgggattttttataataaaaacaacagctaacttaaggggataggcgcaaaatgtcgtctgttaaaatgttcaatgtattttaaatgttttcgttttttgcgaatccttagaaaactaataagtatttttgaaaaatttaaacgcacaaagaaagattacttaccaaggaccgaaagtccctgaaaacttctataatgtttattttaatacgttacaggggtgaaaaaagaaaaaatttagtgacttttaattccaaatatctcgttcaaaagaaacgttttggtttttctaaataatgcagtctttcattctgcgtttaaatttttcaaaaagacgtattatagtttcctcatgattcgaaaaaaatggatcaaattctgttgaaatataccaaaaatctactaaaaatattgcctactagaattttttaaaaaatatcaaaaatctaccaaaaaagtagaaatctactaaatgtggcaacgctgttaatgagaatgatacacttttgacactggtcacatgacctctgtcacccaataagagggtgcgttctaaaatggttttgatagtcggcgcggccgggtttggttggcgattggacttctaagttgtcttatccgtctaaggttggtaataaggtattttttagtaatattggtaatattgtttaatgcgccattttggttttacttgagatttttgggatgtaaagaaaatgaaaacacagaatataaaaaatgcaggcattttctgataactttaaaagcaccatcaatacattaaatttatacagaacatctttaacataaattttgacttttatattaaaatttgattttttaaatttgcatattttttgtcaaaaatgtcataaaaaaagcagcgcgtgtgttttttaaaggtgaaatatccatatttgacggtaatctgagatgcgtttataaatttcacatctggtaataagtcctttatgtatttatatcatataaatttaaatacccaatacgatgtcaaaacagtttactttttggttttcgcattcaccatacagttgttaaaaatataggtaaaaaaacataactagtctgactccttgagcaaccattgcacgcgcaggtgctttttatagtcgcttcagttgtcttatgcaacggttacgaaacgatgttgcttaaacaggaggttgcctaggcaacgtcaagacaactcaaaaatcgtccaccaaatcagtgcagaatagggtcgtcttttaggcaataacaacgttgtaagaaaacgttgccacgcggtagacaacgttgtcgcctcgacaaattgctacttgggttatacctattaatgagccaattctgtaaaaatcatgaactctcatacaattttggtagtacctagtgcaattaaaagtgaaataagaaatataatttcatacttacgttatgatattatccgttatggtatgtaggtactccattcaaatgttacatttagggttgcatttcttagaggagtcaatattattatttttttaatgtgtatggcggttcagtagaagcttaagttcaagtttttggggtcgccacccttgtcccccggccgccatcttggaaaaaggggtgcaaaggacgttcgcgctgtatctcctaaactagcaaccctacagaaaatttaattagaaataaaatgtagcaaattaaattttctacaattttatatttattactttttatcgtcaagtgatatacaaaaaagttataaaataaacaaaaataagaaaaaaatttgtaagaagtttccttttggaggttataacttttttccgttcatttcacaataaaataatatcattgcgattttatggaggatttctcaacgaacaatttccactatttataaagttgtttaattttacttatttatctgggctttacagcgctccaaacttgactagattctcgaaatctcataggaatacacagacaatttctagacaaaataatatttaatattatatgttgaaatagatctatcaaaggttattatttttttatggtcaaggcttcaagttaagatctgaatcagtatccgaggtgaatttttgtggtatagtgagagttagagagttagtgttagcgtcattgtcggtaattcatctttttcatcaataattaatgttgatatgtccaccccacataacaatttcatgttcttagtagattcatagaacatacttttcagaaaaagtatatactaagaatatgcgtaattaccattgcgaatgtgcagagcacatactgagtatatactacattacagtacttaaacgttctatgtatatacttagaatgtactaccgcacttcttctcagtatataccaagaatatactttttaggatattctaagaaggtgctataaaccttctatttatatacttagaatgtactacctcacatcttttagtatataggaagaatgtactttttagtatatgggaagaatattacaaggaagtgctatattgctcagaagcatgttttcagcatcaccgaatctcatcctaggttctactttctactaaatttacatattacatatgagaatgtagttagtacattctacaatattacttaaaaagtaaatataaaatattatataaattttagttagttatatcaatattatataggtaagtaggtatatatatttagttattatgtgcatataaaaataaaaatgctgaatatataaatttatatattcatattcatatacctatcgtacccaaataaatattatgtaacatatgtatgtaaataactaaaatttatatgttgcttatatgtacctatatacatacttactatttaagtaatattgaagtaccaaaatgaattttttatttgtaagttgacagcaaacaaaataaaacgtttaattatgcatgttcctattcctggttgaaatacttggtcttcctcacaacacagcatagacattgttagtgttaagtgtagacacaaatgccaaatgcctattcagtaactattttcatattttgtatttttcctttgttcccaaccccctacccgctaacccctatgcaggtatgcagcggtcgtttccgctttgtttgtgccggttgtgggttttggctcagccacacagcttacctgaatgtcaattccatgtaaaaataaaattcttcataagaatactcaataaacttaatcaaaatagtaaatgcatttcagttatgaaagcgaaacgacaatttctcctttttcgttaatacaattaattcttaaacatttttaccatacaattaaaacaattttaaataatgaattcggtagtttaattaatagtacctacatacataaatttttaaatttcattaattattcttaacgaagttgataatctataggctaacattattcttcctatacatacatatatattatttttaagatattttaaaagtatctacttataagtatgtgttaagtatgtacttataagtatgtgctaagaatattcggtaaaagtatattctgagaatagtatctacttataagtatgtgttaagaatgtacttataagtatgtgctaagaatattcggtaaaggtacattctaagaataaacttttacgaatattccgagttactacgtacacgaatgtactcagtatattcggtacgagaatatactttaaagtatgtgcaaagaacatgaaatttagaatgttttttaaggtacatgctatgcttgtactacgcatatactaaaaagaatatactctgacgaatgttggtagtatatgcttagaacatgatacgaacatcattgttatgtgggacgatgttgctgcaactttcaccaccacaatggaaacacactgctgaacatttgcatttgagatctgcttttcatcaaccacatgcacttccagtttccattgcatctgcaaaaggtgaatttaataagctcgggggtactggaggcttagaagtttggattagtatccaaaatttcccatgctttttccagtcccaatcttctggatcacaatgtttaccgagccatgactgaatctggtgatacactcggagtctttggaaacggactgcatcttgtgttggaggaagtgcgaagagattaaatgcattgttttcactgttttagcgaattgtttttatctccgggtttttagagattcgtctttatttccgccatataaagaggcgataaacgttcgtcgaccccaaaacttgaacttgagcttctactgataccccctacacattgaaaaaaaataaaattgactgctctaataaatgcaacgtatgccctaaaaaatgtaacatatcaatggactaatggtaaaagttgaacaaatacttcctagaactgcagaagaatctttcttacttactccacaaaccaattcaaaaagtactacgttaagagtgtatgaagagtatttcatataaatttccaacaaaaaatctagtcattttacccaattaggtaaatacatttttgtcatttttggcatttctctgattttggattgtcgtttcgtttcgatagggcttttcatcgattgtcatttgtttcgagcttctgtcatgtgttgtataatgtgtgtataatattaatatacacggattatatgacacatgacagaggctcgacacaaatgactgagaatgaaaagccctattctcactgccttaaatgaaacacagctcataatattttttataggaagttattgccataccacaaagtacaggcttcgtctgcagatatttttatggtaatagttttaacaattactcttatatcatggtataggttgtctggctctaaacagtgtcgtgtttattcttaagtatataaagaatgtttcatttaagtaatttttaaactttgctgtgatattgtattaccattttcttgttcatatagcatcatgattgcgcttgggatatgatgtttagaactatcctcttttattaggcaaaaaatgcctaataaacattaggcaactcaacatttatcttctttatgacgtcactgataattggaccgcattatgtaataacggattaaccgccaaaagtccaaaatcgagatattagtgccatcttgcagctagggtgcaaatctctgtataaaaatatgatttttgtaaaaaaattcaaaaaaaagctgtttttaaatgcctgtattaagcgacattttttattttattaaaaaaaaatctcgcactaggatttgtaatatcgaactaaacgccaataatggtacataatccattgtcataaacaaatatccgcatctttgtaagtgtaatattttaattaattctttaattcttattaacttaattctttattacaaaacataacatatttactaacgtttaagatatcgaattaaaagacatcctttgtcaggtaacatcagattaagcgccaaatatgtctcttaatccggtattcggatcttaactcatgcatatcttaaaaaatcattaacgaattaagcgacatttgatcgaataacttttaaaatataaattatttttaaaaaattttaaacacatgtaaaagtctatttacatttgccttaatgtattaaatatgaaacatgtcagtactatattttagaaatagtaccaaaaacaaatttaaaatctttaaaccgatttatctcaaaactacattttggcgcttaatccgctattacataacgcggtccagttgacgttagcgctaccagtagtagaatcatcacgaatcacgaaacgtaaacataaatatttcaccattgggatcatgatgatggttcatttcttattgttattatgaatagagtaccttaagttaacaatttcttatattaagttaaaaaaatatattatatatttattctgcatgtatctaggtatgcctagaaacccaagtcttagtaattaaatgtaaaaaataagtcattttaataattgttttgtactatattataagttatattaggcaatggtttgtaacatatttatttttaaagacaataataattatgtgtaggtataagtaatggattttgggaagagctatgacctcgaaaacatcacaaagaatataactaaatatctcttttcttactcagactctttcaagtcttttgcaatatttcagaatctaaaatatttactaatattactaaagtattggattttgacaaaaactatgaattatgccgatttagttgatacctacacaagtttatgtgaaattttcaaagtcatagctcgtcccaaaatccattaggtacctatacaattgtttgtattggtaacagtcaatctatgaaattttataggtgtgtaaatacaaaaataaatatttaaacatataaaataaaatatattttttgcacgattgatcatttttgactgtttaccgtgacagattttacgtcagtaggtgacatttactagcaactcgacggtaagtaatccaactcgacggtaagtactccaactcgacggtaagtaattcacttaccgtcgagttaaaaaatctcttaattttaatttattttttgaaagaataaagaaaactaacgaattatttattaatattgaaacttatggtacaatttgttaaattatttaatgaaatcccacttgtttgggctgtggtttcacttctaacagaaactcctgcagaatcgcatacattagtagtattactagtattgcacaatattttttcggcaaaatctattttattttgaagagaatcttctacatagctttctgccactgtcgatgaacgccaacctccatgacgctttaatccgaggacatcaacacctttattagccaaaagcgttgctgatgtcctcctgaacgaatggccagtatagttctcgggattaggcaaatttaagaatttggcaatttgagaaggccagcccccgattgtccctttccctattacttgagcacaacattttcctttggcgtatcttaagaacaaatgatttgattttacttgtaatggacgaagttttatatactttataatggtatcaatcgtgcaaaaaacgttataagcatgtcgaacgttaagggtaaccgatctcagacaataattggagtcgtcgctccgctcctcctccaaacaattgtcttcgatcggtataaaacccttaccgttctccatacttaatatactattactaaaatttacatttggcaacccggcagttttatttattttcacatagcgaagatatttaaaattgtaaacacaaacagtcatatcataattacctgtaacccaagaatacatcgtattgttttatttattatatttggtattgtcatgatatttcgatcgcgagtatcattattaattaccaatagtgtacaattagtgcaagatttacaccaaggcgatttaccttgaagattaaggatttatagacggtttcaaacaaaatcttcagagaacccgaatttttgtgtagtgttgtgtgcagataaagcttgttttaccagaaatggtgtgtttaactttcataattgccaaaagtatgaatttatgggctgg

SEQ ID NO: 456 - DNA, 3676 bp, Diabrotica virgifera
  SmartBlast Evalue=1E-71; Info=TRAS3 protein n=1 Tax=Bombyx mori RepID=Q9BLI5_BOMMO
tggaattcaactcaaacagatcaaaaaggattattagtagaagatatgattaatgaactagagttgatagtacacaataaaccaggaaacccaccaacttttcagaacagagctggtgcggctagcaatatagatataacaatatcaaatgttgcagtagcacacctagttaaggattggaaagtgatggagcatgcaacaataagtgatcacaaccttataactttcaatcttaataacctaaatccacgtaatacggaaatatcttcggtaagatacaatataggtaaagcaaattatgaactattaaagtctgagtttcgaccaccttgtctggtacaaaggggatctaatataaatattgcaacaaaagaattaaccaaacaaattaaaaaagcaatggatatagcaataccaaaaataaaagaaaatagtaaagtaaaaaactcagcctggaaggaaaacctcacaagaatgagaagcagagttagatatgcgcgaaagcgatatcaacgatgtggtatctatcttgagaggcaaatccttctaggtgagtatagaagactaaaacaagaatataaacaagaaataaaaataacaaaagctaaaagttgggaaaccttcgtatcaagacacttagaattagatatgtggggaataccatataaaatagtttctaaaaaaattagatgtccgacaatgctttctactttaaaaaaagaagatggaacatttacagaaagttgggaagaatcggccgaaacattacttaatgtattattacctccagataaattagaaggagaaacagtagaacaaagaaatataagagaagaaatgatacaagaataccaaatagaagaagaaagagaaatagaggaattcacagaagaagaagtatatgaaagtatgagagaaatgaaaagaaagaaggcacctggaccggataatattcatgttgaaatacttcaagcattgtcggaacaaataattccagtactaacatcattatataatgaatgtcttagacaaagaaggtttcccaataattttaaacaagcagaagttataataatacataaaggggaagataaagatcctgccttaccgaaatcatatagaccggtatgtttattgaatacaatgggaaaattacaagaaaaattactatgtaaaaaattaaatcaaataagaacagaaattggattacatcctggtcagtatggttttaggaaaggtagatcaacagaagatgcaataaataaagtatttgaaatagtaaacgaaagcataaaaaagtatgttttaatgatctttatagacgtgtctggggcttttgacaatctttggtggccgtcattctttgaaagacttcgaagaatgagatgtccaaagaatctgtacggaagtctcagaaactactgtcaagaccgatatgcaagcctaagctgtccaacaggaaaaaagacaaaacatatcacaaaaggatgtccacaaggatcagtttgtggacctatgttctgggatgtaatgctagaggaactgttggaacaattgactatagatcctgaagtgcttggaagcatagcatatgcagatgatttgttgttgatcatagatgcaaactcaagaagagaattagaaaataaatcaaatgaagtattaataagagtaaatgattggatgaataaagtaaaattaacaatatcagattcaaaaacaacatatagtttaataaaaggaaatttagaaagagatccaattataaaaattagagggaaaacaataaaaagaaaaatggaaacaagatatttaggtattataatagacgaacaaaaattatttacaaaacacatgagttgtgtctgtgaaaaggcaacaaagatcatgcatagcattgctagtctagcacagaaggaatatagaatttcgttccgacagatgagaatatacctaagtacaatacttgcatcaattgtagggtacggttcaagtgtatgggcacatagattaataaataaaaaaaaacgcagaaaaattaaatagagctcagagaggatttcttgtaagaatgacgggagcatttggaacaactgcaacacaggcactcacagttttaactggagtaatgccaatgcatttagaaacacaaaaaagagcatgtaattattggctaaaaaagaaaaatatgaaaaaataatacaaataataggattagatataagaaataaaagagaattaaaagaaataataaatagaaaaagacaaaatgaatgggaaaattcaacaaaatctagacgtttatacaattttataccaatattagaaaacattccaaattattttaatccaaaacaaggtttaatacactttttaacaggacatggaccgtacccaacatatttggaaagatttaacttaaaagatgatgcatattgtgaatgtggagaactaggtacaccagaacatatagtgttacattgtgaaaatactatagaaaatgaagaacatagagaaatgagaagaagattagaaagaattgaaataagagatatattacaaaatgaagaatattttgaaatattaaacaatctcacacaaataatatctaaaaaacaacaagaaatctataataatagaagaagacaaccaataatccaaccctgatgaagttgagtaagataaagttaaaataaataaaataaaatataaattcaaaaatagatatttacaattataataataataattcaatataaaatatataaataaaaataataattcaataaataattcattaaattaaaaaaaaaaagctaccaactctcttctgaaaatagagggactgtctttataacttagaagggagttgatagtaccaaaaatatttttttgcacgattgatcatttttgactgtttaccgtgacagattttacgtcagtaggtgacatttactagcaactcgacggtaagtaatccaactcgacggtaagtactccaactcgacggtaagtaattcacttaccgtcgagttaaaaaatctcttaattttaatttattttttgaaagaataaagaaaactaacgaattatttattaatattgaaacttatggtacaatttgttaaattatttaatgaaatcccacttgtttgggctgtggtttcacttctaacagaaactcctgcagaatcgcatacattagtagtattactagtattgcacaatattttttcggcaaaatctattttattttgaagagaatcttctacatagctttctgccactgtcgatgaacgccaacctccatgacgctttaatccgaggacatcaacacctttattagccaaaagcgttgctgatgtcctcctgaacgaatggccagtatagttctcgggattaggcaaatttaagaatttggcaatttgagaaggccagcccccgattgtccctttccctattacttgagcacaacattttcctttggcgtatcttaagaacaaatgatttgattttacttgtaatggacgaagttttatatacttttgcagaatttctaaatatgaatttatcatctggtttattaacgactgtaaaagtcgctggatgttcgtttttgtattgggtacttttatagtcattaaaccatcggtttgttggatgtcattcatagtaa

SEQ ID NO: 457 - DNA, 3294 bp, Diabrotica virgifera
  SmartBlast Evalue=8E-99; Info=Hydroxyacid oxidase 1 n=1 Tax= Harpegnathos saltator RepID=E2BJY7_9HYME
aagtacttgatataattcttacaacagagaaataattttcttgtcaaaatgtctgatttatttagcgtttcggaatttgagaaacatgctttggaagttttgcctaaaaatattcgagattactacagaagtggtgcaggacgacaggagacattggctgataacagaaaagcattcttcaggtataaagtaagaccaagatatttaagaaatgtagaaaatatagatttatctacagtagttcttggagagaagatttccatgccaattggaattgctccgtctggtatgcaaaaaatggctcatccaatgggcgaactggctgttgttaaagctgcccaagaaatgggtgtagtttacactcttagcaccatgtcaacatacagcattgaagaagttgctcaagctgctccaatggctgtgaaatggtttcaagtatatatttataaggacagagatttaactagaaatttaattttgagagcggagaaagctggttttaaagcaatagtattaactgtggatgcaccgttatttggtttgcgtattcctgatttaaagaacaagttcacattacctccacatcttaaattggcgaatttcgaaggaagagtttcggaaatgagccaggaccccacaaaaggatcaggtcttaacaactacgttaatgatttgttcgatccgtccattaatgggaagacattaaatggttgaagagtattacaaaccttcccatagttctgaaaggatattgactgcagaggatgcattactcgctgtggaggctggggtagctgccgttcaagtctccaaccatgggtctaggcagttggatggaacacctgctgcgattgacgctctatgtgatgtagtaaaggcggtaggagacaaaatagaagtttacatcgatggtggagtgacagatggcgttgatgttctcaaagctgttgctcttggagcaaagatggctctggtaggacgatctgctttatggggattggttcatagtggacaacaaggagtcgagagagttctcaatattcttaaaaacgaactcaggaccggcttgggaatatcaggttattcaaaaataaatcaaattgatagaagcttggtggtacatgaaagttattatgctaagctttaagatgactgaagttggaccgcattatgtaataacggattaaccgccaaaagtccaaaatcgagatattagtgccatcttgcagctagggtgcaaatctctgtataaaaatatgatttttgtaaaaaaattcaaaaaaaagctgtttttaaatgcctgtattaagcgacattttttattttattaaaaaaaaatctcgcactaggatttgtaatatcgaactaaacgccaataatggtacataatccattgtcataaacaaatatccgcatctttgtaagtgtaatattttaattaattctttaattcttattaacttaattctttattacaaaacataacatatttactaacgtttaagatatcgaattaaaagacatcctttgtcaggtaacatcagattaagcgccaaatatgtctcttaatccggtattcggatcttaactcatgcatatcttaaaaaatcattaacgaattaagcgacatttgatcgaataacttttaaaatataaattatttttaaaaaattttaaacacatgtaaaagtctatttacatttgccttaatgtattaaatatgaaacatgtcagtactatattttagaaatagtaccaaaaacaaatttaaaatctttaaaccgatttatctcaaaactacattttggcgcttaatccgctattacataacgcggtccagttgacgttagcgctaccagtagtagaatcatcacgaatcacgaaacgtaaacataaatatttcaccattgggatcatgatgatggttcatttcttattgttattatgaatagagtaccttaagttaacaatttcttatattaagttaaaaaaatatattatatatttattctgcatgtatctaggtatgcctagaaacccaagtcttagtaattaaatgtaaaaaataagtcattttaataattgttttgtactatattataagttatattaggcaatggtttgtaacatatttatttttaaagacaataataattatgtgtaggtataagtaatggattttgggaagagctatgacctcgaaaacatcacaaagaatataactaaatatctcttttcttactcagactctttcaagtcttttgcaatatttcagaatctaaaatatttactaatattactaaagtattggattttgacaaaaactatgaattatgccgatttagttgatacctacacaagtttatgtgaaattttcaaagtcatagctcgtcccaaaatccattaggtacctatacaattgtttgtattggtaacagtcaatctatgaaattttataggtgtgtaaatacaaaaataaatatttaaacatataaaataaaatatattttttgcacgattgatcatttttgactgtttaccgtgacagattttacgtcagtaggtgacatttactagcaactcgacggtaagtaatccaactcgacggtaagtactccaactcgacggtaagtaattcacttaccgtcgagttaaaaaatctcttaattttaatttattttttgaaagaataaagaaaactaacgaattatttattaatattgaaacttatggtacaatttgttaaattatttaatgaaatcccacttgtttgggctgtggtttcacttctaacagaaactcctgcagaatcgcatacattagtagtattactagtattgcacaatattttttcggcaaaatctattttattttgaagagaatcttctacatagctttctgccactgtcgatgaacgccaacctccatgacgctttaatccgaggacatcaacacctttattagccaaaagcgttgctgatgtcctcctgaacgaatggccagtatagttctcgggattaggcaaatttaagaatttggcaatttgagaaggccagcccccgattgtccctttccctattacttgagcacaacattttcctttggcgtatcttaagaacaaatgatttgattttacttgtaatggacgaagttttatatacttttgcagaatttctaaatatgaatttatcatctggtttattaacgactgtaaaagtcgctggatgttcgtttttgtattgggtacttttatagtcattaaaccatcggtttgttggatgtcattcatagtaa

SEQ ID NO: 458 - DNA, 3365 bp, Diabrotica virgifera
gctccgtaaagtagtatacctttgatgcagttgttaaagctattattttttttgtttccgatgtttcctttgtttgccaattttttttaacattaaatgcatgcaaggttctgtaactattttcttgtggcatgtttaatttagtattatgtttatatgggattgagccacaattattcattaggctcattcataaaagacagctcaaggtcttacgacatgctgcgtttcctagggatttgacaacctaacctacttatgcttccataactttccacgaagatggactatctgttgatagaatcaacataaaattgcttttctacaccctaggtgtacacacaagacggcttaatatcgtttctcaaattttccgtataacgtgtaatgtggtttgcctaccactttcattgcaaacattctaactattacatcaagtttattttcattttaacggattatttaccacagtgggagtgattgtggtcactgtttcgtaatttaacaagctttacaatatatttcatataactaacagagaaattttaacttcctgtggaactgtcatttctgtcatgtcatccttcagaatttccgctatcagagccacttgctaccatacagtcatgatgtaaacaagtcagattcgagctcaatggtacctagagcatgaaacattggatattttgaacatccatgtttaatttcacatttcatttctatgttcctatgacggattaattgtaaagggttttacccaaatatattttactttggtggttagcatgttagattcacgtgagtataacctataacttttaaaatcgtagtcaaaattttaaatagtttgcattatcttatcaggttatacacattttaggtaaacactgatgatgatcggtcatccgatcgaaaactagttctgttctgtgatgtagccctgttttgggattttaacaaatataccttttataaaggattttatgttttttccacaaatattggtgtaatgaaaattacatttttaattaactactgtttgacgtttcgatttccactccagaaatcgttctcaaaaaaggatataattctgaaaaaaatgttagaaagattttataacctgagttttatttttttttaacctaaaaaactgtgttggctggcctgctaattgtggccaaatagccggaaaatctcatccgcaaattgcagatcttttgtttggttaaagttccatataatgcctgttcgatcgtcagttacttttctcattatccaatctatcataataagaaataggataggagttagtacgcaaccctgattggctccactttctgtggttatttcttctgatgttatctactttatctgagtgtttcagtttggctctgtatccttcaaagagaagtttgaaaaagttgatcatttttagtgggatcccataatatgtagacttaaaattttccatatttgtactgtatttacacggtcgaaggctctttaaaagacaaacaaagataaacctttcatctatatttttatttgctttttccaaaataattttagcaatgcaaatgtggtcaatggtggagtgttttccacagaggcctgcttggttacttctcagtttcttgtatggttccggcttcaatttttcattatgattttagtcaacaatttatatgtggtgcttagtagtaattgcacgccaattcttgcatcgagtcatatctcatttttttttgtattttaattctcaatctcccttttacttctttggtaattctttattcgttcaaaaaagattagcactgatgaattcagtgttcataaattaggtgtactcaccagattcacgtattgagcaactagcacagtgtaataaatactcataaataattaatagaaatcttctctactggaacatactttacaaatttttttctagtaatgtgtttgtctttctcgaatattagttctataatgataatcttgttaagactcttatgaaatggtgatcattttggttgatcaattacaactatcgcggaaattgccaaatgtcctccgccaaatgtaaattgccaaatgtaaaccgtgaagtcagcctcaaaagaagtacttgggaaaaacctacggttgacagttggttcttcaactggtcattgccaactaagcaaacacctccacacgcggacgggctagtggacacacctctatgtaggtgtacaggagaagacgaaacgagcatgtcctgtgagtatccgtaggtaccgtcaataatagagtactcgttccgccagccgtggcctacacctgcccacataagggagatgtctgacgacttgtccaccttcgtgtggaaaagacaggatatgcaatgagctagagactaaaactccctggtaggatgcacaatggataaattgtggcccaattgatatgtgacttgattcactctcgctactctgcagatacagttacaggatgatacaaatgtatatatcattataaagagcttttaacttgtcaaagctatctttggcactcaaacactctaatacaataataatattttttgcacgattgatcatttttgactgtttaccgtgacagattttacgtcagtaggtgacatttactagcaactcgacggtaagtaatccaactcgacggtaagtactccaactcgacggtaagtaattcacttaccgtcgagttaaaaaatctcttaattttaatttattttttgaaagaataaagaaaactaacgaattatttattaatattgaaacttatggtacaatttgttaaattatttaatgaaatcccacttgtttgggctgtggtttcacttctaacagaaactcctgcagaatcgcatacattagtagtattactagtattgcacaatattttttcggcaaaatctattttattttgaagagaatcttctacatagctttctgccactgtcgatgaacgccaacctccatgacgctttaatccgaggacatcaacacctttattagccaaaagcgttgctgatgtcctcctgaacgaatggccagtatagttctcgggattaggcaaatttaagaatttggcaatttgagaaggccagcccccgattgtccctttccctattacttgagcacaacattttcctttggcgtatcttaagaacaaatgatttgattttacttgtaatggacgaagttttatatacttttgcagaatttctaaatatgaatttatcatctggtttattaacgactgtaaaagtcgctggatgttcgtttttgtattgggtacttttatagtcattaaaccatcggtttgttggatgtcattcatagtaa

SEQ ID NO: 459 - DNA, 3320 bp, Diabrotica virgifera
gctccgtaaagtagtatacctttgatgcagttgttaaagctattattttttttgtttccgatgtttcctttgtttgccaattttttttaacattaaatgcatgcaaggttctgtaactattttcttgtggcatgtttaatttagtattatgtttatatgggattgagccacaattattcattaggctcattcataaaagacagctcaaggtcttacgacatgctgcgtttcctagggatttgacaacctaacctacttatgcttccataactttccacgaagatggactatctgttgatagaatcaacataaaattgcttttctacaccctaggtgtacacacaagacggcttaatatcgtttctcaaattttccgtataacgtgtaatgtggtttgcctaccactttcattgcaaacattctaactattacatcaagtttattttcattttaacggattatttaccacagtgggagtgattgtggtcactgtttcgtaatttaacaagctttacaatatatttcatataactaacagagaaattttaacttcctgtggaactgtcatttctgtcatgtcatccttcagaatttccgctatcagagccacttgctaccatacagtcatgatgtaaacaagtcagattcgagctcaatggtacctagagcatgaaacattggatattttgaacatccatgtttaatttcacatttcatttctatgttcctatgacggattaattgtaaagggttttacccaaatatattttactttggtggttagcatgttagattcacgtgagtataacctataacttttaaaatcgtagtcaaaattttaaatagtttgcattatcttatcaggttatacacattttaggtaaacactgatgatgatcggtcatccgatcgaaaactagttctgttctgtgatgtagccctgttttgggattttaacaaatataccttttataaaggattttatgttttttccacaaatattggtgtaatgaaaattacatttttaattaactactgtttgacgtttcgatttccactccagaaatcgttctcaaaaaaggatataattctgaaaaaaatgttagaaagattttataacctgagttttatttttttttaacctaaaaaactgtgttggctggcctgctaattgtggccaaatagccggaaaatctcatccgcaaattgcagatcttttgtttggttaaagttccatataatgcctgttcgatcgtcagttacttttctcattatccaatctatcataataagaaataggataggagttagtacgcaaccctgattggctccactttctgtggttatttcttctgatgttatctactttatctgagtgtttcagtttggctctgtatccttcaaagagaagtttgaaaaagttgatcatttttagtgggatcccataatatgtagacttaaaattttccatatttgtactgtatttacacggtcgaaggctctttaaaagacaaacaaagataaacctttcatctatatttttatttgctttttccaaaataattttagcaatgcaaatgtggtcaatggtggagtgttttccacagaggcctgcttggttacttctcagtttcttgtatggttccggcttcaatttttcattatgattttagtcaacaatttatatgtggtgcttagtagtaattgcacgccaattcttgcatcgagtcatatctcatttttttttgtattttaattctcaatctcccttttacttctttggtaattctttattcgttcaaaaaagattagcactgatgaattcagtgttcataaattaggtgtactcaccagattcacgtattgagcaactagcacagtgtaataaatactcataaataattaatagaaatcttctctactggaacatactttacaaatttttttctagtaatgtgtttgtctttctcgaatattagttctataatgataatcttgttaagactcttatgaaatggtgatcattttggttgatcaattacaactatcgcggaaattgccaaatgtctcaaagaagtacttgggaaaaacctacggttgacagttggttcttcaactggtcattgccaactaagcaaacacctccacacgcggacgggctagtggacacacctctatgtaggtgtacaggagaagacgaaacgagcatgtcctgtgagtatccgtaggtaccgtcaataatagagtactcgttccgccagccgtggcctacacctgcccacataagggagatgtctgacgacttgtccaccttcgtgtggaaaagacaggatatgcaatgagctagagactaaaactccctggtaggatgcacaatggataaattgtggcccaattgatatgtgacttgattcactctcgctactctgcagatacagttacaggatgatacaaatgtatatatcattataaagagcttttaacttgtcaaagctatctttggcactcaaacactctaatacaataataatattttttgcacgattgatcatttttgactgtttaccgtgacagattttacgtcagtaggtgacatttactagcaactcgacggtaagtaatccaactcgacggtaagtactccaactcgacggtaagtaattcacttaccgtcgagttaaaaaatctcttaattttaatttattttttgaaagaataaagaaaactaacgaattatttattaatattgaaacttatggtacaatttgttaaattatttaatgaaatcccacttgtttgggctgtggtttcacttctaacagaaactcctgcagaatcgcatacattagtagtattactagtattgcacaatattttttcggcaaaatctattttattttgaagagaatcttctacatagctttctgccactgtcgatgaacgccaacctccatgacgctttaatccgaggacatcaacacctttattagccaaaagcgttgctgatgtcctcctgaacgaatggccagtatagttctcgggattaggcaaatttaagaatttggcaatttgagaaggccagcccccgattgtccctttccctattacttgagcacaacattttcctttggcgtatcttaagaacaaatgatttgattttacttgtaatggacgaagttttatatacttttgcagaatttctaaatatgaatttatcatctggtttattaacgactgtaaaagtcgctggatgttcgtttttgtattgggtacttttatagtcattaaaccatcggtttgttggatgtcattcatagtaa

SEQ ID NO: 460 - DNA, 3095 bp, Diabrotica virgifera
  SmartBlast Evalue=1E-71; Info=TRAS3 protein n=1 Tax=Bombyx mori RepID=Q9BLI5_BOMMO
tggaattcaactcaaacagatcaaaaaggattattagtagaagatatgattaatgaactagagttgatagtacacaataaaccaggaaacccaccaacttttcagaacagagctggtgcggctagcaatatagatataacaatatcaaatgttgcagtagcacacctagttaaggattggaaagtgatggagcatgcaacaataagtgatcacaaccttataactttcaatcttaataacctaaatccacgtaatacggaaatatcttcggtaagatacaatataggtaaagcaaattatgaactattaaagtctgagtttcgaccaccttgtctggtacaaaggggatctaatataaatattgcaacaaaagaattaaccaaacaaattaaaaaagcaatggatatagcaataccaaaaataaaagaaaatagtaaagtaaaaaactcagcctggaaggaaaacctcacaagaatgagaagcagagttagatatgcgcgaaagcgatatcaacgatgtggtatctatcttgagaggcaaatccttctaggtgagtatagaagactaaaacaagaatataaacaagaaataaaaataacaaaagctaaaagttgggaaaccttcgtatcaagacacttagaattagatatgtggggaataccatataaaatagtttctaaaaaaattagatgtccgacaatgctttctactttaaaaaaagaagatggaacatttacagaaagttgggaagaatcggccgaaacattacttaatgtattattacctccagataaattagaaggagaaacagtagaacaaagaaatataagagaagaaatgatacaagaataccaaatagaagaagaaagagaaatagaggaattcacagaagaagaagtatatgaaagtatgagagaaatgaaaagaaagaaggcacctggaccggataatattcatgttgaaatacttcaagcattgtcggaacaaataattccagtactaacatcattatataatgaatgtcttagacaaagaaggtttcccaataattttaaacaagcagaagttataataatacataaaggggaagataaagatcctgccttaccgaaatcatatagaccggtatgtttattgaatacaatgggaaaattacaagaaaaattactatgtaaaaaattaaatcaaataagaacagaaattggattacatcctggtcagtatggttttaggaaaggtagatcaacagaagatgcaataaataaagtatttgaaatagtaaacgaaagcataaaaaagtatgttttaatgatctttatagacgtgtctggggcttttgacaatctttggtggccgtcattctttgaaagacttcgaagaatgagatgtccaaagaatctgtacggaagtctcagaaactactgtcaagaccgatatgcaagcctaagctgtccaacaggaaaaaagacaaaacatatcacaaaaggatgtccacaaggatcagtttgtggacctatgttctgggatgtaatgctagaggaactgttggaacaattgactatagatcctgaagtgcttggaagcatagcatatgcagatgatttgttgttgatcatagatgcaaactcaagaagagaattagaaaataaatcaaatgaagtattaataagagtaaatgattggatgaataaagtaaaattaacaatatcagattcaaaaacaacatatagtttaataaaaggaaatttagaaagagatccaattataaaaattagagggaaaacaataaaaagaaaaatggaaacaagatatttaggtattataatagacgaacaaaaattatttacaaaacacatgagttgtgtctgtgaaaaggcaacaaagatcatgcatagcattgctagtctagcacagaaggaatatagaatttcgttccgacagatgagaatatacctaagtacaatacttgcatcaattgtagggtacggttcaagtgtatgggcacatagattaataaataaaaaaaaacgcagaaaaattaaatagagctcagagaggatttcttgtaagaatgacgggagcatttggaacaactgcaacacaggcactcacagttttaactggagtaatgccaatgcatttagaaacacaaaaaagagcatgtaattattggctaaaaaagaaaaatatgaaaaaataatacaaataataggattagatataagaaataaaagagaattaaaagaaataataaatagaaaaagacaaaatgaatgggaaaattcaacaaaatctagacgtttatacaattttataccaatattagaaaacattccaaattattttaatccaaaacaaggtttaatacactttttaacaggacatggaccgtacccaacatatttggaaagatttaacttaaaagatgatgcatattgtgaatgtggagaactaggtacaccagaacatatagtgttacattgtgaaaatactatagaaaatgaagaacatagagaaatgagaagaagattagaaagaattgaaataagagatatattacaaaatgaagaatattttgaaatattaaacaatctcacacaaataatatctaaaaaacaacaagaaatctataataatagaagaagacaaccaataatccaaccctgatgaagttgagtaagataaagttaaaataaataaaataaaatataaattcaaaaatagatatttacaattataataataataattcaatataaaatatataaataaaaataataattcaataaataattcattaaattaaaaaaaaaaagctaccaactctcttctgaaaatagagggactgtctttataacttagaagggagttgatagtaccaaaaatattttaaattgtttatttaaatttgtttgttatacgtaattaagagattatggcaaattgttaattgtaaaaatagatttaatagttgagtaaaaaatgtaaaaatataaaaaaaaatatctgtaatcccatcaggaaaaaacgacctggattagtcactagaggccaggtcatatgtataaataataaataaataaaaaataaaaata

SEQ ID NO: 461 - DNA, 3036 bp, Diabrotica virgifera
gctccgtaaagtagtatacctttgatgcagttgttaaagctattattttttttgtttccgatgtttcctttgtttgccaattttttttaacattaaatgcatgcaaggttctgtaactattttcttgtggcatgtttaatttagtattatgtttatatgggattgagccacaattattcattaggctcattcataaaagacagctcaaggtcttacgacatgctgcgtttcctagggatttgacaacctaacctacttatgcttccataactttccacgaagatggactatctgttgatagaatcaacataaaattgcttttctacaccctaggtgtacacacaagacggcttaatatcgtttctcaaattttccgtataacgtgtaatgtggtttgcctaccactttcattgcaaacattctaactattacatcaagtttattttcattttaacggattatttaccacagtgggagtgattgtggtcactgtttcgtaatttaacaagctttacaatatatttcatataactaacagagaaattttaacttcctgtggaactgtcatttctgtcatgtcatccttcagaatttccgctatcagagccacttgctaccatacagtcatgatgtaaacaagtcagattcgagctcaatggtacctagagcatgaaacattggatattttgaacatccatgtttaatttcacatttcatttctatgttcctatgacggattaattgtaaagggttttacccaaatatattttactttggtggttagcatgttagattcacgtgagtataacctataacttttaaaatcgtagtcaaaattttaaatagtttgcattatcttatcaggttatacacattttaggtaaacactgatgatgatcggtcatccgatcgaaaactagttctgttctgtgatgtagccctgttttgggattttaacaaatataccttttataaaggattttatgttttttccacaaatattggtgtaatgaaaattacatttttaattaactactgtttgacgtttcgatttccactccagaaatcgttctcaaaaaaggatataattctgaaaaaaatgttagaaagattttataacctgagttttatttttttttaacctaaaaaactgtgttggctggcctgctaattgtggccaaatagccggaaaatctcatccgcaaattgcagatcttttgtttggttaaagttccatataatgcctgttcgatcgtcagttacttttctcattatccaatctatcataataagaaataggataggagttagtacgcaaccctgattggctccactttctgtggttatttcttctgatgttatctactttatctgagtgtttcagtttggctctgtatccttcaaagagaagtttgaaaaagttgatcatttttagtgggatcccataatatgtagacttaaaattttccatatttgtactgtatttacacggtcgaaggctctttaaaagacaaacaaagataaacctttcatctatatttttatttgctttttccaaaataattttagcaatgcaaatgtggtcaatggtggagtgttttccacagaggcctgcttggttacttctcagtttcttgtatggttccggcttcaatttttcattatgattttagtcaacaatttatatgtggtgcttagtagtaattgcacgccaattcttgcatcgagtcatatctcatttttttttgtattttaattctcaatctcccttttacttctttggtaattctttattcgttcaaaaaagattagcactgatgaattcagtgttcataaattaggtgtactcaccagattcacgtattgagcaactagcacagtgtaataaatactcataaataattaatagaaatcttctctactggaacatactttacaaatttttttctagtaatgtgtttgtctttctcgaatattagttctataatgataatcttgttaagactcttatgaaatggtgatcattttggttgatcaattacaactatcgcggaaattgccaaatgtcctccgccaaatgtaaattgccaaatgtaaaccgtgaagtcagcctcaaaagaagtacttgggaaaaacctacggttgacagttggttcttcaactggtcattgccaactaagcaaacacctccacacgcggacgggctagtggacacacctctatgtaggtgtacaggagaagacgaaacgagcatgtcctgtgagtatccgtaggtaccgtcaataatagagtactcgttccgccagccgtggcctacacctgcccacataagggagatgtctgacgacttgtccaccttcgtgtggaaaagacaggatatgcaatgagctagagactaaaactccctggtaggatgcacaatggataaattgtggcccaattgatatgtgacttgattcactctcgctactctgcagatacagttacaggatgatacaaatgtatatatcattataaagagcttttaacttgtcaaagctatctttggcactcaaacactctaatacaataatattttatttatattaaattaactcagtctcactatggcacacactttaaacaagagtttttagttattatcagtacttccgtctccttcgggtcccatttttaaagcttcttcgactatatcgggatttacgaaacccgtacttctcctatttgatagcctatttttggatcttcgttttctttgcgtctcgcttctgtcggcatttgattgatttcttaatttaacagcaggatgttcctcagggttgtaattttcaggtataccatactgcgttcggcaattgctattttctgtgttatgaagtggtaacctctcatttgtatacgatacttccccatttccgttttccatatcttgatatttctcctgttctgttctgttattattcttgcaaaattctatcactaatcagcaccatttaactaaaacagattatacgaaattacattccacgaattatt

SEQ ID NO: 462 - DNA, 2991 bp, Diabrotica virgifera
gctccgtaaagtagtatacctttgatgcagttgttaaagctattattttttttgtttccgatgtttcctttgtttgccaattttttttaacattaaatgcatgcaaggttctgtaactattttcttgtggcatgtttaatttagtattatgtttatatgggattgagccacaattattcattaggctcattcataaaagacagctcaaggtcttacgacatgctgcgtttcctagggatttgacaacctaacctacttatgcttccataactttccacgaagatggactatctgttgatagaatcaacataaaattgcttttctacaccctaggtgtacacacaagacggcttaatatcgtttctcaaattttccgtataacgtgtaatgtggtttgcctaccactttcattgcaaacattctaactattacatcaagtttattttcattttaacggattatttaccacagtgggagtgattgtggtcactgtttcgtaatttaacaagctttacaatatatttcatataactaacagagaaattttaacttcctgtggaactgtcatttctgtcatgtcatccttcagaatttccgctatcagagccacttgctaccatacagtcatgatgtaaacaagtcagattcgagctcaatggtacctagagcatgaaacattggatattttgaacatccatgtttaatttcacatttcatttctatgttcctatgacggattaattgtaaagggttttacccaaatatattttactttggtggttagcatgttagattcacgtgagtataacctataacttttaaaatcgtagtcaaaattttaaatagtttgcattatcttatcaggttatacacattttaggtaaacactgatgatgatcggtcatccgatcgaaaactagttctgttctgtgatgtagccctgttttgggattttaacaaatataccttttataaaggattttatgttttttccacaaatattggtgtaatgaaaattacatttttaattaactactgtttgacgtttcgatttccactccagaaatcgttctcaaaaaaggatataattctgaaaaaaatgttagaaagattttataacctgagttttatttttttttaacctaaaaaactgtgttggctggcctgctaattgtggccaaatagccggaaaatctcatccgcaaattgcagatcttttgtttggttaaagttccatataatgcctgttcgatcgtcagttacttttctcattatccaatctatcataataagaaataggataggagttagtacgcaaccctgattggctccactttctgtggttatttcttctgatgttatctactttatctgagtgtttcagtttggctctgtatccttcaaagagaagtttgaaaaagttgatcatttttagtgggatcccataatatgtagacttaaaattttccatatttgtactgtatttacacggtcgaaggctctttaaaagacaaacaaagataaacctttcatctatatttttatttgctttttccaaaataattttagcaatgcaaatgtggtcaatggtggagtgttttccacagaggcctgcttggttacttctcagtttcttgtatggttccggcttcaatttttcattatgattttagtcaacaatttatatgtggtgcttagtagtaattgcacgccaattcttgcatcgagtcatatctcatttttttttgtattttaattctcaatctcccttttacttctttggtaattctttattcgttcaaaaaagattagcactgatgaattcagtgttcataaattaggtgtactcaccagattcacgtattgagcaactagcacagtgtaataaatactcataaataattaatagaaatcttctctactggaacatactttacaaatttttttctagtaatgtgtttgtctttctcgaatattagttctataatgataatcttgttaagactcttatgaaatggtgatcattttggttgatcaattacaactatcgcggaaattgccaaatgtctcaaagaagtacttgggaaaaacctacggttgacagttggttcttcaactggtcattgccaactaagcaaacacctccacacgcggacgggctagtggacacacctctatgtaggtgtacaggagaagacgaaacgagcatgtcctgtgagtatccgtaggtaccgtcaataatagagtactcgttccgccagccgtggcctacacctgcccacataagggagatgtctgacgacttgtccaccttcgtgtggaaaagacaggatatgcaatgagctagagactaaaactccctggtaggatgcacaatggataaattgtggcccaattgatatgtgacttgattcactctcgctactctgcagatacagttacaggatgatacaaatgtatatatcattataaagagcttttaacttgtcaaagctatctttggcactcaaacactctaatacaataatattttatttatattaaattaactcagtctcactatggcacacactttaaacaagagtttttagttattatcagtacttccgtctccttcgggtcccatttttaaagcttcttcgactatatcgggatttacgaaacccgtacttctcctatttgatagcctatttttggatcttcgttttctttgcgtctcgcttctgtcggcatttgattgatttcttaatttaacagcaggatgttcctcagggttgtaattttcaggtataccatactgcgttcggcaattgctattttctgtgttatgaagtggtaacctctcatttgtatacgatacttccccatttccgttttccatatcttgatatttctcctgttctgttctgttattattcttgcaaaattctatcactaatcagcaccatttaactaaaacagattatacgaaattacattccacgaattatt

SEQ ID NO: 463 - DNA, 2737 bp, Diabrotica virgifera
gtagttaccaaaattgtatcttttagaaacagaaacctaaatcctttttcttataattggaccgcgttatgtaataacggattaaccgccaaaagtccaaaatcgagataatagtgccatcttgcagctagggtgcaaatctatgtataaaaatatgttttttgtaaaaaaattaaaaaaaaagctgtttttaaatgcctgtattaagcgacattttttattttcttaaaaaaaatctcacactaggatttgtaatatcgaactaaacgccaataatggtacataatccattgtcataaacaaaaatccgcatctttgtaagtgtaataacgaatcaagcgccacgaatagtcggttaattctttattacaaaacataacatatttactaacgttaaagatatcgaattaaaagacatcctttgtcaggtaacatcagattaagcgccaaatatgtctcttaatccggtattcggatcttaactcatgcatatcttaaaaaatcattaacgaattaagcgacatttgatcgaataacttttaaaatataaattatttttaaaaaattttaaacacatgtaaaagtctatttacatttgccttaatgtattaaatatgaaacatgtcagtactatattttagaaatagtaccaaaaacaaatttaaaatctttaaaccgatttatctcaaaactacattttggcgcttaatccgctattacataacgcggtccagttgacgttagcgctaccagtagtagaatcatcacgaatcacgaaacgtaaacataaatatttcaccattgggatcatgatgatggttcatttcttattgttattatgaatagagtaccttaagttaacaatttcttatattaagttaaaaaaatatattatatatttattctgcatgtatctaggtatgcctagaaacccaagtcttagtaattaaatgtaaaaaataagtcattttaataattgttttgtactatattataagttatattaggcaatggtttgtaacatatttatttttaaagacaataataattatgtgtaggtataagtaatggattttgggaagagctatgacctcgaaaacatcacaaagaatataactaaatatctcttttcttactcagactctttcaagtcttttgcaatatttcagaatctaaaatatttactaatattactaaagtattggattttgacaaaaactatgaattatgccgatttagttgatacctacacaagtttatgtgaaattttcaaagtcatagctcgtcccaaaatccattaggtacctatacaattgtttgtattggtaacagtcaatctatgaaattttataggtgtgtaaatacaaaaataaatatttaaacatataaaataaaatatattttttgcacgattgatcatttttgactgtttaccgtgacagattttacgtcagtaggtgacatttactagcaactcgacggtaagtaatccaactcgacggtaagtactccaactcgacggtaagtaattcacttaccgtcgagttaaaaaatctcttaattttaatttattttttgaaagaataaagaaaactaacgaattatttattaatattgaaacttatggtacaatttgttaaattatttaatgaaatcccacttgtttgggctgtggtttcacttctaacagaaactcctgcagaatcgcatacattagtagtatccaacattttttctcttcaaatacgcgatcaaagttgaaaacttggaaatatcaatgccatcataaagaaaaacggtggatttaatcattgaatattctgcccagaggcttccaggagctttcaactgcatatgtctttgaacgaaatatgccaatagagtcttttcttcgattcttaaattcttgccttcgcaccattttttaaaactttggtaggtattttgataacggattttggatttttcgggaataattgcggaacacccttcttcccaagcccgttcaatttcttcaaattcactttcgctcatattttaatttataataatcaaaattgtacttaaaattattgacaactaaataaaaactcaattctccattgttgttatgcaccctagttactacctaacaaccaaagtatctatcttgataaaatgaatgaaactagtcaatatgacgaaaatgtttaattttataatttataatggtatcaatcgtgcaaaaaacgttataagcatgtcgaacgttaagggtaaccgatctcagacaataattggagtcgtcgctccgctcctcctccaaacaattgtcttcgatcggtataaaacccttaccgttctccatacttaatatactattactaaaatttacatttggcaacccggcagttttatttattttcacatagcgaagatatttaaaattgtaaacacaaacagtcatatcataattacctgtaacccaagaatacatcgtattgttttatttattatatttggtattgtcatgatatttcgatcgcgagtatcattattaattaccaatagtgtacaattagtgcaagatttacaccaaggcgatttaccttgaagattaaggatttatagacggtttcaaacaaaatcttcagagaacccgaatttttgtgtagtgttgtgtgcagataaagcttgttttaccagaaatggtgtgtttaactttcataattgccaaaagtatgaatttatgggctgg

SEQ ID NO: 464 - DNA, 2654 bp, Diabrotica virgifera
  SmartBlast Evalue=7E-99; Info=Hydroxyacid oxidase 1 n=1 Tax= Harpegnathos saltator RepID=E2BJY7_9HYME
aagtacttgatataattcttacaacagagaaataattttcttgtcaaaatgtctgatttatttagcgtttcggaatttgagaaacatgctttggaagttttgcctaaaaatattcgagattactacagaagtggtgcaggacgacaggagacattggctgataacagaaaagcattcttcaggtataaagtaagaccaagatatttaagaaatgtagaaaatatagatttatctacagtagttcttggagagaagatttccatgccaattggaattgctccgtctggtatgcaaaaaatggctcatccaatgggcgaactggctgttgttaaagctgcccaagaaatgggtgtagtttacactcttagcaccatgtcaacatacagcattgaagaagttgctcaagctgctccaatggctgtgaaatggtttcaagtatatatttataaggacagagatttaactagaaatttaattttgagagcggagaaagctggttttaaagcaatagtattaactgtggatgcaccgttatttggtttgcgtattcctgatttaaagaacaagttcacattacctccacatcttaaattggcgaatttcgaaggaagagtttcggaaatgagccaggaccccacaaaaggatcaggtcttaacaactacgttaatgatttgttcgatccgtccattaatgggaagacattaaatggttgaagagtattacaaaccttcccatagttctgaaaggatattgactgcagaggatgcattactcgctgtggaggctggggtagctgccgttcaagtctccaaccatgggtctaggcagttggatggaacacctgctgcgattgacgctctatgtgatgtagtaaaggcggtaggagacaaaatagaagtttacatcgatggtggagtgacagatggcgttgatgttctcaaagctgttgctcttggagcaaagatggctctggtaggacgatctgctttatggggattggttcatagtggacaacaaggagtcgagagagttctcaatattcttaaaaacgaactcaggaccggcttgggaatatcaggttattcaaaaataaatcaaattgatagaagcttggtggtacatgaaagttattatgctaagctttaagatgactgaagttggaccgcattatgtaataacggattaaccgccaaaagtccaaaatcgagatattagtgccatcttgcagctagggtgcaaatctctgtataaaaatatgatttttgtaaaaaaattcaaaaaaaagctgtttttaaatgcctgtattaagcgacattttttattttattaaaaaaaaatctcgcactaggatttgtaatatcgaactaaacgccaataatggtacataatccattgtcataaacaaatatccgcatctttgtaagtgtaatattttaattaattctttaattcttattaacttaattctttattacaaaacataacatatttactaacgtttaagatatcgaattaaaagacatcctttgtcaggtaacatcagattaagcgccaaatatgtctcttaatccggtattcggatcttaactcatgcatatcttaaaaaatcattaacgaattaagcgacatttgatcgaataacttttaaaatataaattatttttaaaaaattttaaacacatgtaaaagtctatttacatttgccttaatgtattaaatatgaaacatgtcagtactatattttagaaatagtaccaaaaacaaatttaaaatctttaaaccgatttatctcaaaactacattttggcgcttaatccgctattacataacgcggtccagttgacgttagcgctaccagtagtagaatcatcacgaatcacgaaacgtaaacataaatatttcaccattgggatcatgatgatggttcatttcttattgttattatgaatagagtaccttaagttaacaatttcttatattaagttaaaaaaatatattatatatttattctgcatgtatctaggtatgcctagaaacccaagtcttagtaattaaatgtaaaaaataagtcattttaataattgttttgtactatattataagttatattaggcaatggtttgtaacatatttatttttaaagacaataataattatgtgtaggtataagtaatggattttgggaagagctatgacctcgaaaacatcacaaagaatataactaaatatctcttttcttactcagactctttcaagtcttttgcaatatttcagaatctaaaatatttactaatattactaaagtattggattttgacaaaaactatgaattatgccgatttagttgatacctacacaagtttatgtgaaattttcaaagtcatagctcgtcccaaaatccattaggtacctatacaattgtttgtattggtaacagtcaatctatgaaattttataggtgtgtaaatacaaaaataaatatttaaacatataaaataaaatatatttaaagacaagtaaataattggtggtattgatatttattccgtgttatattcccaatttattttcttaattatggtgttattactagtaattttgaaatggtccagcaatgcaattattgtgatgttatataataaatataagtata

SEQ ID NO: 465 - DNA, 2591 bp, Diabrotica virgifera
gtagttaccaaaattgtatcttttagaaacagaaacctaaatcctttttcttataattggaccgcgttatgtaataacggattaaccgccaaaagtccaaaatcgagataatagtgccatcttgcagctagggtgcaaatctatgtataaaaatatgttttttgtaaaaaaattaaaaaaaaagctgtttttaaatgcctgtattaagcgacattttttattttcttaaaaaaaatctcacactaggatttgtaatatcgaactaaacgccaataatggtacataatccattgtcataaacaaaaatccgcatctttgtaagtgtaataacgaatcaagcgccacgaatagtcggttaattctttattacaaaacataacatatttactaacgttaaagatatcgaattaaaagacatcctttgtcaggtaacatcagattaagcgccaaatatgtctcttaatccggtattcggatcttaactcatgcatatcttaaaaaatcattaacgaattaagcgacatttgatcgaataacttttaaaatataaattatttttaaaaaattttaaacacatgtaaaagtctatttacatttgccttaatgtattaaatatgaaacatgtcagtactatattttagaaatagtaccaaaaacaaatttaaaatctttaaaccgatttatctcaaaactacattttggcgcttaatccgctattacataacgcggtccagttgacgttagcgctaccagtagtagaatcatcacgaatcacgaaacgtaaacataaatatttcaccattgggatcatgatgatggttcatttcttattgttattatgaatagagtaccttaagttaacaatttcttatattaagttaaaaaaatatattatatatttattctgcatgtatctaggtatgcctagaaacccaagtcttagtaattaaatgtaaaaaataagtcattttaataattgttttgtactatattataagttatattaggcaatggtttgtaacatatttatttttaaagacaataataattatgtgtaggtataagtaatggattttgggaagagctatgacctcgaaaacatcacaaagaatataactaaatatctcttttcttactcagactctttcaagtcttttgcaatatttcagaatctaaaatatttactaatattactaaagtattggattttgacaaaaactatgaattatgccgatttagttgatacctacacaagtttatgtgaaattttcaaagtcatagctcgtcccaaaatccattaggtacctatacaattgtttgtattggtaacagtcaatctatgaaattttataggtgtgtaaatacaaaaataaatatttaaacatataaaataaaatatattttttgcacgattgatcatttttgactgtttaccgtgacagattttacgtcagtaggtgacatttactagcaactcgacggtaagtaatccaactcgacggtaagtactccaactcgacggtaagtaattcacttaccgtcgagttaaaaaatctcttaattttaatttattttttgaaagaataaagaaaactaacgaattatttattaatattgaaacttatggtacaatttgttaaattatttaatgaaatcccacttgtttgggctgtggtttcacttctaacagaaactcctgcagaatcgcatacattagtagtattactagtattgcacaatattttttcggcaaaatctattttattttgaagagaatcttctacatagctttctgccactgtcgatgaacgccaacctccatgacgctttaatccgaggacatcaacacctttattagccaaaagcgttgctgatgtcctcctgaacgaatggccagtatagttctcgggattaggcaaatttaagaatttggcaatttgagaaggccagcccccgattgtccctttccctattacttgagcacaacattttcctttggcgtatcttaagaacaaatgatttgattttacttgtaatggacgaagttttatatactttataatggtatcaatcgtgcaaaaaacgttataagcatgtcgaacgttaagggtaaccgatctcagacaataattggagtcgtcgctccgctcctcctccaaacaattgtcttcgatcggtataaaacccttaccgttctccatacttaatatactattactaaaatttacatttggcaacccggcagttttatttattttcacatagcgaagatatttaaaattgtaaacacaaacagtcatatcataattacctgtaacccaagaatacatcgtattgttttatttattatatttggtattgtcatgatatttcgatcgcgagtatcattattaattaccaatagtgtacaattagtgcaagatttacaccaaggcgatttaccttgaagattaaggatttatagacggtttcaaacaaaatcttcagagaacccgaatttttgtgtagtgttgtgtgcagataaagcttgttttaccagaaatggtgtgtttaactttcataattgccaaaagtatgaatttatgggctgg

SEQ ID NO: 466 - DNA, 10141 bp, Diabrotica virgifera
  SmartBlast Evalue=0; Info="ABC transporter, putative n=1 Tax= Pediculus humanus corporis RepID=E0W387_PEDHC"
cacaaatacgaatagataggcaatcacaatcttcgagagtacttactggttcagtcgctgacagtccgcgaatttcaatccgcaccatggaggcagttctgcacgagagtacttttgtagggcaatctaaagacgccgccgccgttgtcaaatcgaacggggtcaacggcgattcagtgaatttttccgtaaaggtgaatcttaaccaagaaaagactttgatttgtgacgatggtactaatggcaaaatgtgccaaaatacggtggacttggagtttcaaaatattagttttcgtgcgacgcaagggaatatatttaccaaaaggactacaaaagaaattttgcatcaagtcggaggacgtttccagcccgggcagctgatagccataatggggccatcgggtgcaggcaaaagtacattattggatgttttgagtgggtataggatacgtggcgtaacaggttcagtatacgttaacggccaaccaagaagtttaaaggaattcaggaaaacgtcatgttacattacgcaagatgaccgtctgcagcctttactcactgtggacgaaaatatgtgggtagctgcagatttgaaactaccttccagtgtcagcaacagtaataaacggagtataattaacaatattttaaaaacactaaatcttgaaaatacaaaaaaagtgagagcagctggtctttccggtggacagaaaaagaggttgtcaatagctttagagttagtaaataatccaatggtcatgttcttggatgaaccaaccacgggattggatagttcgtcttgttcaacatgtataacactacttaagaaactaactatgcaaggaaaaacaatcatatgtaccattcaccagccttcagctactttatttgcaatgtttgatcaggtgtacgtagtaggaaatgggtactgcctatatcaaggtagtacgaataaactggttccatttttgcaagactgtgggtttccctgtccgcagtatcacaatcctgctgactacgtaatagaactagcatgtattgagcacggacctgagaaacctgaatatatgagggatataattcagaacggacaatcttaccaatattttaacgagcctgaaaagatgaaaagcaccatttgtaactacccaggtcccaaacctattaaacgagttgttagcagtgatgaatcctcttttcccacatcacaattccatcaactaggagttcttatgagacggggatttattaaagcctacagagataagatgcttacctaccttcgtattggaacaaacataatagttggactgatgttgggcagcctctattggaaagctggaagtgatggatctaaagttttggataattttaatttattgtttgcgatattattgcaccatatgatgtccacaatgatgttgacgattttaacatttccccaggaaatgtcgattttaataaaagaacacttcaaccgttggtattcattaaaaatgtattacacatcggtaaccatagtggatattccggtttcggttattggctgcttcctgttttcactcataatatactatatgacagatcaaccaaacgataaagccagattcctgatattcttcgtcacttgcatgttggtagttctagtagctcaaggagttggtctaactattggcgcatattttgatgttgtgaacggaacttttgttggaccaaccctgatggtacccatgatgatgttctccggttttggcgttcgtctacgtgatctgccgaccataatgtactacggcagttttacttcttacttaaggtacggcttggaaggagtagtccaggcggtgtacggaatggacaggggtattcttcaatgtcccgaagacaaattttgcttctacaagtatccgaagactttcctggaaatagtagatgtcaggtcggatcagttcgataatgacatcattgctttactgcttttcttgtttgttttgagaattgcggcgtacgtagtgctgaggtacaaactggcatctgtgcgatagagcctgtttatgttttaataacttttattagaagtaggtgattgaagcctcggttttggtaaacagtgttgttagaaggacatttatttaaattttactcaaaaaaatatttttttttctttagaaaacatcattttttgtgacaatcaaaggaacttagagaaaatttacaataatgtttttaaaattttccaaagattatgatttattaaaagataaaagtatgagatcgtcactcagtacagtggttcccaagtagcaatttttcgacgcattggttgtcagtacaaacaaatgcactgtctacaactttgcccgagagcattttcagttgtttcggccaacgtcccctaccccgactgacattacgatgttacaacctgtagttatacgggcaactaatttattaccattttgacaactacatatcacaattcagttttttcaacaatcgcaacgacttaaaaatgttataatgctaaactaattattatatattttattttgatagaaattttggatttatttaacaacctgtttatttgtttttttaatagctggtttccattccattgttttatcagtagatttgagatttgataaccacctttgtatctgctttggtagacagggttgccaggtcagttttaactctttcagtagttttgttttcacaaaatcagtagattctttttaggccatgtaaatatacagtaatacagtgatatgcacatccgtcttaaatgtcccaagagcaattccacaaaattggaaacctaattattccaaaccaccaactggtaattatcattttttagctaaaatctactaaatcaaaaactaaaatatacttaagtattttgggatatatttgggattttttataataaaaacaacagctaacttaaggggataggcgcaaaatgtcgtctgttaaaatgttcaatgtattttaaatgttttcgttttttgcgaatccttagaaaactaataagtatttttgaaaaatttaaacgcacaaagaaagattacttaccaaggaccgaaagtccctgaaaacttctataatgtttattttaatacgttacaggggtgaaaaaagaaaaaatttagtgacttttaattccaaatatctcgttcaaaagaaacgttttggtttttctaaataatgcagtctttcattctgcgtttaaatttttcaaaaagacgtattatagtttcctcatgattcgaaaaaaatggatcaaattctgttgaaatataccaaaaatctactaaaaatattgcctactagaattttttaaaaaatatcaaaaatctaccaaaaaagtagaaatctactaaatgtggcaacgctgttaatgagaatgatacacttttgacactggtcacatgacctctgtcacccaataagagggtgcgttctaaaatggttttgatagtcggcgcggccgggtttggttggcgattggacttctaagttgtcttatccgtctaaggttggtaataaggtattttttagtaatattggtaatattgtttaatgcgccattttggttttacttgagatttttgggatgtaaagaaaatgaaaacacagaatataaaaaatgcaggcattttctgataactttaaaagcaccatcaatacattaaatttatacagaacatctttaacataaattttgacttttatattaaaatttgattttttaaatttgcatattttttgtcaaaaatgtcataaaaaaagcagcgcgtgtgttttttaaaggtgaaatatccatatttgacggtaatctgagatgcgtttataaatttcacatctggtaataagtcctttatgtatttatatcatataaatttaaatacccaatacgatgtcaaaacagtttactttttggttttcgcattcaccatacagttgttaaaaatataggtaaaaaaacataactagtctgactccttgagcaaccattgcacgcgcaggtgctttttatagtcgcttcagttgtcttatgcaacggttacgaaacgatgttgcttaaacaggaggttgcctaggcaacgtcaagacaactcaaaaatcgtccaccaaatcagtgcagaatagggtcgtcttttaggcaataacaacgttgtaagaaaacgttgccacgcggtagacaacgttgtcgcctcgacaaattgctacttgggttatacctattaatgagccaattctgtaaaaatcatgaactctcatacaattttggtagtacctagtgcaattaaaagtgaaataagaaatataatttcatacttacgttatgatattatccgttatggtatgtaggtactccattcaaatgttacatttagggttgcatttcttagaggagtcaatattattatttttttaatgtgtatggcggttcagtagaagcttaagttcaagtttttggggtcgccacccttgtcccccggccgccatcttggaaaaaggggtgcaaaggacgttcgcgctgtatctcctaaactagcaaccctacagaaaatttaattagaaataaaatgtagcaaattaaattttctacaattttatatttattactttttatcgtcaagtgatatacaaaaaagttataaaataaacaaaaataagaaaaaaatttgtaagaagtttccttttggaggttataacttttttccgttcatttcacaataaaataatatcattgcgattttatggaggatttctcaacgaacaatttccactatttataaagttgtttaattttacttatttatctgggctttacagcgctccaaacttgactagattctcgaaatctcataggaatacacagacaatttctagacaaaataatatttaatattatatgttgaaatagatctatcaaaggttattatttttttatggtcaaggcttcaagttaagatctgaatcagtatccgaggtgaatttttgtggtatagtgagagttagagagttagtgttagcgtcattgtcggtaattcatctttttcatcaataattaatgttgatatgtccaccccacataacaatttcatgttcttagtagattcatagaacatacttttcagaaaaagtatatactaagaatatgcgtaattaccattgcgaatgtgcagagcacatactgagtatatactacattacagtacttaaacgttctatgtatatacttagaatgtactaccgcacttcttctcagtatataccaagaatatactttttaggatattctaagaaggtgctataaaccttctatttatatacttagaatgtactacctcacatcttttagtatataggaagaatgtactttttagtatatgggaagaatattacaaggaagtgctatattgctcagaagcatgttttcagcatcaccgaatctcatcctaggttctactttctactaaatttacatattacatatgagaatgtagttagtacattctacaatattacttaaaaagtaaatataaaatattatataaattttagttagttatatcaatattatataggtaagtaggtatatatatttagttattatgtgcatataaaaataaaaatgctgaatatataaatttatatattcatattcatatacctatcgtacccaaataaatattatgtaacatatgtatgtaaataactaaaatttatatgttgcttatatgtacctatatacatacttactatttaagtaatattgaagtaccaaaatgaattttttatttgtaagttgacagcaaacaaaataaaacgtttaattatgcatgttcctattcctggttgaaatacttggtcttcctcacaacacagcatagacattgttagtgttaagtgtagacacaaatgccaaatgcctattcagtaactattttcatattttgtatttttcctttgttcccaaccccctacccgctaacccctatgcaggtatgcagcggtcgtttccgctttgtttgtgccggttgtgggttttggctcagccacacagcttacctgaatgtcaattccatgtaaaaataaaattcttcataagaatactcaataaacttaatcaaaatagtaaatgcatttcagttatgaaagcgaaacgacaatttctcctttttcgttaatacaattaattcttaaacatttttaccatacaattaaaacaattttaaataatgaattcggtagtttaattaatagtacctacatacataaatttttaaatttcattaattattcttaacgaagttgataatctataggctaacattattcttcctatacatacatatatattatttttaagatattttaaaagtatctacttataagtatgtgttaagtatgtacttataagtatgtgctaagaatattcggtaaaagtatattctgagaatagtatctacttataagtatgtgttaagaatgtacttataagtatgtgctaagaatattcggtaaaggtacattctaagaataaacttttacgaatattccgagttactacgtacacgaatgtactcagtatattcggtacgagaatatactttaaagtatgtgcaaagaacatgaaatttagaatgttttttaaggtacatgctatgcttgtactacgcatatactaaaaagaatatactctgacgaatgttggtagtatatgcttagaacatgatacgaacatcattgttatgtgggacgatgttgctgcaactttcaccaccacaatggaaacacactgctgaacatttgcatttgagatctgcttttcatcaaccacatgcacttccagtttccattgcatctgcaaaaggtgaatttaataagctcgggggtactggaggcttagaagtttggattagtatccaaaatttcccatgctttttccagtcccaatcttctggatcacaatgtttaccgagccatgactgaatctggtgatacactcggagtctttggaaacggactgcatcttgtgttggaggaagtgcgaagagattaaatgcattgttttcactgttttagcgaattgtttttatctccgggtttttagagattcgtctttatttccgccatataaagaggcgataaacgttcgtcgaccccaaaacttgaacttgagcttctactgataccccctacacattgaaaaaaaataaaattgactgctctaataaatgcaacgtatgccctaaaaaatgtaacatatcaatggactaatggtaaaagttgaacaaatacttcctagaactgcagaagaatctttcttacttactccacaaaccaattcaaaaagtactacgttaagagtgtatgaagagtatttcatataaatttccaacaaaaaatctagtcattttacccaattaggtaaatacatttttgtcatttttggcatttctctgattttggattgtcgtttcgtttcgatagggcttttcatcgattgtcatttgtttcgagcttctgtcatgtgttgtataatgtgtgtataatattaatatacacggattatatgacacatgacagaggctcgacacaaatgactgagaatgaaaagccctattctcactgccttaaatgaaacacagctcataatattttttataggaagttattgccataccacaaagtacaggcttcgtctgcagatatttttatggtaatagttttaacaattactcttatatcatggtataggttgtctggctctaaacagtgtcgtgtttattcttaagtatataaagaatgtttcatttaagtaatttttaaactttgctgtgatattgtattaccattttcttgttcatatagcatcatgattgcgcttgggatatgatgtttagaactatcctcttttattaggcaaaaaatgcctaataaacattaggcaactcaacatttatcttctttatgacgtcactgataattggaccgcattatgtaataacggattaaccgccaaaagtccaaaatcgagatattagtgccatcttgcagctagggtgcaaatctctgtataaaaatatgatttttgtaaaaaaattcaaaaaaaagctgtttttaaatgcctgtattaagcgacattttttattttattaaaaaaaaatctcgcactaggatttgtaatatcgaactaaacgccaataatggtacataatccattgtcataaacaaatatccgcatctttgtaagtgtaatattttaattaattctttaattcttattaacttaattctttattacaaaacataacatatttactaacgtttaagatatcgaattaaaagacatcctttgtcaggtaacatcagattaagcgccaaatatgtctcttaatccggtattcggatcttaactcatgcatatcttaaaaaatcattaacgaattaagcgacatttgatcgaataacttttaaaatataaattatttttaaaaaattttaaacacatgtaaaagtctatttacatttgccttaatgtattaaatatgaaacatgtcagtactatattttagaaatagtaccaaaaacaaatttaaaatctttaaaccgatttatctcaaaactacattttggcgcttaatccgctattacataacgcggtccagttgacgttagcgctaccagtagtagaatcatcacgaatcacgaaacgtaaacataaatatttcaccattgggatcatgatgatggttcatttcttattgttattatgaatagagtaccttaagttaacaatttcttatattaagttaaaaaaatatattatatatttattctgcatgtatctaggtatgcctagaaacccaagtcttagtaattaaatgtaaaaaataagtcattttaataattgttttgtactatattataagttatattaggcaatggtttgtaacatatttatttttaaagacaataataattatgtgtaggtataagtaatggattttgggaagagctatgacctcgaaaacatcacaaagaatataactaaatatctcttttcttactcagactctttcaagtcttttgcaatatttcagaatctaaaatatttactaatattactaaagtattggattttgacaaaaactatgaattatgccgatttagttgatacctacacaagtttatgtgaaattttcaaagtcatagctcgtcccaaaatccattaggtacctatacaattgtttgtattggtaacagtcaatctatgaaattttataggtgtgtaaatacaaaaataaatatttaaacatataaaataaaatatattttttgcacgattgatcatttttgactgtttaccgtgacagattttacgtcagtaggtgacatttactagcaactcgacggtaagtaatccaactcgacggtaagtactccaactcgacggtaagtaattcacttaccgtcgagttaaaaaatctcttaattttaatttattttttgaaagaataaagaaaactaacgaattatttattaatattgaaacttatggtacaatttgttaaattatttaatgaaatcccacttgtttgggctgtggtttcacttctaacagaaactcctgcagaatcgcatacattagtagtattactagtattgcacaatattttttcggcaaaatctattttattttgaagagaatcttctacatagctttctgccactgtcgatgaacgccaacctccatgacgctttaatccgaggacatcaacacctttattagccaaaagcgttgctgatgtcctcctgaacgaatggccagtatagttctcgggattaggcaaatttaagaatttggcaatttgagaaggccagcccccgattgtccctttccctattacttgagcacaacattttcctttggcgtatcttaagaacaaatgatttgattttacttgtaatggacgaagttttatatacttttgcagaatttctaaatatgaatttatcatctggtttattaacgactgtaaaagtcgctggatgttcgtttttgtattgggtacttttatagtcattaaaccatcggtttgttggatgtcattcatagtaa

SEQ ID NO: 467 - DNA, 2188 bp, Diabrotica virgifera
gtagttaccaaaattgtatcttttagaaacagaaacctaaatcctttttcttataattggaccgcgttatgtaataacggattaaccgccaaaagtccaaaatcgagataatagtgccatcttgcagctagggtgcaaatctatgtataaaaatatgttttttgtaaaaaaattaaaaaaaaagctgtttttaaatgcctgtattaagcgacattttttattttcttaaaaaaaatctcacactaggatttgtaatatcgaactaaacgccaataatggtacataatccattgtcataaacaaaaatccgcatctttgtaagtgtaataacgaatcaagcgccacgaatagtcggttaattctttattacaaaacataacatatttactaacgttaaagatatcgaattaaaagacatcctttgtcaggtaacatcagattaagcgccaaatatgtctcttaatccggtattcggatcttaactcatgcatatcttaaaaaatcattaacgaattaagcgacatttgatcgaataacttttaaaatataaattatttttaaaaaattttaaacacatgtaaaagtctatttacatttgccttaatgtattaaatatgaaacatgtcagtactatattttagaaatagtaccaaaaacaaatttaaaatctttaaaccgatttatctcaaaactacattttggcgcttaatccgctattacataacgcggtccagttgacgttagcgctaccagtagtagaatcatcacgaatcacgaaacgtaaacataaatatttcaccattgggatcatgatgatggttcatttcttattgttattatgaatagagtaccttaagttaacaatttcttatattaagttaaaaaaatatattatatatttattctgcatgtatctaggtatgcctagaaacccaagtcttagtaattaaatgtaaaaaataagtcattttaataattgttttgtactatattataagttatattaggcaatggtttgtaacatatttatttttaaagacaataataattatgtgtaggtataagtaatggattttgggaagagctatgacctcgaaaacatcacaaagaatataactaaatatctcttttcttactcagactctttcaagtcttttgcaatatttcagaatctaaaatatttactaatattactaaagtattggattttgacaaaaactatgaattatgccgatttagttgatacctacacaagtttatgtgaaattttcaaagtcatagctcgtcccaaaatccattaggtacctatacaattgtttgtattggtaacagtcaatctatgaaattttataggtgtgtaaatacaaaaataaatatttaaacatataaaataaaatatattttttgcacgattgatcatttttgactgtttaccgtgacagattttacgtcagtaggtgacatttactagcaactcgacggtaagtaatccaactcgacggtaagtactccaactcgacggtaagtaattcacttaccgtcgagttaaaaaatctcttaattttaatttattttttgaaagaataaagaaaactaacgaattatttattaatattgaaacttatggtacaatttgttaaattatttaatgaaatcccacttgtttgggctgtggtttcacttctaacagaaactcctgcagaatcgcatacattagtagtattactagtattgcacaatattttttcggcaaaatctattttattttgaagagaatcttctacatagctttctgccactgtcgatgaacgccaacctccatgacgctttaatccgaggacatcaacacctttattagccaaaagcgttgctgatgtcctcctgaacgaatggccagtatagttctcgggattaggcaaatttaagaatttggcaatttgagaaggccagcccccgattgtccctttccctattacttgagcacaacattttcctttggcgtatcttaagaacaaatgatttgattttacttgtaatggacgaagttttatatacttttgcagaatttctaaatatgaatttatcatctggtttattaacgactgtaaaagtcgctggatgttcgtttttgtattgggtacttttatagtcattaaaccatcggtttgttggatgtcattcatagtaa

SEQ ID NO: 468 - DNA, 1548 bp, Diabrotica virgifera
gtagttaccaaaattgtatcttttagaaacagaaacctaaatcctttttcttataattggaccgcgttatgtaataacggattaaccgccaaaagtccaaaatcgagataatagtgccatcttgcagctagggtgcaaatctatgtataaaaatatgttttttgtaaaaaaattaaaaaaaaagctgtttttaaatgcctgtattaagcgacattttttattttcttaaaaaaaatctcacactaggatttgtaatatcgaactaaacgccaataatggtacataatccattgtcataaacaaaaatccgcatctttgtaagtgtaataacgaatcaagcgccacgaatagtcggttaattctttattacaaaacataacatatttactaacgttaaagatatcgaattaaaagacatcctttgtcaggtaacatcagattaagcgccaaatatgtctcttaatccggtattcggatcttaactcatgcatatcttaaaaaatcattaacgaattaagcgacatttgatcgaataacttttaaaatataaattatttttaaaaaattttaaacacatgtaaaagtctatttacatttgccttaatgtattaaatatgaaacatgtcagtactatattttagaaatagtaccaaaaacaaatttaaaatctttaaaccgatttatctcaaaactacattttggcgcttaatccgctattacataacgcggtccagttgacgttagcgctaccagtagtagaatcatcacgaatcacgaaacgtaaacataaatatttcaccattgggatcatgatgatggttcatttcttattgttattatgaatagagtaccttaagttaacaatttcttatattaagttaaaaaaatatattatatatttattctgcatgtatctaggtatgcctagaaacccaagtcttagtaattaaatgtaaaaaataagtcattttaataattgttttgtactatattataagttatattaggcaatggtttgtaacatatttatttttaaagacaataataattatgtgtaggtataagtaatggattttgggaagagctatgacctcgaaaacatcacaaagaatataactaaatatctcttttcttactcagactctttcaagtcttttgcaatatttcagaatctaaaatatttactaatattactaaagtattggattttgacaaaaactatgaattatgccgatttagttgatacctacacaagtttatgtgaaattttcaaagtcatagctcgtcccaaaatccattaggtacctatacaattgtttgtattggtaacagtcaatctatgaaattttataggtgtgtaaatacaaaaataaatatttaaacatataaaataaaatatatttaaagacaagtaaataattggtggtattgatatttattccgtgttatattcccaatttattttcttaattatggtgttattactagtaattttgaaatggtccagcaatgcaattattgtgatgttatataataaatataagtata

SEQ ID NO: 469 - DNA, 1358 bp, Diabrotica virgifera
ttttgcagaatttctatatatggaattttatcgtctggtttattaacgactgtaaaagtacgctggatgttcgtttttgtattaggtacttttacaatcattaaaccatcggtttgttggatgtcattcatagtaatattatataattcttctcttctacaggcaccagatattcccagtatcattgcgacctacaatttatgaaaaaaatcttcattagagtatttcttttacctaaactagcttatattaccttgtgaactagaaattcttcatccggtgcttccatcagaaatttttcaaattgctcccgtgtaaaaatgctcgctttcttaggcctatagccaacattttttctcttcaaatacgcgatcaaagttgaaaacttggaaatatcaatgccatcataaagaaaaacggtggatttaatcattgaatattctgcccagaggcttccaggagctttcaactgcatatgtctttgaacgaaatatgccaatagagtcttttcttcgattcttaaattcttgccttcgcaccattttttaaaactttggtaggtattttgataacggattttggatttttcgggaataattgcggaacacccttcttcccaagcccgttcaatttcttcaaattcactttcgctcatattttaatttataataatcaaaattgtacttaaaattattgacaactaaataaaaactcaattctccattgttgttatgcaccctagttactacctaacaaccaaagtatctatcttgataaaatgaatgaaactagtcaatatgacgaaaatgtttaattttataatttataatggtatcaatcgtgcaaaaaacgttataagcatgtcgaacgttaagggtaaccgatctcagacaataattggagtcgtcgctccgctcctcctccaaacaattgtcttcgatcggtataaaacccttaccgttctccatacttaatatactattactaaaatttacatttggcaacccggcagttttatttattttcacatagcgaagatatttaaaattgtaaacacaaacagtcatatcataattacctgtaacccaagaatacatcgtattgttttatttattatatttggtattgtcatgatatttcgatcgcgagtatcattattaattaccaatagtgtacaattagtgcaagatttacaccaaggcgatttaccttgaagattaaggatttatagacggtttcaaacaaaatcttcagagaacccgaatttttgtgtagtgttgtgtgcagataaagcttgttttaccagaaatggtgtgtttaactttcataattgccaaaagtatgaatttatgggctgg

SEQ ID NO: 470 - DNA, 10049 bp, Diabrotica virgifera
  SmartBlast Evalue=0; Info="ABC transporter, putative n=1 Tax= Pediculus humanus corporis RepID=E0W387_PEDHC"
cacaaatacgaatagataggcaatcacaatcttcgagagtacttactggttcagtcgctgacagtccgcgaatttcaatccgcaccatggaggcagttctgcacgagagtacttttgtagggcaatctaaagacgccgccgccgttgtcaaatcgaacggggtcaacggcgattcagtgaatttttccgtaaaggtgaatcttaaccaagaaaagactttgatttgtgacgatggtactaatggcaaaatgtgccaaaatacggtggacttggagtttcaaaatattagttttcgtgcgacgcaagggaatatatttaccaaaaggactacaaaagaaattttgcatcaagtcggaggacgtttccagcccgggcagctgatagccataatggggccatcgggtgcaggcaaaagtacattattggatgttttgagtgggtataggatacgtggcgtaacaggttcagtatacgttaacggccaaccaagaagtttaaaggaattcaggaaaacgtcatgttacattacgcaagatgaccgtctgcagcctttactcactgtggacgaaaatatgtgggtagctgcagatttgaaactaccttccagtgtcagcaacagtaataaacggagtataattaacaatattttaaaaacactaaatcttgaaaatacaaaaaaagtgagagcagctggtctttccggtggacagaaaaagaggttgtcaatagctttagagttagtaaataatccaatggtcatgttcttggatgaaccaaccacgggattggatagttcgtcttgttcaacatgtataacactacttaagaaactaactatgcaaggaaaaacaatcatatgtaccattcaccagccttcagctactttatttgcaatgtttgatcaggtgtacgtagtaggaaatgggtactgcctatatcaaggtagtacgaataaactggttccatttttgcaagactgtgggtttccctgtccgcagtatcacaatcctgctgactacgtaatagaactagcatgtattgagcacggacctgagaaacctgaatatatgagggatataattcagaacggacaatcttaccaatattttaacgagcctgaaaagatgaaaagcaccatttgtaactacccaggtcccaaacctattaaacgagttgttagcagtgatgaatcctcttttcccacatcacaattccatcaactaggagttcttatgagacggggatttattaaagcctacagagataagatgcttacctaccttcgtattggaacaaacataatagttggactgatgttgggcagcctctattggaaagctggaagtgatggatctaaagttttggataattttaatttattgtttgcgatattattgcaccatatgatgtccacaatgatgttgacgattttaacatttccccaggaaatgtcgattttaataaaagaacacttcaaccgttggtattcattaaaaatgtattacacatcggtaaccatagtggatattccggtttcggttattggctgcttcctgttttcactcataatatactatatgacagatcaaccaaacgataaagccagattcctgatattcttcgtcacttgcatgttggtagttctagtagctcaaggagttggtctaactattggcgcatattttgatgttgtgaacggaacttttgttggaccaaccctgatggtacccatgatgatgttctccggttttggcgttcgtctacgtgatctgccgaccataatgtactacggcagttttacttcttacttaaggtacggcttggaaggagtagtccaggcggtgtacggaatggacaggggtattcttcaatgtcccgaagacaaattttgcttctacaagtatccgaagactttcctggaaatagtagatgtcaggtcggatcagttcgataatgacatcattgctttactgcttttcttgtttgttttgagaattgcggcgtacgtagtgctgaggtacaaactggcatctgtgcgatagagcctgtttatgttttaataacttttattagaagtaggtgattgaagcctcggttttggtaaacagtgttgttagaaggacatttatttaaattttactcaaaaaaatatttttttttctttagaaaacatcattttttgtgacaatcaaaggaacttagagaaaatttacaataatgtttttaaaattttccaaagattatgatttattaaaagataaaagtatgagatcgtcactcagtacagtggttcccaagtagcaatttttcgacgcattggttgtcagtacaaacaaatgcactgtctacaactttgcccgagagcattttcagttgtttcggccaacgtcccctaccccgactgacattacgatgttacaacctgtagttatacgggcaactaatttattaccattttgacaactacatatcacaattcagttttttcaacaatcgcaacgacttaaaaatgttataatgctaaactaattattatatattttattttgatagaaattttggatttatttaacaacctgtttatttgtttttttaatagctggtttccattccattgttttatcagtagatttgagatttgataaccacctttgtatctgctttggtagacagggttgccaggtcagttttaactctttcagtagttttgttttcacaaaatcagtagattctttttaggccatgtaaatatacagtaatacagtgatatgcacatccgtcttaaatgtcccaagagcaattccacaaaattggaaacctaattattccaaaccaccaactggtaattatcattttttagctaaaatctactaaatcaaaaactaaaatatacttaagtattttgggatatatttgggattttttataataaaaacaacagctaacttaaggggataggcgcaaaatgtcgtctgttaaaatgttcaatgtattttaaatgttttcgttttttgcgaatccttagaaaactaataagtatttttgaaaaatttaaacgcacaaagaaagattacttaccaaggaccgaaagtccctgaaaacttctataatgtttattttaatacgttacaggggtgaaaaaagaaaaaatttagtgacttttaattccaaatatctcgttcaaaagaaacgttttggtttttctaaataatgcagtctttcattctgcgtttaaatttttcaaaaagacgtattatagtttcctcatgattcgaaaaaaatggatcaaattctgttgaaatataccaaaaatctactaaaaatattgcctactagaattttttaaaaaatatcaaaaatctaccaaaaaagtagaaatctactaaatgtggcaacgctgttaatgagaatgatacacttttgacactggtcacatgacctctgtcacccaataagagggtgcgttctaaaatggttttgatagtcggcgcggccgggtttggttggcgattggacttctaagttgtcttatccgtctaaggttggtaataaggtattttttagtaatattggtaatattgtttaatgcgccattttggttttacttgagatttttgggatgtaaagaaaatgaaaacacagaatataaaaaatgcaggcattttctgataactttaaaagcaccatcaatacattaaatttatacagaacatctttaacataaattttgacttttatattaaaatttgattttttaaatttgcatattttttgtcaaaaatgtcataaaaaaagcagcgcgtgtgttttttaaaggtgaaatatccatatttgacggtaatctgagatgcgtttataaatttcacatctggtaataagtcctttatgtatttatatcatataaatttaaatacccaatacgatgtcaaaacagtttactttttggttttcgcattcaccatacagttgttaaaaatataggtaaaaaaacataactagtctgactccttgagcaaccattgcacgcgcaggtgctttttatagtcgcttcagttgtcttatgcaacggttacgaaacgatgttgcttaaacaggaggttgcctaggcaacgtcaagacaactcaaaaatcgtccaccaaatcagtgcagaatagggtcgtcttttaggcaataacaacgttgtaagaaaacgttgccacgcggtagacaacgttgtcgcctcgacaaattgctacttgggttatacctattaatgagccaattctgtaaaaatcatgaactctcatacaattttggtagtacctagtgcaattaaaagtgaaataagaaatataatttcatacttacgttatgatattatccgttatggtatgtaggtactccattcaaatgttacatttagggttgcatttcttagaggagtcaatattattatttttttaatgtgtatggcggttcagtagaagcttaagttcaagtttttggggtcgccacccttgtcccccggccgccatcttggaaaaaggggtgcaaaggacgttcgcgctgtatctcctaaactagcaaccctacagaaaatttaattagaaataaaatgtagcaaattaaattttctacaattttatatttattactttttatcgtcaagtgatatacaaaaaagttataaaataaacaaaaataagaaaaaaatttgtaagaagtttccttttggaggttataacttttttccgttcatttcacaataaaataatatcattgcgattttatggaggatttctcaacgaacaatttccactatttataaagttgtttaattttacttatttatctgggctttacagcgctccaaacttgactagattctcgaaatctcataggaatacacagacaatttctagacaaaataatatttaatattatatgttgaaatagatctatcaaaggttattatttttttatggtcaaggcttcaagttaagatctgaatcagtatccgaggtgaatttttgtggtatagtgagagttagagagttagtgttagcgtcattgtcggtaattcatctttttcatcaataattaatgttgatatgtccaccccacataacaatttcatgttcttagtagattcatagaacatacttttcagaaaaagtatatactaagaatatgcgtaattaccattgcgaatgtgcagagcacatactgagtatatactacattacagtacttaaacgttctatgtatatacttagaatgtactaccgcacttcttctcagtatataccaagaatatactttttaggatattctaagaaggtgctataaaccttctatttatatacttagaatgtactacctcacatcttttagtatataggaagaatgtactttttagtatatgggaagaatattacaaggaagtgctatattgctcagaagcatgttttcagcatcaccgaatctcatcctaggttctactttctactaaatttacatattacatatgagaatgtagttagtacattctacaatattacttaaaaagtaaatataaaatattatataaattttagttagttatatcaatattatataggtaagtaggtatatatatttagttattatgtgcatataaaaataaaaatgctgaatatataaatttatatattcatattcatatacctatcgtacccaaataaatattatgtaacatatgtatgtaaataactaaaatttatatgttgcttatatgtacctatatacatacttactatttaagtaatattgaagtaccaaaatgaattttttatttgtaagttgacagcaaacaaaataaaacgtttaattatgcatgttcctattcctggttgaaatacttggtcttcctcacaacacagcatagacattgttagtgttaagtgtagacacaaatgccaaatgcctattcagtaactattttcatattttgtatttttcctttgttcccaaccccctacccgctaacccctatgcaggtatgcagcggtcgtttccgctttgtttgtgccggttgtgggttttggctcagccacacagcttacctgaatgtcaattccatgtaaaaataaaattcttcataagaatactcaataaacttaatcaaaatagtaaatgcatttcagttatgaaagcgaaacgacaatttctcctttttcgttaatacaattaattcttaaacatttttaccatacaattaaaacaattttaaataatgaattcggtagtttaattaatagtacctacatacataaatttttaaatttcattaattattcttaacgaagttgataatctataggctaacattattcttcctatacatacatatatattatttttaagatattttaaaagtatctacttataagtatgtgttaagtatgtacttataagtatgtgctaagaatattcggtaaaagtatattctgagaatagtatctacttataagtatgtgttaagaatgtacttataagtatgtgctaagaatattcggtaaaggtacattctaagaataaacttttacgaatattccgagttactacgtacacgaatgtactcagtatattcggtacgagaatatactttaaagtatgtgcaaagaacatgaaatttagaatgttttttaaggtacatgctatgcttgtactacgcatatactaaaaagaatatactctgacgaatgttggtagtatatgcttagaacatgatacgaacatcattgttatgtgggacgatgttgctgcaactttcaccaccacaatggaaacacactgctgaacatttgcatttgagatctgcttttcatcaaccacatgcacttccagtttccattgcatctgcaaaaggtgaatttaataagctcgggggtactggaggcttagaagtttggattagtatccaaaatttcccatgctttttccagtcccaatcttctggatcacaatgtttaccgagccatgactgaatctggtgatacactcggagtctttggaaacggactgcatcttgtgttggaggaagtgcgaagagattaaatgcattgttttcactgttttagcgaattgtttttatctccgggtttttagagattcgtctttatttccgccatataaagaggcgataaacgttcgtcgaccccaaaacttgaacttgagcttctactgataccccctacacattgaaaaaaaataaaattgactgctctaataaatgcaacgtatgccctaaaaaatgtaacatatcaatggactaatggtaaaagttgaacaaatacttcctagaactgcagaagaatctttcttacttactccacaaaccaattcaaaaagtactacgttaagagtgtatgaagagtatttcatataaatttccaacaaaaaatctagtcattttacccaattaggtaaatacatttttgtcatttttggcatttctctgattttggattgtcgtttcgtttcgatagggcttttcatcgattgtcatttgtttcgagcttctgtcatgtgttgtataatgtgtgtataatattaatatacacggattatatgacacatgacagaggctcgacacaaatgactgagaatgaaaagccctattctcactgccttaaatgaaacacagctcataatattttttataggaagttattgccataccacaaagtacaggcttcgtctgcagatatttttatggtaatagttttaacaattactcttatatcatggtataggttgtctggctctaaacagtgtcgtgtttattcttaagtatataaagaatgtttcatttaagtaatttttaaactttgctgtgatattgtattaccattttcttgttcatatagcatcatgattctagaagtagatatgcgcttggctatttattattcaatattgcgcttgggatatgatgtttagaactatcctcttttattaggcaaaaaatgcctaataaacattaggcaactcaacatttatcttctttatgacgtcactgacaattgacgttagcgctaccagtagtagaatcatcacgaatcacgaaacgtaaacataaatatttcaccattgggatcatgatgatggttcatttcttattgttattatgaatagagtaccttaagttaacaatttcttatattaagttaaaaaaatatattatatatttattctgcatgtatctaggtatgcctagaaacccaagtcttagtaattaaatgtaaaaaataagtcattttaataattgttttgtactatattataagttatattaggcaatggtttgtaacatatttatttttaaagacaataataattatgtgtaggtataagtaatggattttgggaagagctatgacctcgaaaacatcacaaagaatataactaaatatctcttttcttactcagactctttcaagtcttttgcaatatttcagaatctaaaatatttactaatattactaaagtattggattttgacaaaaactatgaattatgccgatttagttgatacctacacaagtttatgtgaaattttcaaagtcatagctcgtcccaaaatccattaggtacctatacaattgtttgtattggtaacagtcaatctatgaaattttataggtgtgtaaatacaaaaataaatatttaaacatataaaataaaatatattttttgcacgattgatcatttttgactgtttaccgtgacagattttacgtcagtaggtgacatttactagcaactcgacggtaagtaatccaactcgacggtaagtactccaactcgacggtaagtaattcacttaccgtcgagttaaaaaatctcttaattttaatttattttttgaaagaataaagaaaactaacgaattatttattaatattgaaacttatggtacaatttgttaaattatttaatgaaatcccacttgtttgggctgtggtttcacttctaacagaaactcctgcagaatcgcatacattagtagtatccaacattttttctcttcaaatacgcgatcaaagttgaaaacttggaaatatcaatgccatcataaagaaaaacggtggatttaatcattgaatattctgcccagaggcttccaggagctttcaactgcatatgtctttgaacgaaatatgccaatagagtcttttcttcgattcttaaattcttgccttcgcaccattttttaaaactttggtaggtattttgataacggattttggatttttcgggaataattgcggaacacccttcttcccaagcccgttcaatttcttcaaattcactttcgctcatattttaatttataataatcaaaattgtacttaaaattattgacaactaaataaaaactcaattctccattgttgttatgcaccctagttactacctaacaaccaaagtatctatcttgataaaatgaatgaaactagtcaatatgacgaaaatgtttaattttataatttataatggtatcaatcgtgcaaaaaacgttataagcatgtcgaacgttaagggtaaccgatctcagacaataattggagtcgtcgctccgctcctcctccaaacaattgtcttcgatcggtataaaacccttaccgttctccatacttaatatactattactaaaatttacatttggcaacccggcagttttatttattttcacatagcgaagatatttaaaattgtaaacacaaacagtcatatcataattacctgtaacccaagaatacatcgtattgttttatttattatatttggtattgtcatgatatttcgatcgcgagtatcattattaattaccaatagtgtacaattagtgcaagatttacaccaaggcgatttaccttgaagattaaggatttatagacggtttcaaacaaaatcttcagagaacccgaatttttgtgtagtgttgtgtgcagataaagcttgttttaccagaaatggtgtgtttaactttcataattgccaaaagtatgaatttatgggctgg

SEQ ID NO: 471 - DNA, 9903 bp, Diabrotica virgifera
  SmartBlast Evalue=0; Info="ABC transporter, putative n=1 Tax= Pediculus humanus corporis RepID=E0W387_PEDHC"
cacaaatacgaatagataggcaatcacaatcttcgagagtacttactggttcagtcgctgacagtccgcgaatttcaatccgcaccatggaggcagttctgcacgagagtacttttgtagggcaatctaaagacgccgccgccgttgtcaaatcgaacggggtcaacggcgattcagtgaatttttccgtaaaggtgaatcttaaccaagaaaagactttgatttgtgacgatggtactaatggcaaaatgtgccaaaatacggtggacttggagtttcaaaatattagttttcgtgcgacgcaagggaatatatttaccaaaaggactacaaaagaaattttgcatcaagtcggaggacgtttccagcccgggcagctgatagccataatggggccatcgggtgcaggcaaaagtacattattggatgttttgagtgggtataggatacgtggcgtaacaggttcagtatacgttaacggccaaccaagaagtttaaaggaattcaggaaaacgtcatgttacattacgcaagatgaccgtctgcagcctttactcactgtggacgaaaatatgtgggtagctgcagatttgaaactaccttccagtgtcagcaacagtaataaacggagtataattaacaatattttaaaaacactaaatcttgaaaatacaaaaaaagtgagagcagctggtctttccggtggacagaaaaagaggttgtcaatagctttagagttagtaaataatccaatggtcatgttcttggatgaaccaaccacgggattggatagttcgtcttgttcaacatgtataacactacttaagaaactaactatgcaaggaaaaacaatcatatgtaccattcaccagccttcagctactttatttgcaatgtttgatcaggtgtacgtagtaggaaatgggtactgcctatatcaaggtagtacgaataaactggttccatttttgcaagactgtgggtttccctgtccgcagtatcacaatcctgctgactacgtaatagaactagcatgtattgagcacggacctgagaaacctgaatatatgagggatataattcagaacggacaatcttaccaatattttaacgagcctgaaaagatgaaaagcaccatttgtaactacccaggtcccaaacctattaaacgagttgttagcagtgatgaatcctcttttcccacatcacaattccatcaactaggagttcttatgagacggggatttattaaagcctacagagataagatgcttacctaccttcgtattggaacaaacataatagttggactgatgttgggcagcctctattggaaagctggaagtgatggatctaaagttttggataattttaatttattgtttgcgatattattgcaccatatgatgtccacaatgatgttgacgattttaacatttccccaggaaatgtcgattttaataaaagaacacttcaaccgttggtattcattaaaaatgtattacacatcggtaaccatagtggatattccggtttcggttattggctgcttcctgttttcactcataatatactatatgacagatcaaccaaacgataaagccagattcctgatattcttcgtcacttgcatgttggtagttctagtagctcaaggagttggtctaactattggcgcatattttgatgttgtgaacggaacttttgttggaccaaccctgatggtacccatgatgatgttctccggttttggcgttcgtctacgtgatctgccgaccataatgtactacggcagttttacttcttacttaaggtacggcttggaaggagtagtccaggcggtgtacggaatggacaggggtattcttcaatgtcccgaagacaaattttgcttctacaagtatccgaagactttcctggaaatagtagatgtcaggtcggatcagttcgataatgacatcattgctttactgcttttcttgtttgttttgagaattgcggcgtacgtagtgctgaggtacaaactggcatctgtgcgatagagcctgtttatgttttaataacttttattagaagtaggtgattgaagcctcggttttggtaaacagtgttgttagaaggacatttatttaaattttactcaaaaaaatatttttttttctttagaaaacatcattttttgtgacaatcaaaggaacttagagaaaatttacaataatgtttttaaaattttccaaagattatgatttattaaaagataaaagtatgagatcgtcactcagtacagtggttcccaagtagcaatttttcgacgcattggttgtcagtacaaacaaatgcactgtctacaactttgcccgagagcattttcagttgtttcggccaacgtcccctaccccgactgacattacgatgttacaacctgtagttatacgggcaactaatttattaccattttgacaactacatatcacaattcagttttttcaacaatcgcaacgacttaaaaatgttataatgctaaactaattattatatattttattttgatagaaattttggatttatttaacaacctgtttatttgtttttttaatagctggtttccattccattgttttatcagtagatttgagatttgataaccacctttgtatctgctttggtagacagggttgccaggtcagttttaactctttcagtagttttgttttcacaaaatcagtagattctttttaggccatgtaaatatacagtaatacagtgatatgcacatccgtcttaaatgtcccaagagcaattccacaaaattggaaacctaattattccaaaccaccaactggtaattatcattttttagctaaaatctactaaatcaaaaactaaaatatacttaagtattttgggatatatttgggattttttataataaaaacaacagctaacttaaggggataggcgcaaaatgtcgtctgttaaaatgttcaatgtattttaaatgttttcgttttttgcgaatccttagaaaactaataagtatttttgaaaaatttaaacgcacaaagaaagattacttaccaaggaccgaaagtccctgaaaacttctataatgtttattttaatacgttacaggggtgaaaaaagaaaaaatttagtgacttttaattccaaatatctcgttcaaaagaaacgttttggtttttctaaataatgcagtctttcattctgcgtttaaatttttcaaaaagacgtattatagtttcctcatgattcgaaaaaaatggatcaaattctgttgaaatataccaaaaatctactaaaaatattgcctactagaattttttaaaaaatatcaaaaatctaccaaaaaagtagaaatctactaaatgtggcaacgctgttaatgagaatgatacacttttgacactggtcacatgacctctgtcacccaataagagggtgcgttctaaaatggttttgatagtcggcgcggccgggtttggttggcgattggacttctaagttgtcttatccgtctaaggttggtaataaggtattttttagtaatattggtaatattgtttaatgcgccattttggttttacttgagatttttgggatgtaaagaaaatgaaaacacagaatataaaaaatgcaggcattttctgataactttaaaagcaccatcaatacattaaatttatacagaacatctttaacataaattttgacttttatattaaaatttgattttttaaatttgcatattttttgtcaaaaatgtcataaaaaaagcagcgcgtgtgttttttaaaggtgaaatatccatatttgacggtaatctgagatgcgtttataaatttcacatctggtaataagtcctttatgtatttatatcatataaatttaaatacccaatacgatgtcaaaacagtttactttttggttttcgcattcaccatacagttgttaaaaatataggtaaaaaaacataactagtctgactccttgagcaaccattgcacgcgcaggtgctttttatagtcgcttcagttgtcttatgcaacggttacgaaacgatgttgcttaaacaggaggttgcctaggcaacgtcaagacaactcaaaaatcgtccaccaaatcagtgcagaatagggtcgtcttttaggcaataacaacgttgtaagaaaacgttgccacgcggtagacaacgttgtcgcctcgacaaattgctacttgggttatacctattaatgagccaattctgtaaaaatcatgaactctcatacaattttggtagtacctagtgcaattaaaagtgaaataagaaatataatttcatacttacgttatgatattatccgttatggtatgtaggtactccattcaaatgttacatttagggttgcatttcttagaggagtcaatattattatttttttaatgtgtatggcggttcagtagaagcttaagttcaagtttttggggtcgccacccttgtcccccggccgccatcttggaaaaaggggtgcaaaggacgttcgcgctgtatctcctaaactagcaaccctacagaaaatttaattagaaataaaatgtagcaaattaaattttctacaattttatatttattactttttatcgtcaagtgatatacaaaaaagttataaaataaacaaaaataagaaaaaaatttgtaagaagtttccttttggaggttataacttttttccgttcatttcacaataaaataatatcattgcgattttatggaggatttctcaacgaacaatttccactatttataaagttgtttaattttacttatttatctgggctttacagcgctccaaacttgactagattctcgaaatctcataggaatacacagacaatttctagacaaaataatatttaatattatatgttgaaatagatctatcaaaggttattatttttttatggtcaaggcttcaagttaagatctgaatcagtatccgaggtgaatttttgtggtatagtgagagttagagagttagtgttagcgtcattgtcggtaattcatctttttcatcaataattaatgttgatatgtccaccccacataacaatttcatgttcttagtagattcatagaacatacttttcagaaaaagtatatactaagaatatgcgtaattaccattgcgaatgtgcagagcacatactgagtatatactacattacagtacttaaacgttctatgtatatacttagaatgtactaccgcacttcttctcagtatataccaagaatatactttttaggatattctaagaaggtgctataaaccttctatttatatacttagaatgtactacctcacatcttttagtatataggaagaatgtactttttagtatatgggaagaatattacaaggaagtgctatattgctcagaagcatgttttcagcatcaccgaatctcatcctaggttctactttctactaaatttacatattacatatgagaatgtagttagtacattctacaatattacttaaaaagtaaatataaaatattatataaattttagttagttatatcaatattatataggtaagtaggtatatatatttagttattatgtgcatataaaaataaaaatgctgaatatataaatttatatattcatattcatatacctatcgtacccaaataaatattatgtaacatatgtatgtaaataactaaaatttatatgttgcttatatgtacctatatacatacttactatttaagtaatattgaagtaccaaaatgaattttttatttgtaagttgacagcaaacaaaataaaacgtttaattatgcatgttcctattcctggttgaaatacttggtcttcctcacaacacagcatagacattgttagtgttaagtgtagacacaaatgccaaatgcctattcagtaactattttcatattttgtatttttcctttgttcccaaccccctacccgctaacccctatgcaggtatgcagcggtcgtttccgctttgtttgtgccggttgtgggttttggctcagccacacagcttacctgaatgtcaattccatgtaaaaataaaattcttcataagaatactcaataaacttaatcaaaatagtaaatgcatttcagttatgaaagcgaaacgacaatttctcctttttcgttaatacaattaattcttaaacatttttaccatacaattaaaacaattttaaataatgaattcggtagtttaattaatagtacctacatacataaatttttaaatttcattaattattcttaacgaagttgataatctataggctaacattattcttcctatacatacatatatattatttttaagatattttaaaagtatctacttataagtatgtgttaagtatgtacttataagtatgtgctaagaatattcggtaaaagtatattctgagaatagtatctacttataagtatgtgttaagaatgtacttataagtatgtgctaagaatattcggtaaaggtacattctaagaataaacttttacgaatattccgagttactacgtacacgaatgtactcagtatattcggtacgagaatatactttaaagtatgtgcaaagaacatgaaatttagaatgttttttaaggtacatgctatgcttgtactacgcatatactaaaaagaatatactctgacgaatgttggtagtatatgcttagaacatgatacgaacatcattgttatgtgggacgatgttgctgcaactttcaccaccacaatggaaacacactgctgaacatttgcatttgagatctgcttttcatcaaccacatgcacttccagtttccattgcatctgcaaaaggtgaatttaataagctcgggggtactggaggcttagaagtttggattagtatccaaaatttcccatgctttttccagtcccaatcttctggatcacaatgtttaccgagccatgactgaatctggtgatacactcggagtctttggaaacggactgcatcttgtgttggaggaagtgcgaagagattaaatgcattgttttcactgttttagcgaattgtttttatctccgggtttttagagattcgtctttatttccgccatataaagaggcgataaacgttcgtcgaccccaaaacttgaacttgagcttctactgataccccctacacattgaaaaaaaataaaattgactgctctaataaatgcaacgtatgccctaaaaaatgtaacatatcaatggactaatggtaaaagttgaacaaatacttcctagaactgcagaagaatctttcttacttactccacaaaccaattcaaaaagtactacgttaagagtgtatgaagagtatttcatataaatttccaacaaaaaatctagtcattttacccaattaggtaaatacatttttgtcatttttggcatttctctgattttggattgtcgtttcgtttcgatagggcttttcatcgattgtcatttgtttcgagcttctgtcatgtgttgtataatgtgtgtataatattaatatacacggattatatgacacatgacagaggctcgacacaaatgactgagaatgaaaagccctattctcactgccttaaatgaaacacagctcataatattttttataggaagttattgccataccacaaagtacaggcttcgtctgcagatatttttatggtaatagttttaacaattactcttatatcatggtataggttgtctggctctaaacagtgtcgtgtttattcttaagtatataaagaatgtttcatttaagtaatttttaaactttgctgtgatattgtattaccattttcttgttcatatagcatcatgattctagaagtagatatgcgcttggctatttattattcaatattgcgcttgggatatgatgtttagaactatcctcttttattaggcaaaaaatgcctaataaacattaggcaactcaacatttatcttctttatgacgtcactgacaattgacgttagcgctaccagtagtagaatcatcacgaatcacgaaacgtaaacataaatatttcaccattgggatcatgatgatggttcatttcttattgttattatgaatagagtaccttaagttaacaatttcttatattaagttaaaaaaatatattatatatttattctgcatgtatctaggtatgcctagaaacccaagtcttagtaattaaatgtaaaaaataagtcattttaataattgttttgtactatattataagttatattaggcaatggtttgtaacatatttatttttaaagacaataataattatgtgtaggtataagtaatggattttgggaagagctatgacctcgaaaacatcacaaagaatataactaaatatctcttttcttactcagactctttcaagtcttttgcaatatttcagaatctaaaatatttactaatattactaaagtattggattttgacaaaaactatgaattatgccgatttagttgatacctacacaagtttatgtgaaattttcaaagtcatagctcgtcccaaaatccattaggtacctatacaattgtttgtattggtaacagtcaatctatgaaattttataggtgtgtaaatacaaaaataaatatttaaacatataaaataaaatatattttttgcacgattgatcatttttgactgtttaccgtgacagattttacgtcagtaggtgacatttactagcaactcgacggtaagtaatccaactcgacggtaagtactccaactcgacggtaagtaattcacttaccgtcgagttaaaaaatctcttaattttaatttattttttgaaagaataaagaaaactaacgaattatttattaatattgaaacttatggtacaatttgttaaattatttaatgaaatcccacttgtttgggctgtggtttcacttctaacagaaactcctgcagaatcgcatacattagtagtattactagtattgcacaatattttttcggcaaaatctattttattttgaagagaatcttctacatagctttctgccactgtcgatgaacgccaacctccatgacgctttaatccgaggacatcaacacctttattagccaaaagcgttgctgatgtcctcctgaacgaatggccagtatagttctcgggattaggcaaatttaagaatttggcaatttgagaaggccagcccccgattgtccctttccctattacttgagcacaacattttcctttggcgtatcttaagaacaaatgatttgattttacttgtaatggacgaagttttatatactttataatggtatcaatcgtgcaaaaaacgttataagcatgtcgaacgttaagggtaaccgatctcagacaataattggagtcgtcgctccgctcctcctccaaacaattgtcttcgatcggtataaaacccttaccgttctccatacttaatatactattactaaaatttacatttggcaacccggcagttttatttattttcacatagcgaagatatttaaaattgtaaacacaaacagtcatatcataattacctgtaacccaagaatacatcgtattgttttatttattatatttggtattgtcatgatatttcgatcgcgagtatcattattaattaccaatagtgtacaattagtgcaagatttacaccaaggcgatttaccttgaagattaaggatttatagacggtttcaaacaaaatcttcagagaacccgaatttttgtgtagtgttgtgtgcagataaagcttgttttaccagaaatggtgtgtttaactttcataattgccaaaagtatgaatttatgggctgg

SEQ ID NO: 472 - DNA, 9501 bp, Diabrotica virgifera
  SmartBlast Evalue=0; Info="ABC transporter, putative n=1 Tax= Pediculus humanus corporis RepID=E0W387_PEDHC"
cacaaatacgaatagataggcaatcacaatcttcgagagtacttactggttcagtcgctgacagtccgcgaatttcaatccgcaccatggaggcagttctgcacgagagtacttttgtagggcaatctaaagacgccgccgccgttgtcaaatcgaacggggtcaacggcgattcagtgaatttttccgtaaaggtgaatcttaaccaagaaaagactttgatttgtgacgatggtactaatggcaaaatgtgccaaaatacggtggacttggagtttcaaaatattagttttcgtgcgacgcaagggaatatatttaccaaaaggactacaaaagaaattttgcatcaagtcggaggacgtttccagcccgggcagctgatagccataatggggccatcgggtgcaggcaaaagtacattattggatgttttgagtgggtataggatacgtggcgtaacaggttcagtatacgttaacggccaaccaagaagtttaaaggaattcaggaaaacgtcatgttacattacgcaagatgaccgtctgcagcctttactcactgtggacgaaaatatgtgggtagctgcagatttgaaactaccttccagtgtcagcaacagtaataaacggagtataattaacaatattttaaaaacactaaatcttgaaaatacaaaaaaagtgagagcagctggtctttccggtggacagaaaaagaggttgtcaatagctttagagttagtaaataatccaatggtcatgttcttggatgaaccaaccacgggattggatagttcgtcttgttcaacatgtataacactacttaagaaactaactatgcaaggaaaaacaatcatatgtaccattcaccagccttcagctactttatttgcaatgtttgatcaggtgtacgtagtaggaaatgggtactgcctatatcaaggtagtacgaataaactggttccatttttgcaagactgtgggtttccctgtccgcagtatcacaatcctgctgactacgtaatagaactagcatgtattgagcacggacctgagaaacctgaatatatgagggatataattcagaacggacaatcttaccaatattttaacgagcctgaaaagatgaaaagcaccatttgtaactacccaggtcccaaacctattaaacgagttgttagcagtgatgaatcctcttttcccacatcacaattccatcaactaggagttcttatgagacggggatttattaaagcctacagagataagatgcttacctaccttcgtattggaacaaacataatagttggactgatgttgggcagcctctattggaaagctggaagtgatggatctaaagttttggataattttaatttattgtttgcgatattattgcaccatatgatgtccacaatgatgttgacgattttaacatttccccaggaaatgtcgattttaataaaagaacacttcaaccgttggtattcattaaaaatgtattacacatcggtaaccatagtggatattccggtttcggttattggctgcttcctgttttcactcataatatactatatgacagatcaaccaaacgataaagccagattcctgatattcttcgtcacttgcatgttggtagttctagtagctcaaggagttggtctaactattggcgcatattttgatgttgtgaacggaacttttgttggaccaaccctgatggtacccatgatgatgttctccggttttggcgttcgtctacgtgatctgccgaccataatgtactacggcagttttacttcttacttaaggtacggcttggaaggagtagtccaggcggtgtacggaatggacaggggtattcttcaatgtcccgaagacaaattttgcttctacaagtatccgaagactttcctggaaatagtagatgtcaggtcggatcagttcgataatgacatcattgctttactgcttttcttgtttgttttgagaattgcggcgtacgtagtgctgaggtacaaactggcatctgtgcgatagagcctgtttatgttttaataacttttattagaagtaggtgattgaagcctcggttttggtaaacagtgttgttagaaggacatttatttaaattttactcaaaaaaatatttttttttctttagaaaacatcattttttgtgacaatcaaaggaacttagagaaaatttacaataatgtttttaaaattttccaaagattatgatttattaaaagataaaagtatgagatcgtcactcagtacagtggttcccaagtagcaatttttcgacgcattggttgtcagtacaaacaaatgcactgtctacaactttgcccgagagcattttcagttgtttcggccaacgtcccctaccccgactgacattacgatgttacaacctgtagttatacgggcaactaatttattaccattttgacaactacatatcacaattcagttttttcaacaatcgcaacgacttaaaaatgttataatgctaaactaattattatatattttattttgatagaaattttggatttatttaacaacctgtttatttgtttttttaatagctggtttccattccattgttttatcagtagatttgagatttgataaccacctttgtatctgctttggtagacagggttgccaggtcagttttaactctttcagtagttttgttttcacaaaatcagtagattctttttaggccatgtaaatatacagtaatacagtgatatgcacatccgtcttaaatgtcccaagagcaattccacaaaattggaaacctaattattccaaaccaccaactggtaattatcattttttagctaaaatctactaaatcaaaaactaaaatatacttaagtattttgggatatatttgggattttttataataaaaacaacagctaacttaaggggataggcgcaaaatgtcgtctgttaaaatgttcaatgtattttaaatgttttcgttttttgcgaatccttagaaaactaataagtatttttgaaaaatttaaacgcacaaagaaagattacttaccaaggaccgaaagtccctgaaaacttctataatgtttattttaatacgttacaggggtgaaaaaagaaaaaatttagtgacttttaattccaaatatctcgttcaaaagaaacgttttggtttttctaaataatgcagtctttcattctgcgtttaaatttttcaaaaagacgtattatagtttcctcatgattcgaaaaaaatggatcaaattctgttgaaatataccaaaaatctactaaaaatattgcctactagaattttttaaaaaatatcaaaaatctaccaaaaaagtagaaatctactaaatgtggcaacgctgttaatgagaatgatacacttttgacactggtcacatgacctctgtcacccaataagagggtgcgttctaaaatggttttgatagtcggcgcggccgggtttggttggcgattggacttctaagttgtcttatccgtctaaggttggtaataaggtattttttagtaatattggtaatattgtttaatgcgccattttggttttacttgagatttttgggatgtaaagaaaatgaaaacacagaatataaaaaatgcaggcattttctgataactttaaaagcaccatcaatacattaaatttatacagaacatctttaacataaattttgacttttatattaaaatttgattttttaaatttgcatattttttgtcaaaaatgtcataaaaaaagcagcgcgtgtgttttttaaaggtgaaatatccatatttgacggtaatctgagatgcgtttataaatttcacatctggtaataagtcctttatgtatttatatcatataaatttaaatacccaatacgatgtcaaaacagtttactttttggttttcgcattcaccatacagttgttaaaaatataggtaaaaaaacataactagtctgactccttgagcaaccattgcacgcgcaggtgctttttatagtcgcttcagttgtcttatgcaacggttacgaaacgatgttgcttaaacaggaggttgcctaggcaacgtcaagacaactcaaaaatcgtccaccaaatcagtgcagaatagggtcgtcttttaggcaataacaacgttgtaagaaaacgttgccacgcggtagacaacgttgtcgcctcgacaaattgctacttgggttatacctattaatgagccaattctgtaaaaatcatgaactctcatacaattttggtagtacctagtgcaattaaaagtgaaataagaaatataatttcatacttacgttatgatattatccgttatggtatgtaggtactccattcaaatgttacatttagggttgcatttcttagaggagtcaatattattatttttttaatgtgtatggcggttcagtagaagcttaagttcaagtttttggggtcgccacccttgtcccccggccgccatcttggaaaaaggggtgcaaaggacgttcgcgctgtatctcctaaactagcaaccctacagaaaatttaattagaaataaaatgtagcaaattaaattttctacaattttatatttattactttttatcgtcaagtgatatacaaaaaagttataaaataaacaaaaataagaaaaaaatttgtaagaagtttccttttggaggttataacttttttccgttcatttcacaataaaataatatcattgcgattttatggaggatttctcaacgaacaatttccactatttataaagttgtttaattttacttatttatctgggctttacagcgctccaaacttgactagattctcgaaatctcataggaatacacagacaatttctagacaaaataatatttaatattatatgttgaaatagatctatcaaaggttattatttttttatggtcaaggcttcaagttaagatctgaatcagtatccgaggtgaatttttgtggtatagtgagagttagagagttagtgttagcgtcattgtcggtaattcatctttttcatcaataattaatgttgatatgtccaccccacataacaatttcatgttcttagtagattcatagaacatacttttcagaaaaagtatatactaagaatatgcgtaattaccattgcgaatgtgcagagcacatactgagtatatactacattacagtacttaaacgttctatgtatatacttagaatgtactaccgcacttcttctcagtatataccaagaatatactttttaggatattctaagaaggtgctataaaccttctatttatatacttagaatgtactacctcacatcttttagtatataggaagaatgtactttttagtatatgggaagaatattacaaggaagtgctatattgctcagaagcatgttttcagcatcaccgaatctcatcctaggttctactttctactaaatttacatattacatatgagaatgtagttagtacattctacaatattacttaaaaagtaaatataaaatattatataaattttagttagttatatcaatattatataggtaagtaggtatatatatttagttattatgtgcatataaaaataaaaatgctgaatatataaatttatatattcatattcatatacctatcgtacccaaataaatattatgtaacatatgtatgtaaataactaaaatttatatgttgcttatatgtacctatatacatacttactatttaagtaatattgaagtaccaaaatgaattttttatttgtaagttgacagcaaacaaaataaaacgtttaattatgcatgttcctattcctggttgaaatacttggtcttcctcacaacacagcatagacattgttagtgttaagtgtagacacaaatgccaaatgcctattcagtaactattttcatattttgtatttttcctttgttcccaaccccctacccgctaacccctatgcaggtatgcagcggtcgtttccgctttgtttgtgccggttgtgggttttggctcagccacacagcttacctgaatgtcaattccatgtaaaaataaaattcttcataagaatactcaataaacttaatcaaaatagtaaatgcatttcagttatgaaagcgaaacgacaatttctcctttttcgttaatacaattaattcttaaacatttttaccatacaattaaaacaattttaaataatgaattcggtagtttaattaatagtacctacatacataaatttttaaatttcattaattattcttaacgaagttgataatctataggctaacattattcttcctatacatacatatatattatttttaagatattttaaaagtatctacttataagtatgtgttaagtatgtacttataagtatgtgctaagaatattcggtaaaagtatattctgagaatagtatctacttataagtatgtgttaagaatgtacttataagtatgtgctaagaatattcggtaaaggtacattctaagaataaacttttacgaatattccgagttactacgtacacgaatgtactcagtatattcggtacgagaatatactttaaagtatgtgcaaagaacatgaaatttagaatgttttttaaggtacatgctatgcttgtactacgcatatactaaaaagaatatactctgacgaatgttggtagtatatgcttagaacatgatacgaacatcattgttatgtgggacgatgttgctgcaactttcaccaccacaatggaaacacactgctgaacatttgcatttgagatctgcttttcatcaaccacatgcacttccagtttccattgcatctgcaaaaggtgaatttaataagctcgggggtactggaggcttagaagtttggattagtatccaaaatttcccatgctttttccagtcccaatcttctggatcacaatgtttaccgagccatgactgaatctggtgatacactcggagtctttggaaacggactgcatcttgtgttggaggaagtgcgaagagattaaatgcattgttttcactgttttagcgaattgtttttatctccgggtttttagagattcgtctttatttccgccatataaagaggcgataaacgttcgtcgaccccaaaacttgaacttgagcttctactgataccccctacacattgaaaaaaaataaaattgactgctctaataaatgcaacgtatgccctaaaaaatgtaacatatcaatggactaatggtaaaagttgaacaaatacttcctagaactgcagaagaatctttcttacttactccacaaaccaattcaaaaagtactacgttaagagtgtatgaagagtatttcatataaatttccaacaaaaaatctagtcattttacccaattaggtaaatacatttttgtcatttttggcatttctctgattttggattgtcgtttcgtttcgatagggcttttcatcgattgtcatttgtttcgagcttctgtcatgtgttgtataatgtgtgtataatattaatatacacggattatatgacacatgacagaggctcgacacaaatgactgagaatgaaaagccctattctcactgccttaaatgaaacacagctcataatattttttataggaagttattgccataccacaaagtacaggcttcgtctgcagatatttttatggtaatagttttaacaattactcttatatcatggtataggttgtctggctctaaacagtgtcgtgtttattcttaagtatataaagaatgtttcatttaagtaatttttaaactttgctgtgatattgtattaccattttcttgttcatatagcatcatgattgcgcttgggatatgatgtttagaactatcctcttttattaggcaaaaaatgcctaataaacattaggcaactcaacatttatcttctttatgacgtcactgataattggaccgcattatgtaataacggattaaccgccaaaagtccaaaatcgagatattagtgccatcttgcagctagggtgcaaatctctgtataaaaatatgatttttgtaaaaaaattcaaaaaaaagctgtttttaaatgcctgtattaagcgacattttttattttattaaaaaaaaatctcgcactaggatttgtaatatcgaactaaacgccaataatggtacataatccattgtcataaacaaatatccgcatctttgtaagtgtaatattttaattaattctttaattcttattaacttaattctttattacaaaacataacatatttactaacgtttaagatatcgaattaaaagacatcctttgtcaggtaacatcagattaagcgccaaatatgtctcttaatccggtattcggatcttaactcatgcatatcttaaaaaatcattaacgaattaagcgacatttgatcgaataacttttaaaatataaattatttttaaaaaattttaaacacatgtaaaagtctatttacatttgccttaatgtattaaatatgaaacatgtcagtactatattttagaaatagtaccaaaaacaaatttaaaatctttaaaccgatttatctcaaaactacattttggcgcttaatccgctattacataacgcggtccagttgacgttagcgctaccagtagtagaatcatcacgaatcacgaaacgtaaacataaatatttcaccattgggatcatgatgatggttcatttcttattgttattatgaatagagtaccttaagttaacaatttcttatattaagttaaaaaaatatattatatatttattctgcatgtatctaggtatgcctagaaacccaagtcttagtaattaaatgtaaaaaataagtcattttaataattgttttgtactatattataagttatattaggcaatggtttgtaacatatttatttttaaagacaataataattatgtgtaggtataagtaatggattttgggaagagctatgacctcgaaaacatcacaaagaatataactaaatatctcttttcttactcagactctttcaagtcttttgcaatatttcagaatctaaaatatttactaatattactaaagtattggattttgacaaaaactatgaattatgccgatttagttgatacctacacaagtttatgtgaaattttcaaagtcatagctcgtcccaaaatccattaggtacctatacaattgtttgtattggtaacagtcaatctatgaaattttataggtgtgtaaatacaaaaataaatatttaaacatataaaataaaatatatttaaagacaagtaaataattggtggtattgatatttattccgtgttatattcccaatttattttcttaattatggtgttattactagtaattttgaaatggtccagcaatgcaattattgtgatgttatataataaatataagtata

SEQ ID NO: 473 - DNA, 9500 bp, Diabrotica virgifera
  SmartBlast Evalue=0; Info="ABC transporter, putative n=1 Tax= Pediculus humanus corporis RepID=E0W387_PEDHC"
cacaaatacgaatagataggcaatcacaatcttcgagagtacttactggttcagtcgctgacagtccgcgaatttcaatccgcaccatggaggcagttctgcacgagagtacttttgtagggcaatctaaagacgccgccgccgttgtcaaatcgaacggggtcaacggcgattcagtgaatttttccgtaaaggtgaatcttaaccaagaaaagactttgatttgtgacgatggtactaatggcaaaatgtgccaaaatacggtggacttggagtttcaaaatattagttttcgtgcgacgcaagggaatatatttaccaaaaggactacaaaagaaattttgcatcaagtcggaggacgtttccagcccgggcagctgatagccataatggggccatcgggtgcaggcaaaagtacattattggatgttttgagtgggtataggatacgtggcgtaacaggttcagtatacgttaacggccaaccaagaagtttaaaggaattcaggaaaacgtcatgttacattacgcaagatgaccgtctgcagcctttactcactgtggacgaaaatatgtgggtagctgcagatttgaaactaccttccagtgtcagcaacagtaataaacggagtataattaacaatattttaaaaacactaaatcttgaaaatacaaaaaaagtgagagcagctggtctttccggtggacagaaaaagaggttgtcaatagctttagagttagtaaataatccaatggtcatgttcttggatgaaccaaccacgggattggatagttcgtcttgttcaacatgtataacactacttaagaaactaactatgcaaggaaaaacaatcatatgtaccattcaccagccttcagctactttatttgcaatgtttgatcaggtgtacgtagtaggaaatgggtactgcctatatcaaggtagtacgaataaactggttccatttttgcaagactgtgggtttccctgtccgcagtatcacaatcctgctgactacgtaatagaactagcatgtattgagcacggacctgagaaacctgaatatatgagggatataattcagaacggacaatcttaccaatattttaacgagcctgaaaagatgaaaagcaccatttgtaactacccaggtcccaaacctattaaacgagttgttagcagtgatgaatcctcttttcccacatcacaattccatcaactaggagttcttatgagacggggatttattaaagcctacagagataagatgcttacctaccttcgtattggaacaaacataatagttggactgatgttgggcagcctctattggaaagctggaagtgatggatctaaagttttggataattttaatttattgtttgcgatattattgcaccatatgatgtccacaatgatgttgacgattttaacatttccccaggaaatgtcgattttaataaaagaacacttcaaccgttggtattcattaaaaatgtattacacatcggtaaccatagtggatattccggtttcggttattggctgcttcctgttttcactcataatatactatatgacagatcaaccaaacgataaagccagattcctgatattcttcgtcacttgcatgttggtagttctagtagctcaaggagttggtctaactattggcgcatattttgatgttgtgaacggaacttttgttggaccaaccctgatggtacccatgatgatgttctccggttttggcgttcgtctacgtgatctgccgaccataatgtactacggcagttttacttcttacttaaggtacggcttggaaggagtagtccaggcggtgtacggaatggacaggggtattcttcaatgtcccgaagacaaattttgcttctacaagtatccgaagactttcctggaaatagtagatgtcaggtcggatcagttcgataatgacatcattgctttactgcttttcttgtttgttttgagaattgcggcgtacgtagtgctgaggtacaaactggcatctgtgcgatagagcctgtttatgttttaataacttttattagaagtaggtgattgaagcctcggttttggtaaacagtgttgttagaaggacatttatttaaattttactcaaaaaaatatttttttttctttagaaaacatcattttttgtgacaatcaaaggaacttagagaaaatttacaataatgtttttaaaattttccaaagattatgatttattaaaagataaaagtatgagatcgtcactcagtacagtggttcccaagtagcaatttttcgacgcattggttgtcagtacaaacaaatgcactgtctacaactttgcccgagagcattttcagttgtttcggccaacgtcccctaccccgactgacattacgatgttacaacctgtagttatacgggcaactaatttattaccattttgacaactacatatcacaattcagttttttcaacaatcgcaacgacttaaaaatgttataatgctaaactaattattatatattttattttgatagaaattttggatttatttaacaacctgtttatttgtttttttaatagctggtttccattccattgttttatcagtagatttgagatttgataaccacctttgtatctgctttggtagacagggttgccaggtcagttttaactctttcagtagttttgttttcacaaaatcagtagattctttttaggccatgtaaatatacagtaatacagtgatatgcacatccgtcttaaatgtcccaagagcaattccacaaaattggaaacctaattattccaaaccaccaactggtaattatcattttttagctaaaatctactaaatcaaaaactaaaatatacttaagtattttgggatatatttgggattttttataataaaaacaacagctaacttaaggggataggcgcaaaatgtcgtctgttaaaatgttcaatgtattttaaatgttttcgttttttgcgaatccttagaaaactaataagtatttttgaaaaatttaaacgcacaaagaaagattacttaccaaggaccgaaagtccctgaaaacttctataatgtttattttaatacgttacaggggtgaaaaaagaaaaaatttagtgacttttaattccaaatatctcgttcaaaagaaacgttttggtttttctaaataatgcagtctttcattctgcgtttaaatttttcaaaaagacgtattatagtttcctcatgattcgaaaaaaatggatcaaattctgttgaaatataccaaaaatctactaaaaatattgcctactagaattttttaaaaaatatcaaaaatctaccaaaaaagtagaaatctactaaatgtggcaacgctgttaatgagaatgatacacttttgacactggtcacatgacctctgtcacccaataagagggtgcgttctaaaatggttttgatagtcggcgcggccgggtttggttggcgattggacttctaagttgtcttatccgtctaaggttggtaataaggtattttttagtaatattggtaatattgtttaatgcgccattttggttttacttgagatttttgggatgtaaagaaaatgaaaacacagaatataaaaaatgcaggcattttctgataactttaaaagcaccatcaatacattaaatttatacagaacatctttaacataaattttgacttttatattaaaatttgattttttaaatttgcatattttttgtcaaaaatgtcataaaaaaagcagcgcgtgtgttttttaaaggtgaaatatccatatttgacggtaatctgagatgcgtttataaatttcacatctggtaataagtcctttatgtatttatatcatataaatttaaatacccaatacgatgtcaaaacagtttactttttggttttcgcattcaccatacagttgttaaaaatataggtaaaaaaacataactagtctgactccttgagcaaccattgcacgcgcaggtgctttttatagtcgcttcagttgtcttatgcaacggttacgaaacgatgttgcttaaacaggaggttgcctaggcaacgtcaagacaactcaaaaatcgtccaccaaatcagtgcagaatagggtcgtcttttaggcaataacaacgttgtaagaaaacgttgccacgcggtagacaacgttgtcgcctcgacaaattgctacttgggttatacctattaatgagccaattctgtaaaaatcatgaactctcatacaattttggtagtacctagtgcaattaaaagtgaaataagaaatataatttcatacttacgttatgatattatccgttatggtatgtaggtactccattcaaatgttacatttagggttgcatttcttagaggagtcaatattattatttttttaatgtgtatggcggttcagtagaagcttaagttcaagtttttggggtcgccacccttgtcccccggccgccatcttggaaaaaggggtgcaaaggacgttcgcgctgtatctcctaaactagcaaccctacagaaaatttaattagaaataaaatgtagcaaattaaattttctacaattttatatttattactttttatcgtcaagtgatatacaaaaaagttataaaataaacaaaaataagaaaaaaatttgtaagaagtttccttttggaggttataacttttttccgttcatttcacaataaaataatatcattgcgattttatggaggatttctcaacgaacaatttccactatttataaagttgtttaattttacttatttatctgggctttacagcgctccaaacttgactagattctcgaaatctcataggaatacacagacaatttctagacaaaataatatttaatattatatgttgaaatagatctatcaaaggttattatttttttatggtcaaggcttcaagttaagatctgaatcagtatccgaggtgaatttttgtggtatagtgagagttagagagttagtgttagcgtcattgtcggtaattcatctttttcatcaataattaatgttgatatgtccaccccacataacaatttcatgttcttagtagattcatagaacatacttttcagaaaaagtatatactaagaatatgcgtaattaccattgcgaatgtgcagagcacatactgagtatatactacattacagtacttaaacgttctatgtatatacttagaatgtactaccgcacttcttctcagtatataccaagaatatactttttaggatattctaagaaggtgctataaaccttctatttatatacttagaatgtactacctcacatcttttagtatataggaagaatgtactttttagtatatgggaagaatattacaaggaagtgctatattgctcagaagcatgttttcagcatcaccgaatctcatcctaggttctactttctactaaatttacatattacatatgagaatgtagttagtacattctacaatattacttaaaaagtaaatataaaatattatataaattttagttagttatatcaatattatataggtaagtaggtatatatatttagttattatgtgcatataaaaataaaaatgctgaatatataaatttatatattcatattcatatacctatcgtacccaaataaatattatgtaacatatgtatgtaaataactaaaatttatatgttgcttatatgtacctatatacatacttactatttaagtaatattgaagtaccaaaatgaattttttatttgtaagttgacagcaaacaaaataaaacgtttaattatgcatgttcctattcctggttgaaatacttggtcttcctcacaacacagcatagacattgttagtgttaagtgtagacacaaatgccaaatgcctattcagtaactattttcatattttgtatttttcctttgttcccaaccccctacccgctaacccctatgcaggtatgcagcggtcgtttccgctttgtttgtgccggttgtgggttttggctcagccacacagcttacctgaatgtcaattccatgtaaaaataaaattcttcataagaatactcaataaacttaatcaaaatagtaaatgcatttcagttatgaaagcgaaacgacaatttctcctttttcgttaatacaattaattcttaaacatttttaccatacaattaaaacaattttaaataatgaattcggtagtttaattaatagtacctacatacataaatttttaaatttcattaattattcttaacgaagttgataatctataggctaacattattcttcctatacatacatatatattatttttaagatattttaaaagtatctacttataagtatgtgttaagtatgtacttataagtatgtgctaagaatattcggtaaaagtatattctgagaatagtatctacttataagtatgtgttaagaatgtacttataagtatgtgctaagaatattcggtaaaggtacattctaagaataaacttttacgaatattccgagttactacgtacacgaatgtactcagtatattcggtacgagaatatactttaaagtatgtgcaaagaacatgaaatttagaatgttttttaaggtacatgctatgcttgtactacgcatatactaaaaagaatatactctgacgaatgttggtagtatatgcttagaacatgatacgaacatcattgttatgtgggacgatgttgctgcaactttcaccaccacaatggaaacacactgctgaacatttgcatttgagatctgcttttcatcaaccacatgcacttccagtttccattgcatctgcaaaaggtgaatttaataagctcgggggtactggaggcttagaagtttggattagtatccaaaatttcccatgctttttccagtcccaatcttctggatcacaatgtttaccgagccatgactgaatctggtgatacactcggagtctttggaaacggactgcatcttgtgttggaggaagtgcgaagagattaaatgcattgttttcactgttttagcgaattgtttttatctccgggtttttagagattcgtctttatttccgccatataaagaggcgataaacgttcgtcgaccccaaaacttgaacttgagcttctactgataccccctacacattgaaaaaaaataaaattgactgctctaataaatgcaacgtatgccctaaaaaatgtaacatatcaatggactaatggtaaaagttgaacaaatacttcctagaactgcagaagaatctttcttacttactccacaaaccaattcaaaaagtactacgttaagagtgtatgaagagtatttcatataaatttccaacaaaaaatctagtcattttacccaattaggtaaatacatttttgtcatttttggcatttctctgattttggattgtcgtttcgtttcgatagggcttttcatcgattgtcatttgtttcgagcttctgtcatgtgttgtataatgtgtgtataatattaatatacacggattatatgacacatgacagaggctcgacacaaatgactgagaatgaaaagccctattctcactgccttaaatgaaacacagctcataatattttttataggaagttattgccataccacaaagtacaggcttcgtctgcagatatttttatggtaatagttttaacaattactcttatatcatggtataggttgtctggctctaaacagtgtcgtgtttattcttaagtatataaagaatgtttcatttaagtaatttttaaactttgctgtgatattgtattaccattttcttgttcatatagcatcatgattctagaagtagatatgcgcttggctatttattattcaatattgcgcttgggatatgatgtttagaactatcctcttttattaggcaaaaaatgcctaataaacattaggcaactcaacatttatcttctttatgacgtcactgacaattgacgttagcgctaccagtagtagaatcatcacgaatcacgaaacgtaaacataaatatttcaccattgggatcatgatgatggttcatttcttattgttattatgaatagagtaccttaagttaacaatttcttatattaagttaaaaaaatatattatatatttattctgcatgtatctaggtatgcctagaaacccaagtcttagtaattaaatgtaaaaaataagtcattttaataattgttttgtactatattataagttatattaggcaatggtttgtaacatatttatttttaaagacaataataattatgtgtaggtataagtaatggattttgggaagagctatgacctcgaaaacatcacaaagaatataactaaatatctcttttcttactcagactctttcaagtcttttgcaatatttcagaatctaaaatatttactaatattactaaagtattggattttgacaaaaactatgaattatgccgatttagttgatacctacacaagtttatgtgaaattttcaaagtcatagctcgtcccaaaatccattaggtacctatacaattgtttgtattggtaacagtcaatctatgaaattttataggtgtgtaaatacaaaaataaatatttaaacatataaaataaaatatattttttgcacgattgatcatttttgactgtttaccgtgacagattttacgtcagtaggtgacatttactagcaactcgacggtaagtaatccaactcgacggtaagtactccaactcgacggtaagtaattcacttaccgtcgagttaaaaaatctcttaattttaatttattttttgaaagaataaagaaaactaacgaattatttattaatattgaaacttatggtacaatttgttaaattatttaatgaaatcccacttgtttgggctgtggtttcacttctaacagaaactcctgcagaatcgcatacattagtagtattactagtattgcacaatattttttcggcaaaatctattttattttgaagagaatcttctacatagctttctgccactgtcgatgaacgccaacctccatgacgctttaatccgaggacatcaacacctttattagccaaaagcgttgctgatgtcctcctgaacgaatggccagtatagttctcgggattaggcaaatttaagaatttggcaatttgagaaggccagcccccgattgtccctttccctattacttgagcacaacattttcctttggcgtatcttaagaacaaatgatttgattttacttgtaatggacgaagttttatatacttttgcagaatttctaaatatgaatttatcatctggtttattaacgactgtaaaagtcgctggatgttcgtttttgtattgggtacttttatagtcattaaaccatcggtttgttggatgtcattcatagtaa

SEQ ID NO: 474 - DNA, 8860 bp, Diabrotica virgifera
  SmartBlast Evalue=0; Info="ABC transporter, putative n=1 Tax= Pediculus humanus corporis RepID=E0W387_PEDHC"
cacaaatacgaatagataggcaatcacaatcttcgagagtacttactggttcagtcgctgacagtccgcgaatttcaatccgcaccatggaggcagttctgcacgagagtacttttgtagggcaatctaaagacgccgccgccgttgtcaaatcgaacggggtcaacggcgattcagtgaatttttccgtaaaggtgaatcttaaccaagaaaagactttgatttgtgacgatggtactaatggcaaaatgtgccaaaatacggtggacttggagtttcaaaatattagttttcgtgcgacgcaagggaatatatttaccaaaaggactacaaaagaaattttgcatcaagtcggaggacgtttccagcccgggcagctgatagccataatggggccatcgggtgcaggcaaaagtacattattggatgttttgagtgggtataggatacgtggcgtaacaggttcagtatacgttaacggccaaccaagaagtttaaaggaattcaggaaaacgtcatgttacattacgcaagatgaccgtctgcagcctttactcactgtggacgaaaatatgtgggtagctgcagatttgaaactaccttccagtgtcagcaacagtaataaacggagtataattaacaatattttaaaaacactaaatcttgaaaatacaaaaaaagtgagagcagctggtctttccggtggacagaaaaagaggttgtcaatagctttagagttagtaaataatccaatggtcatgttcttggatgaaccaaccacgggattggatagttcgtcttgttcaacatgtataacactacttaagaaactaactatgcaaggaaaaacaatcatatgtaccattcaccagccttcagctactttatttgcaatgtttgatcaggtgtacgtagtaggaaatgggtactgcctatatcaaggtagtacgaataaactggttccatttttgcaagactgtgggtttccctgtccgcagtatcacaatcctgctgactacgtaatagaactagcatgtattgagcacggacctgagaaacctgaatatatgagggatataattcagaacggacaatcttaccaatattttaacgagcctgaaaagatgaaaagcaccatttgtaactacccaggtcccaaacctattaaacgagttgttagcagtgatgaatcctcttttcccacatcacaattccatcaactaggagttcttatgagacggggatttattaaagcctacagagataagatgcttacctaccttcgtattggaacaaacataatagttggactgatgttgggcagcctctattggaaagctggaagtgatggatctaaagttttggataattttaatttattgtttgcgatattattgcaccatatgatgtccacaatgatgttgacgattttaacatttccccaggaaatgtcgattttaataaaagaacacttcaaccgttggtattcattaaaaatgtattacacatcggtaaccatagtggatattccggtttcggttattggctgcttcctgttttcactcataatatactatatgacagatcaaccaaacgataaagccagattcctgatattcttcgtcacttgcatgttggtagttctagtagctcaaggagttggtctaactattggcgcatattttgatgttgtgaacggaacttttgttggaccaaccctgatggtacccatgatgatgttctccggttttggcgttcgtctacgtgatctgccgaccataatgtactacggcagttttacttcttacttaaggtacggcttggaaggagtagtccaggcggtgtacggaatggacaggggtattcttcaatgtcccgaagacaaattttgcttctacaagtatccgaagactttcctggaaatagtagatgtcaggtcggatcagttcgataatgacatcattgctttactgcttttcttgtttgttttgagaattgcggcgtacgtagtgctgaggtacaaactggcatctgtgcgatagagcctgtttatgttttaataacttttattagaagtaggtgattgaagcctcggttttggtaaacagtgttgttagaaggacatttatttaaattttactcaaaaaaatatttttttttctttagaaaacatcattttttgtgacaatcaaaggaacttagagaaaatttacaataatgtttttaaaattttccaaagattatgatttattaaaagataaaagtatgagatcgtcactcagtacagtggttcccaagtagcaatttttcgacgcattggttgtcagtacaaacaaatgcactgtctacaactttgcccgagagcattttcagttgtttcggccaacgtcccctaccccgactgacattacgatgttacaacctgtagttatacgggcaactaatttattaccattttgacaactacatatcacaattcagttttttcaacaatcgcaacgacttaaaaatgttataatgctaaactaattattatatattttattttgatagaaattttggatttatttaacaacctgtttatttgtttttttaatagctggtttccattccattgttttatcagtagatttgagatttgataaccacctttgtatctgctttggtagacagggttgccaggtcagttttaactctttcagtagttttgttttcacaaaatcagtagattctttttaggccatgtaaatatacagtaatacagtgatatgcacatccgtcttaaatgtcccaagagcaattccacaaaattggaaacctaattattccaaaccaccaactggtaattatcattttttagctaaaatctactaaatcaaaaactaaaatatacttaagtattttgggatatatttgggattttttataataaaaacaacagctaacttaaggggataggcgcaaaatgtcgtctgttaaaatgttcaatgtattttaaatgttttcgttttttgcgaatccttagaaaactaataagtatttttgaaaaatttaaacgcacaaagaaagattacttaccaaggaccgaaagtccctgaaaacttctataatgtttattttaatacgttacaggggtgaaaaaagaaaaaatttagtgacttttaattccaaatatctcgttcaaaagaaacgttttggtttttctaaataatgcagtctttcattctgcgtttaaatttttcaaaaagacgtattatagtttcctcatgattcgaaaaaaatggatcaaattctgttgaaatataccaaaaatctactaaaaatattgcctactagaattttttaaaaaatatcaaaaatctaccaaaaaagtagaaatctactaaatgtggcaacgctgttaatgagaatgatacacttttgacactggtcacatgacctctgtcacccaataagagggtgcgttctaaaatggttttgatagtcggcgcggccgggtttggttggcgattggacttctaagttgtcttatccgtctaaggttggtaataaggtattttttagtaatattggtaatattgtttaatgcgccattttggttttacttgagatttttgggatgtaaagaaaatgaaaacacagaatataaaaaatgcaggcattttctgataactttaaaagcaccatcaatacattaaatttatacagaacatctttaacataaattttgacttttatattaaaatttgattttttaaatttgcatattttttgtcaaaaatgtcataaaaaaagcagcgcgtgtgttttttaaaggtgaaatatccatatttgacggtaatctgagatgcgtttataaatttcacatctggtaataagtcctttatgtatttatatcatataaatttaaatacccaatacgatgtcaaaacagtttactttttggttttcgcattcaccatacagttgttaaaaatataggtaaaaaaacataactagtctgactccttgagcaaccattgcacgcgcaggtgctttttatagtcgcttcagttgtcttatgcaacggttacgaaacgatgttgcttaaacaggaggttgcctaggcaacgtcaagacaactcaaaaatcgtccaccaaatcagtgcagaatagggtcgtcttttaggcaataacaacgttgtaagaaaacgttgccacgcggtagacaacgttgtcgcctcgacaaattgctacttgggttatacctattaatgagccaattctgtaaaaatcatgaactctcatacaattttggtagtacctagtgcaattaaaagtgaaataagaaatataatttcatacttacgttatgatattatccgttatggtatgtaggtactccattcaaatgttacatttagggttgcatttcttagaggagtcaatattattatttttttaatgtgtatggcggttcagtagaagcttaagttcaagtttttggggtcgccacccttgtcccccggccgccatcttggaaaaaggggtgcaaaggacgttcgcgctgtatctcctaaactagcaaccctacagaaaatttaattagaaataaaatgtagcaaattaaattttctacaattttatatttattactttttatcgtcaagtgatatacaaaaaagttataaaataaacaaaaataagaaaaaaatttgtaagaagtttccttttggaggttataacttttttccgttcatttcacaataaaataatatcattgcgattttatggaggatttctcaacgaacaatttccactatttataaagttgtttaattttacttatttatctgggctttacagcgctccaaacttgactagattctcgaaatctcataggaatacacagacaatttctagacaaaataatatttaatattatatgttgaaatagatctatcaaaggttattatttttttatggtcaaggcttcaagttaagatctgaatcagtatccgaggtgaatttttgtggtatagtgagagttagagagttagtgttagcgtcattgtcggtaattcatctttttcatcaataattaatgttgatatgtccaccccacataacaatttcatgttcttagtagattcatagaacatacttttcagaaaaagtatatactaagaatatgcgtaattaccattgcgaatgtgcagagcacatactgagtatatactacattacagtacttaaacgttctatgtatatacttagaatgtactaccgcacttcttctcagtatataccaagaatatactttttaggatattctaagaaggtgctataaaccttctatttatatacttagaatgtactacctcacatcttttagtatataggaagaatgtactttttagtatatgggaagaatattacaaggaagtgctatattgctcagaagcatgttttcagcatcaccgaatctcatcctaggttctactttctactaaatttacatattacatatgagaatgtagttagtacattctacaatattacttaaaaagtaaatataaaatattatataaattttagttagttatatcaatattatataggtaagtaggtatatatatttagttattatgtgcatataaaaataaaaatgctgaatatataaatttatatattcatattcatatacctatcgtacccaaataaatattatgtaacatatgtatgtaaataactaaaatttatatgttgcttatatgtacctatatacatacttactatttaagtaatattgaagtaccaaaatgaattttttatttgtaagttgacagcaaacaaaataaaacgtttaattatgcatgttcctattcctggttgaaatacttggtcttcctcacaacacagcatagacattgttagtgttaagtgtagacacaaatgccaaatgcctattcagtaactattttcatattttgtatttttcctttgttcccaaccccctacccgctaacccctatgcaggtatgcagcggtcgtttccgctttgtttgtgccggttgtgggttttggctcagccacacagcttacctgaatgtcaattccatgtaaaaataaaattcttcataagaatactcaataaacttaatcaaaatagtaaatgcatttcagttatgaaagcgaaacgacaatttctcctttttcgttaatacaattaattcttaaacatttttaccatacaattaaaacaattttaaataatgaattcggtagtttaattaatagtacctacatacataaatttttaaatttcattaattattcttaacgaagttgataatctataggctaacattattcttcctatacatacatatatattatttttaagatattttaaaagtatctacttataagtatgtgttaagtatgtacttataagtatgtgctaagaatattcggtaaaagtatattctgagaatagtatctacttataagtatgtgttaagaatgtacttataagtatgtgctaagaatattcggtaaaggtacattctaagaataaacttttacgaatattccgagttactacgtacacgaatgtactcagtatattcggtacgagaatatactttaaagtatgtgcaaagaacatgaaatttagaatgttttttaaggtacatgctatgcttgtactacgcatatactaaaaagaatatactctgacgaatgttggtagtatatgcttagaacatgatacgaacatcattgttatgtgggacgatgttgctgcaactttcaccaccacaatggaaacacactgctgaacatttgcatttgagatctgcttttcatcaaccacatgcacttccagtttccattgcatctgcaaaaggtgaatttaataagctcgggggtactggaggcttagaagtttggattagtatccaaaatttcccatgctttttccagtcccaatcttctggatcacaatgtttaccgagccatgactgaatctggtgatacactcggagtctttggaaacggactgcatcttgtgttggaggaagtgcgaagagattaaatgcattgttttcactgttttagcgaattgtttttatctccgggtttttagagattcgtctttatttccgccatataaagaggcgataaacgttcgtcgaccccaaaacttgaacttgagcttctactgataccccctacacattgaaaaaaaataaaattgactgctctaataaatgcaacgtatgccctaaaaaatgtaacatatcaatggactaatggtaaaagttgaacaaatacttcctagaactgcagaagaatctttcttacttactccacaaaccaattcaaaaagtactacgttaagagtgtatgaagagtatttcatataaatttccaacaaaaaatctagtcattttacccaattaggtaaatacatttttgtcatttttggcatttctctgattttggattgtcgtttcgtttcgatagggcttttcatcgattgtcatttgtttcgagcttctgtcatgtgttgtataatgtgtgtataatattaatatacacggattatatgacacatgacagaggctcgacacaaatgactgagaatgaaaagccctattctcactgccttaaatgaaacacagctcataatattttttataggaagttattgccataccacaaagtacaggcttcgtctgcagatatttttatggtaatagttttaacaattactcttatatcatggtataggttgtctggctctaaacagtgtcgtgtttattcttaagtatataaagaatgtttcatttaagtaatttttaaactttgctgtgatattgtattaccattttcttgttcatatagcatcatgattctagaagtagatatgcgcttggctatttattattcaatattgcgcttgggatatgatgtttagaactatcctcttttattaggcaaaaaatgcctaataaacattaggcaactcaacatttatcttctttatgacgtcactgacaattgacgttagcgctaccagtagtagaatcatcacgaatcacgaaacgtaaacataaatatttcaccattgggatcatgatgatggttcatttcttattgttattatgaatagagtaccttaagttaacaatttcttatattaagttaaaaaaatatattatatatttattctgcatgtatctaggtatgcctagaaacccaagtcttagtaattaaatgtaaaaaataagtcattttaataattgttttgtactatattataagttatattaggcaatggtttgtaacatatttatttttaaagacaataataattatgtgtaggtataagtaatggattttgggaagagctatgacctcgaaaacatcacaaagaatataactaaatatctcttttcttactcagactctttcaagtcttttgcaatatttcagaatctaaaatatttactaatattactaaagtattggattttgacaaaaactatgaattatgccgatttagttgatacctacacaagtttatgtgaaattttcaaagtcatagctcgtcccaaaatccattaggtacctatacaattgtttgtattggtaacagtcaatctatgaaattttataggtgtgtaaatacaaaaataaatatttaaacatataaaataaaatatatttaaagacaagtaaataattggtggtattgatatttattccgtgttatattcccaatttattttcttaattatggtgttattactagtaattttgaaatggtccagcaatgcaattattgtgatgttatataataaatataagtata

SEQ ID NO: 475 - DNA, 7945 bp, Diabrotica virgifera
  SmartBlast Evalue=0; Info="ABC transporter, putative n=1 Tax= Pediculus humanus corporis RepID=E0W387_PEDHC"
cacaaatacgaatagataggcaatcacaatcttcgagagtacttactggttcagtcgctgacagtccgcgaatttcaatccgcaccatggaggcagttctgcacgagagtacttttgtagggcaatctaaagacgccgccgccgttgtcaaatcgaacggggtcaacggcgattcagtgaatttttccgtaaaggtgaatcttaaccaagaaaagactttgatttgtgacgatggtactaatggcaaaatgtgccaaaatacggtggacttggagtttcaaaatattagttttcgtgcgacgcaagggaatatatttaccaaaaggactacaaaagaaattttgcatcaagtcggaggacgtttccagcccgggcagctgatagccataatggggccatcgggtgcaggcaaaagtacattattggatgttttgagtgggtataggatacgtggcgtaacaggttcagtatacgttaacggccaaccaagaagtttaaaggaattcaggaaaacgtcatgttacattacgcaagatgaccgtctgcagcctttactcactgtggacgaaaatatgtgggtagctgcagatttgaaactaccttccagtgtcagcaacagtaataaacggagtataattaacaatattttaaaaacactaaatcttgaaaatacaaaaaaagtgagagcagctggtctttccggtggacagaaaaagaggttgtcaatagctttagagttagtaaataatccaatggtcatgttcttggatgaaccaaccacgggattggatagttcgtcttgttcaacatgtataacactacttaagaaactaactatgcaaggaaaaacaatcatatgtaccattcaccagccttcagctactttatttgcaatgtttgatcaggtgtacgtagtaggaaatgggtactgcctatatcaaggtagtacgaataaactggttccatttttgcaagactgtgggtttccctgtccgcagtatcacaatcctgctgactacgtaatagaactagcatgtattgagcacggacctgagaaacctgaatatatgagggatataattcagaacggacaatcttaccaatattttaacgagcctgaaaagatgaaaagcaccatttgtaactacccaggtcccaaacctattaaacgagttgttagcagtgatgaatcctcttttcccacatcacaattccatcaactaggagttcttatgagacggggatttattaaagcctacagagataagatgcttacctaccttcgtattggaacaaacataatagttggactgatgttgggcagcctctattggaaagctggaagtgatggatctaaagttttggataattttaatttattgtttgcgatattattgcaccatatgatgtccacaatgatgttgacgattttaacatttccccaggaaatgtcgattttaataaaagaacacttcaaccgttggtattcattaaaaatgtattacacatcggtaaccatagtggatattccggtttcggttattggctgcttcctgttttcactcataatatactatatgacagatcaaccaaacgataaagccagattcctgatattcttcgtcacttgcatgttggtagttctagtagctcaaggagttggtctaactattggcgcatattttgatgttgtgaacggaacttttgttggaccaaccctgatggtacccatgatgatgttctccggttttggcgttcgtctacgtgatctgccgaccataatgtactacggcagttttacttcttacttaaggtacggcttggaaggagtagtccaggcggtgtacggaatggacaggggtattcttcaatgtcccgaagacaaattttgcttctacaagtatccgaagactttcctggaaatagtagatgtcaggtcggatcagttcgataatgacatcattgctttactgcttttcttgtttgttttgagaattgcggcgtacgtagtgctgaggtacaaactggcatctgtgcgatagagcctgtttatgttttaataacttttattagaagtaggtgattgaagcctcggttttggtaaacagtgttgttagaaggacatttatttaaattttactcaaaaaaatatttttttttctttagaaaacatcattttttgtgacaatcaaaggaacttagagaaaatttacaataatgtttttaaaattttccaaagattatgatttattaaaagataaaagtatgagatcgtcactcagtacagtggttcccaagtagcaatttttcgacgcattggttgtcagtacaaacaaatgcactgtctacaactttgcccgagagcattttcagttgtttcggccaacgtcccctaccccgactgacattacgatgttacaacctgtagttatacgggcaactaatttattaccattttgacaactacatatcacaattcagttttttcaacaatcgcaacgacttaaaaatgttataatgctaaactaattattatatattttattttgatagaaattttggatttatttaacaacctgtttatttgtttttttaatagctggtttccattccattgttttatcagtagatttgagatttgataaccacctttgtatctgctttggtagacagggttgccaggtcagttttaactctttcagtagttttgttttcacaaaatcagtagattctttttaggccatgtaaatatacagtaatacagtgatatgcacatccgtcttaaatgtcccaagagcaattccacaaaattggaaacctaattattccaaaccaccaactggtaattatcattttttagctaaaatctactaaatcaaaaactaaaatatacttaagtattttgggatatatttgggattttttataataaaaacaacagctaacttaaggggataggcgcaaaatgtcgtctgttaaaatgttcaatgtattttaaatgttttcgttttttgcgaatccttagaaaactaataagtatttttgaaaaatttaaacgcacaaagaaagattacttaccaaggaccgaaagtccctgaaaacttctataatgtttattttaatacgttacaggggtgaaaaaagaaaaaatttagtgacttttaattccaaatatctcgttcaaaagaaacgttttggtttttctaaataatgcagtctttcattctgcgtttaaatttttcaaaaagacgtattatagtttcctcatgattcgaaaaaaatggatcaaattctgttgaaatataccaaaaatctactaaaaatattgcctactagaattttttaaaaaatatcaaaaatctaccaaaaaagtagaaatctactaaatgtggcaacgctgttaatgagaatgatacacttttgacactggtcacatgacctctgtcacccaataagagggtgcgttctaaaatggttttgatagtcggcgcggccgggtttggttggcgattggacttctaagttgtcttatccgtctaaggttggtaataaggtattttttagtaatattggtaatattgtttaatgcgccattttggttttacttgagatttttgggatgtaaagaaaatgaaaacacagaatataaaaaatgcaggcattttctgataactttaaaagcaccatcaatacattaaatttatacagaacatctttaacataaattttgacttttatattaaaatttgattttttaaatttgcatattttttgtcaaaaatgtcataaaaaaagcagcgcgtgtgttttttaaaggtgaaatatccatatttgacggtaatctgagatgcgtttataaatttcacatctggtaataagtcctttatgtatttatatcatataaatttaaatacccaatacgatgtcaaaacagtttactttttggttttcgcattcaccatacagttgttaaaaatataggtaaaaaaacataactagtctgactccttgagcaaccattgcacgcgcaggtgctttttatagtcgcttcagttgtcttatgcaacggttacgaaacgatgttgcttaaacaggaggttgcctaggcaacgtcaagacaactcaaaaatcgtccaccaaatcagtgcagaatagggtcgtcttttaggcaataacaacgttgtaagaaaacgttgccacgcggtagacaacgttgtcgcctcgacaaattgctacttgggttatacctattaatgagccaattctgtaaaaatcatgaactctcatacaattttggtagtacctagtgcaattaaaagtgaaataagaaatataatttcatacttacgttatgatattatccgttatggtatgtaggtactccattcaaatgttacatttagggttgcatttcttagaggagtcaatattattatttttttaatgtgtatggcggttcagtagaagcttaagttcaagtttttggggtcgccacccttgtcccccggccgccatcttggaaaaaggggtgcaaaggacgttcgcgctgtatctcctaaactagcaaccctacagaaaatttaattagaaataaaatgtagcaaattaaattttctacaattttatatttattactttttatcgtcaagtgatatacaaaaaagttataaaataaacaaaaataagaaaaaaatttgtaagaagtttccttttggaggttataacttttttccgttcatttcacaataaaataatatcattgcgattttatggaggatttctcaacgaacaatttccactatttataaagttgtttaattttacttatttatctgggctttacagcgctccaaacttgactagattctcgaaatctcataggaatacacagacaatttctagacaaaataatatttaatattatatgttgaaatagatctatcaaaggttattatttttttatggtcaaggcttcaagttaagatctgaatcagtatccgaggtgaatttttgtggtatagtgagagttagagagttagtgttagcgtcattgtcggtaattcatctttttcatcaataattaatgttgatatgtccaccccacataacaatttcatgttcttagtagattcatagaacatacttttcagaaaaagtatatactaagaatatgcgtaattaccattgcgaatgtgcagagcacatactgagtatatactacattacagtacttaaacgttctatgtatatacttagaatgtactaccgcacttcttctcagtatataccaagaatatactttttaggatattctaagaaggtgctataaaccttctatttatatacttagaatgtactacctcacatcttttagtatataggaagaatgtactttttagtatatgggaagaatattacaaggaagtgctatattgctcagaagcatgttttcagcatcaccgaatctcatcctaggttctactttctactaaatttacatattacatatgagaatgtagttagtacattctacaatattacttaaaaagtaaatataaaatattatataaattttagttagttatatcaatattatataggtaagtaggtatatatatttagttattatgtgcatataaaaataaaaatgctgaatatataaatttatatattcatattcatatacctatcgtacccaaataaatattatgtaacatatgtatgtaaataactaaaatttatatgttgcttatatgtacctatatacatacttactatttaagtaatattgaagtaccaaaatgaattttttatttgtaagttgacagcaaacaaaataaaacgtttaattatgcatgttcctattcctggttgaaatacttggtcttcctcacaacacagcatagacattgttagtgttaagtgtagacacaaatgccaaatgcctattcagtaactattttcatattttgtatttttcctttgttcccaaccccctacccgctaacccctatgcaggtatgcagcggtcgtttccgctttgtttgtgccggttgtgggttttggctcagccacacagcttacctgaatgtcaattccatgtaaaaataaaattcttcataagaatactcaataaacttaatcaaaatagtaaatgcatttcagttatgaaagcgaaacgacaatttctcctttttcgttaatacaattaattcttaaacatttttaccatacaattaaaacaattttaaataatgaattcggtagtttaattaatagtacctacatacataaatttttaaatttcattaattattcttaacgaagttgataatctataggctaacattattcttcctatacatacatatatattatttttaagatattttaaaagtatctacttataagtatgtgttaagtatgtacttataagtatgtgctaagaatattcggtaaaagtatattctgagaatagtatctacttataagtatgtgttaagaatgtacttataagtatgtgctaagaatattcggtaaaggtacattctaagaataaacttttacgaatattccgagttactacgtacacgaatgtactcagtatattcggtacgagaatatactttaaagtatgtgcaaagaacatgaaatttagaatgttttttaaggtacatgctatgcttgtactacgcatatactaaaaagaatatactctgacgaatgttggtagtatatgcttagaacatgatacgaacatcattgttatgtgggacgatgttgctgcaactttcaccaccacaatggaaacacactgctgaacatttgcatttgagatctgcttttcatcaaccacatgcacttccagtttccattgcatctgcaaaaggtgaatttaataagctcgggggtactggaggcttagaagtttggattagtatccaaaatttcccatgctttttccagtcccaatcttctggatcacaatgtttaccgagccatgactgaatctggtgatacactcggagtctttggaaacggactgcatcttgtgttggaggaagtgcgaagagattaaatgcattgttttcactgttttagcgaattgtttttatctccgggtttttagagattcgtctttatttccgccatataaagaggcgataaacgttcgtcgaccccaaaacttgaacttgagcttctactgataccccctacacattgaaaaaaaataaaattgactgctctaataaatgcaacgtatgccctaaaaaatgtaacatatcaatggactaatggtaaaagttgaacaaatacttcctagaactgcagaagaatctttcttacttactccacaaaccaattcaaaaagtactacgttaagagtgtatgaagagtatttcatataaatttccaacaaaaaatctagtcattttacccaattaggtaaatacatttttgtcatttttggcatttctctgattttggattgtcgtttcgtttcgatagggcttttcatcgattgtcatttgtttcgagcttctgtcatatgttgtataatctgtgtataatattaatatgcacggattatacgacatatgacagaggctcgagacagatgactgaatgaaaagtcctattgatgtggaataatagaaaagtgattaaatccgacaaaaaacaaagcagtattgttagaagatcggtgaaagctcaagtggttagatattagcgtagagggggtgcagattctgacgaataagaatttgagttgggttgaattgtcaacgccatcttaggatgtcgcatgttgagcgagttttattgataaataaacactttcatagtttgaaagtcgtactgtactgactttcttccaattgcattcataaaatttcgttatttcttttactactatttcaaagaagtttttctttgatacaag

SEQ ID NO: 476 - DNA, 3252 bp, Diabrotica virgifera
  SmartBlast Evalue=5E-33; Info=Thioredoxin-like protein n=1 Tax= Graphocephala atropunctata RepID=Q1W2C2_9HEMI
atacgtaattctaacgtgtagaaaagagacgcaaaattgtaatcgtgtgatttctcgagaagggataacacgttagtgccatgcgctacagttgtcctttcataaaagttgctataataaaaagagatagtaaaacgacgttccaatagtattagacgaaggcaagtagttttgttctgttgtgaattttgtgaaatcgtaatcgcttcgccactcgactacagacattcataaatatcacggtctctttgattgacttctgtgttgtcatctccatcttgagagggtcacgtttgttgtattcgtatttcgtgttttaacgttccaaagaaaaacaatccaaaatggttcatcacattaaagataaggatgacttggaagctaaattcaaagaagctggaaccaacttggtagttctcgacttctcagctgcctggtgcggaccttgtaaaatgattagccccaaattggacgaattggctgccgaataccccaacgtcgttattgtaaaaatcgacgttgatgaatgcgaagatctcgctatggaatacaacatcaagtccatgcccacattcattttcctgaagaacggtcaagaaatcgcgaatttcagcggagctaactacgaaagactaaaacaaaccattgaagataacaagtaatgcaaaacccagaatattctgcctaaatatttttttaataaattattcaaaataaatatgtattaatgatattgtagctccgttaaaactatattcgtactgcatagtaattttattttgtacttgttcttgttaaggccggccgttgtatgaaagagaggtccccaaatgccggcgcaacagagagaaaagattctttcccgagagatgctgcctctatcggagaaataacgcaatagatatctaagcgaggccgcaaacggcagaatttttagtgagtcgatagtttagttaagtacagagagtatgcaggtgcggcctcgctaagatgactcgaaatcgttttatatatcaggtgcgaacttttaattttttagtaggcggtttaaggacggggtctcgctgaaaattttacttggataaatactgtgctcgtatctcgtggtaaaatctaaaccaaaagtattggagaaatctattttagtccatgtggtgagaccgctcccgtctgggaaaatttctgattcggtttctttgtggattcctattcaaacatgtcccctctaaacaaatctgaagggtgccgggcggaatttttgggcagaaactgtttaaacaatttttataaacaaatagaaaagatcacgtttttttgccccggaacatatatttttaagtttagtgggtcattctaaacaagaaaggtatcttgtaatttttttcaaaaattgatagttttcgagttatagtcgatttaaaatctgaaaagtgcgaaaatgctcatttacgaggcctaaaaactcatatttaaattagaacttttgaggttgccagattcttaaattgaagtttaaacattcagcttgaagattctaaagagtgattgtgtctaaccctaatttaaaccgtcgtgttttaattgttaaatatacatgtccatccgatttttttgtcggtgcggcgcgctctatttcaaaaatctccagttttcctccaaaaaatattttttctagattttttgggacattttaaataaaataagtttcttgacatttttctcaaaagttaacagttttaaagttaacagtttttaaaagaaactttttatttattctaagggactgtcggccctcggcaataacgttttctttcattctgcgtttaatttttttaaaaatacttattagttttctcagtattcgaaaaaaatgaacacatttaaaacacaggaaaattttgagaggcgacattttgcgtctttccccttaaatttttttgcaacatgaatgaagcaccctgtgtattaaattaaaaatatacattcaagtaaataaacaataatattttgttatatcaaagttttcaaacaaattttatatagggtgtctgcataactagcaaccatatggtttcatattaattttattaattattaattttaattattattaatacattattaattttacgggaaaaggtaatacccaagttaaatacataatcataattcatagagtatgtgtttacttaagggtaattatcattagagtaaaagattcactttataggagtaaaactgctaagttgcgttatgggtactaatttatgtttctagtcgtcaaggagtgtgatttgatgtttgattttcatatggcaagcgtaattcaatctatctacatacttcaaagaaaaaaattaggaagggacaataaaatgtaatatattttagacggagtacgttcaacatttcaggacgggaataataaatcattttttcagtaataacacaatatttgatttttgagatttctctagctgttcatgaaataaataaaattgtatataaaaaatgattatctcatttaaaataaatatttcttatttaccaatccttcggtttggcgccccattggggttacgcacgcgtgcaccgcacgcgttgcacgcccggttacggggccctgatattattccaagtacgcaataatgaaccacccgcatccctcaaaacggtattactctctatacagtaccgaaatttccaaaggaaagtttcaaacgggccataccgctcctgaattttgcacatgtataaatatttttcgtagcgccatcttatacataatggctacattaacagagcttagattcttacagattcctatactgtattcgtattatatgtcgaatatttacgtttcacatgccaatttttattaatttcagaaatttattttaaaagtacaccacgcaaaaagtactttattaattcacatttttttaacgttatatccttccattacttctactgtagtgctaaacggaattttatcatgaaattcatttaaatacttaagtaatttagatataaacgctcttatatttattgagaaaaaggcaaaactttcacatttttttataaacaatacacaacaggtaggataacaaaaatatggctggaactagcgacatatattgttagtaggttaagcatttttcggtatacatatatgctctagattatgagtggtgtactttataaaggtgatgggatcggctatacttataacattaccaatggcccgcctta

SEQ ID NO: 477 - DNA, 3267 bp, Diabrotica virgifera
tatgcagtatatgcattgtcagacagtattaccagtaaatctaattatttttatcaaacaatccgcaaaaaaccatcgtttatgactctatagtgccccccatagatgaaggggcgcacgcatcatattcataaatttatataaaatacgctcacagctgatttttgcagtactgtttgataaaatattataattaactggtaatagtctgacaaatttttaagagtactccagttgttggaggcgccaacgtttagaatcctctctacagggtgtccccgaaaatagtgcgttccttaaaggtataggtagaaggcacaatgtagagcaaaaaagtcttataacattttttctaaattgatccgtttgaccaaaaaacgaaaatacattttgatatgcaaattgaagtctggcaacaacgcgcaactcaaaaatctaaagattaaaaaagtaggtttgtaggtcagttgcatctggtaggtaaaataatgtaaatatcaaccaaacccatatccattattttgcaggtaggtacctacgatgtcaacaaccccaaaaatcacacctcaaagtaaataaacaaggggttattaggttaaatttccacagtcacagcaagttcttctaggctacgttgccatgtcatttaaattgatgaaaataaaaattcacttatatggagaacaatgtaattttttcttggaaacggttaactttagaaaaaaatgttataggacttttttgttctaaattgtgtattatatccataccttggaaaggaacgcactattttcgggggcaccctgtataaaaacgttttaaaaatcaccaagtacatcttttttgatttagcatgtgggttttcgacggcaatccataaatattatattatactagtacgccgctaaacagttcctaaaaacatctgtttttatataaatgcagactaaaaatttaaaatttaaggaaataacgcagaaaacataaaaaatcgctgatataacttaattaaactatgaaatgccgatagtgtcgaaagtttcataaatgtcagttgtatcaaaatttcataacagtggagtaaacttgtctgaggttggaccaattacaaacaagcattgcggcgcgctaaatttggattactcctcctggtttaaaaacaaggtatagtatcattaaaatgggcgtgtagtcaaaaattgagactactttaaaaattatcctaggactaggaaaatgattaaatcctaggtgcactatgtatatataagctttatactaagtacaagctttttctttggctacacttggatttaactgaaaaaatatatgtattacgccttttttttttcgagaaatttatagaaagtatatctggagggtatttttttggtctgacaaggaagctatttacctgactgtatgtgttgatctccattaactataccagaaatggcaaaacttatataacttctcaaaaattcctattatttcaagcatcatgcatttagttcctgtcttctgatacgataagaatatctgctacacaatatttttgacagaatagcaggctaaacctaggtttaacgtatcatgccatagctgatataagcttctccaaaagccatatctactacgaaagttggctatcaccatggcaactttaactcccgaggcaaatactcatcacagttggatagaacttcaagtgaacgattcccttaggttttgtaacctagacatatttcttctaactgtgctgcgtttgactcatcttcatgtgtaaaatatccctgatactgttgttttctcgttttaattgcaagccagcaatagtgattaaccccttgagaatgacatttgggcattacaatttattgactcttgtaagcaggaatccactccaccccgccccagctccagactatccatcccccccccccctccgaacagcacgttgatgcgctataggggctctctattagcaaagtgcttaacatgtgtcgagtccgtgccgtgtacccagaactcgaaactttctggatacgaaatcgtaatcaatgcaggccagcgtgagacgctctatttgtgacgataatatattaattttatcgtctagagtacgccaatgaattaagtaaaacgtgttttgtaccgactctgacgatataaaagtcggaacgaaaagcctagttgatttattattcttggagtgttgatcgaataataataaacaacaacgaggtataagaggtgagtttaagtagtatatcccgaccatttccgtaatcctacaactcccgtcgtctttggtgtgctgaacgaatttcgacggttttccttttacctattcttatacgagcggtgatctatttcccaacatgtcttttcctctggcgagctgagcgagatttcctctccttatacgtccatttcatattaataaaagtaattcctaatccacgcgatcctcaatatcattcattcatgtacaaaatatcgtcacatcgacccgaaccgaaagctcgatgcgtagattataaatatattttattaacgaaattaacgagtaatcaaggctaattatcttatcttttgtatgttttgattccaaataaaaatgtcttaaaaagtgaacttttgtcttcggctgattttgttacctggagcaacaaacgcaacgaccgcgttacatattctcgctatctctatagtgacctatcttcgatctgtcttcaatggtatcttctcaggagatttttaagagtcttcaatatgcctacctagcaaatgcctccaatatgcagttagagctttccttatccatattctgttttctcgtgtctattcatttgcctcgttaatatttgtttccagctacaaatagggtcgtaatctatctagtatagcttctctacatttaatggtttgtggttttggtttaactgtaggtgttgtatatctgtgtacacttaggtacagagcacacgtcgcaactattttaaaacaacgtttgaaaactacatagttggaaaagagtttcaggctgatcaactcgtgggtgaaacccccctgcttttatcatgggccgtgcttttactctgctgagataacaaaatagttgcaagtgcaatcgatttcatagttttaaaacagttatgagattagctatttggtttctcactatttctcacactcgtctgagactggctagtagttcgaaaaagattcaacaattttatttttcttcaatccaaagtttctaac

SEQ ID NO: 478 - DNA, 3267 bp, Diabrotica virgifera
tatgcagtatatgcattgtcagacagtattaccagtaaatctaattatttttatcaaacaatccgcaaaaaaccatcgtttatgactctatagtgccccccatagatgaaggggcgcacgcatcatattcataaatttatataaaatacgctcacagctgatttttgcagtactgtttgataaaatattataattaactggtaatagtctgacaaatttttaagagtactccagttgttggaggcgccaacgtttagaatcctctctacagggtgtccccgaaaatagtgcgttccttaaaggtataggtagaaggcacaatgtagagcaaaaaagtcttataacattttttctaaattgatccgtttgaccaaaaaacgaaaatacattttgatatgcaaattgaagtctggcaacaacgcgcaactcaaaaatctaaagattaaaaaagtaggtttgtaggtcagttgcatctggtaggtaaaataatgtaaatatcaaccaaacccatatccattattttgcaggtaggtacctacgatgtcaacaaccccaaaaatcacacctcaaagtaaataaacaaggggttattaggttaaatttccacagtcacagcaagttcttctaggctacgttgccatgtcatttaaattgatgaaaataaaaattcacttatatggagaacaatgtaattttttcttggaaacggttaactttagaaaaaaatgttataggacttttttgttctaaattgtgtattatatccataccttggaaaggaacgcactattttcgggggcaccctgtataaaaacgttttaaaaatcaccaagtacatcttttttgatttagcatgtgggttttcgacggcaatccataaatattatattatactagtacgccgctaaacagttcctaaaaacatctgtttttatataaatgcagactaaaaatttaaaatttaaggaaataacgcagaaaacataaaaaatcgctgatataacttaattaaactatgaaatgccgatagtgtcgaaagtttcataaatgtcagttgtatcaaaatttcataacagtggagtaaacttgtctgaggttggaccaattacaaacaagcattgcggcgcgctaaatttggattactcctcctggtttaaaaacaaggtatagtatcattaaaatgggcgtgtagtcaaaaattgagactactttaaaaattatcctaggactaggaaaatgattaaatcctaggtgcactatgtatatataagctttatactaagtacaagctttttctttggctacacttggatttaactgaaaaaatatatgtattacgccttttttttttcgagaaatttatagaaagtatatctggagggtatttttttggtctgacaaggaagctatttacctgactgtatgtgttgatctccattaactataccagaaatggcaaaacttatataacttctcaaaaattcctattatttcaagcatcatgcatttagttcctgtcttctgatacgataagaatatctgctacacaatatttttgacagaatagcaggctaaacctaggtttaacgtatcatgccatagctgatataagcttctccaaaagccatatctactacgaaagttggctatcaccatggcaactttaactcccgaggcaaatactcatcacagttggatagaacttcaagtgaacgattcccttaggttttgtaacctagacatatttcttctaactgtgctgcgtttgactcatcttcatgtgtaaaatatccctgatactgttgttttctcgttttaattgcaagccagcaatagtgattaaccccttgagaatgacatttgggcattacaatttattgactcttgtaagcaggaatccactccaccccgccccagctccagactatccatcccccccccccctccgaacagcacgttgatgcgctataggggctctctattagcaaagtgcttaacatgtgtcgagtccgtgccgtgtacccagaactcgaaactttctggatacgaaatcgtaatcaatgcaggccagcgtgagacgctctatttgtgacgataatatattaattttatcgtctagagtacgccaatgaattaagtaaaacgtgttttgtaccgactctgacgatataaaagtcggaacgaaaagcctagttgatttattattcttggagtgttgatcgaataataataaacaacaacgaggtataagaggtgagtttaagtagtatatcccgaccatttccgtaatcctacaactcccgtcgtctttggtgtgctgaacgaatttcgacggttttccttttacctattcttatacgagcggtgatctatttcccaacatgtcttttcctctggcgagctgagcgagatttcctctccttatacgtccatttcatattaataaaagtaattcctaatccacgcgatcctcaatatcattcattcatgtacaaaatatcgtcacatcgacccgaaccgaaagctcgatgcgtagattataaatatattttattaacgaaattaacgagtaatcaaggctaattatcttatcttttgtatgttttgattccaaataaaaatgtcttaaaaagtgaacttttgtcttcggctgattttgttacctggagcaacaaacgcaacgaccgcgttacatattctcgctatctctatagtgacctatcttcgatctgtcttcaatggtatcttctcaggagatttttaagagtcttcaatatgcctacctagcaaatgcctccaatatgcagttagagctttccttatccatattctgttttctcgtgtctattcatttgcctcgttaatatttgtttccagctacaaatagggtcgtaatctatctagtatagcttctctacatttaatggtttgtggttttggtttaactgtaggtgttgtatatctgtgtacacttaggtacagagcacacgtcgcaactattttaaaacaacgtttgaaaactacatagttggaaaagagtttcaggctgatcaactcgtgggtgaaacccccctgcttttatcatgggccgtgcttttactctgctgagataacaaaatagttgcaagtgcaatcgatttcatagttttaaaacagttatgacacattaagaataagatgctattttttgacccccgttgattaggagattaactatttggtttctcactatttctcacactcatctgagactggctagtagttcga

SEQ ID NO: 479 - DNA, 3276 bp, Diabrotica virgifera
tatgcagtatatgcattgtcagacagtattaccagtaaatctaattatttttatcaaacaatccgcaaaaaaccatcgtttatgactctatagtgccccccatagatgaaggggcgcacgcatcatattcataaatttatataaaatacgctcacagctgatttttgcagtactgtttgataaaatattataattaactggtaatagtctgacaaatttttaagagtactccagttgttggaggcgccaacgtttagaatcctctctacagggtgtccccgaaaatagtgcgttccttaaaggtataggtagaaggcacaatgtagagcaaaaaagtcttataacattttttctaaattgatccgtttgaccaaaaaacgaaaatacattttgatatgcaaattgaagtctggcaacaacgcgcaactcaaaaatctaaagattaaaaaagtaggtttgtaggtcagttgcatctggtaggtaaaataatgtaaatatcaaccaaacccatatccattattttgcaggtaggtacctacgatgtcaacaaccccaaaaatcatacctcaaagtaaataaacaggttaaattacagggtattaggttaaatttccacagtcacagcaagttcttctaggctacgttgccatgtcattcaaatttatgaaaataaaaattcacttgtatggagaacaatgtaattttttcttggaaacggttaactttagaaaaaaatgttataggacttttttgttctaaattgtgtattatatccataccttggaaaggaacgcactattttcgggggcaccctgtataaaaacgttttaaaaatcaccaagtacatcttttttgatttagcatgtgggttttcgacggcaatccataaatattatattatactagtacgccgctaaacagttcctaaaaacatctgtttttatataaatgcagactaaaaatttaaaatttaaggaaataacgcagaaaacataaaaaatcgctgatataacttaattaaactatgaaatgccgatagtgtcgaaagtttcataaatgtcagttgtatcaaaatttcataacagtggagtaaacttgtctgaggttggaccaattacaaacaagcattgcggcgcgctaaatttggattactcctcctggtttaaaaacaaggtatagtatcattaaaatgggcgtgtagtcaaaaattgagactactttaaaaattatcctaggactaggaaaatgattaaatcctaggtgcactatgtatatataagctttatactaagtacaagctttttctttggctacacttggatttaactgaaaaaatatatgtattacgccttttttttttcgagaaatttatagaaagtatatctggagggtatttttttggtctgacaaggaagctatttacctgactgtatgtgttgatctccattaactataccagaaatggcaaaacttatataacttctcaaaaattcctattatttcaagcatcatgcatttagttcctgtcttctgatacgataagaatatctgctacacaatatttttgacagaatagcaggctaaacctaggtttaacgtatcatgccatagctgatataagcttctccaaaagccatatctactacgaaagttggctatcaccatggcaactttaactcccgaggcaaatactcatcacagttggatagaacttcaagtgaacgattcccttaggttttgtaacctagacatatttcttctaactgtgctgcgtttgactcatcttcatgtgtaaaatatccctgatactgttgttttctcgttttaattgcaagccagcaatagtgattaaccccttgagaatgacatttgggcattacaatttattgactcttgtaagcaggaatccactccaccccgccccagctccagactatccatcccccccccccctccgaacagcacgttgatgcgctataggggctctctattagcaaagtgcttaacatgtgtcgagtccgtgccgtgtacccagaactcgaaactttctggatacgaaatcgtaatcaatgcaggccagcgtgagacgctctatttgtgacgataatatattaattttatcgtctagagtacgccaatgaattaagtaaaacgtgttttgtaccgactctgacgatataaaagtcggaacgaaaagcctagttgatttattattcttggagtgttgatcgaataataataaacaacaacgaggtataagaggtgagtttaagtagtatatcccgaccatttccgtaatcctacaactcccgtcgtctttggtgtgctgaacgaatttcgacggttttccttttacctattcttatacgagcggtgatctatttcccaacatgtcttttcctctggcgagctgagcgagatttcctctccttatacgtccatttcatattaataaaagtaattcctaatccacgcgatcctcaatatcattcattcatgtacaaaatatcgtcacatcgacccgaaccgaaagctcgatgcgtagattataaatatattttattaacgaaattaacgagtaatcaaggctaattatcttatcttttgtatgttttgattccaaataaaaatgtcttaaaaagtgaacttttgtcttcggctgattttgttacctggagcaacaaacgcaacgaccgcgttacatattctcgctatctctatagtgacctatcttcgatctgtcttcaatggtatcttctcaggagatttttaagagtcttcaatatgcctacctagcaaatgcctccaatatgcagttagagctttccttatccatattctgttttctcgtgtctattcatttgcctcgttaatatttgtttccagctacaaatagggtcgtaatctatctagtatagcttctctacatttaatggtttgtggttttggtttaactgtaggtgttgtatatctgtgtacacttaggtacagagcacacgtcgcaactattttaaaacaacgtttgaaaactacatagttggaaaagagtttcaggctgatcaactcgtgggtgaaacccccctgcttttatcatgggccgtgcttttactctgctgagataacaaaatagttgcaagtgcaatcgatttcatagttttaaaacagttatgagattagctatttggtttctcactatttctcacactcgtctgagactggctagtagttcgaaaaagattcaacaattttatttttcttcaatccaaagtttctaac

SEQ ID NO: 480 - DNA, 3276 bp, Diabrotica virgifera
tatgcagtatatgcattgtcagacagtattaccagtaaatctaattatttttatcaaacaatccgcaaaaaaccatcgtttatgactctatagtgccccccatagatgaaggggcgcacgcatcatattcataaatttatataaaatacgctcacagctgatttttgcagtactgtttgataaaatattataattaactggtaatagtctgacaaatttttaagagtactccagttgttggaggcgccaacgtttagaatcctctctacagggtgtccccgaaaatagtgcgttccttaaaggtataggtagaaggcacaatgtagagcaaaaaagtcttataacattttttctaaattgatccgtttgaccaaaaaacgaaaatacattttgatatgcaaattgaagtctggcaacaacgcgcaactcaaaaatctaaagattaaaaaagtaggtttgtaggtcagttgcatctggtaggtaaaataatgtaaatatcaaccaaacccatatccattattttgcaggtaggtacctacgatgtcaacaaccccaaaaatcatacctcaaagtaaataaacaggttaaattacagggtattaggttaaatttccacagtcacagcaagttcttctaggctacgttgccatgtcattcaaatttatgaaaataaaaattcacttgtatggagaacaatgtaattttttcttggaaacggttaactttagaaaaaaatgttataggacttttttgttctaaattgtgtattatatccataccttggaaaggaacgcactattttcgggggcaccctgtataaaaacgttttaaaaatcaccaagtacatcttttttgatttagcatgtgggttttcgacggcaatccataaatattatattatactagtacgccgctaaacagttcctaaaaacatctgtttttatataaatgcagactaaaaatttaaaatttaaggaaataacgcagaaaacataaaaaatcgctgatataacttaattaaactatgaaatgccgatagtgtcgaaagtttcataaatgtcagttgtatcaaaatttcataacagtggagtaaacttgtctgaggttggaccaattacaaacaagcattgcggcgcgctaaatttggattactcctcctggtttaaaaacaaggtatagtatcattaaaatgggcgtgtagtcaaaaattgagactactttaaaaattatcctaggactaggaaaatgattaaatcctaggtgcactatgtatatataagctttatactaagtacaagctttttctttggctacacttggatttaactgaaaaaatatatgtattacgccttttttttttcgagaaatttatagaaagtatatctggagggtatttttttggtctgacaaggaagctatttacctgactgtatgtgttgatctccattaactataccagaaatggcaaaacttatataacttctcaaaaattcctattatttcaagcatcatgcatttagttcctgtcttctgatacgataagaatatctgctacacaatatttttgacagaatagcaggctaaacctaggtttaacgtatcatgccatagctgatataagcttctccaaaagccatatctactacgaaagttggctatcaccatggcaactttaactcccgaggcaaatactcatcacagttggatagaacttcaagtgaacgattcccttaggttttgtaacctagacatatttcttctaactgtgctgcgtttgactcatcttcatgtgtaaaatatccctgatactgttgttttctcgttttaattgcaagccagcaatagtgattaaccccttgagaatgacatttgggcattacaatttattgactcttgtaagcaggaatccactccaccccgccccagctccagactatccatcccccccccccctccgaacagcacgttgatgcgctataggggctctctattagcaaagtgcttaacatgtgtcgagtccgtgccgtgtacccagaactcgaaactttctggatacgaaatcgtaatcaatgcaggccagcgtgagacgctctatttgtgacgataatatattaattttatcgtctagagtacgccaatgaattaagtaaaacgtgttttgtaccgactctgacgatataaaagtcggaacgaaaagcctagttgatttattattcttggagtgttgatcgaataataataaacaacaacgaggtataagaggtgagtttaagtagtatatcccgaccatttccgtaatcctacaactcccgtcgtctttggtgtgctgaacgaatttcgacggttttccttttacctattcttatacgagcggtgatctatttcccaacatgtcttttcctctggcgagctgagcgagatttcctctccttatacgtccatttcatattaataaaagtaattcctaatccacgcgatcctcaatatcattcattcatgtacaaaatatcgtcacatcgacccgaaccgaaagctcgatgcgtagattataaatatattttattaacgaaattaacgagtaatcaaggctaattatcttatcttttgtatgttttgattccaaataaaaatgtcttaaaaagtgaacttttgtcttcggctgattttgttacctggagcaacaaacgcaacgaccgcgttacatattctcgctatctctatagtgacctatcttcgatctgtcttcaatggtatcttctcaggagatttttaagagtcttcaatatgcctacctagcaaatgcctccaatatgcagttagagctttccttatccatattctgttttctcgtgtctattcatttgcctcgttaatatttgtttccagctacaaatagggtcgtaatctatctagtatagcttctctacatttaatggtttgtggttttggtttaactgtaggtgttgtatatctgtgtacacttaggtacagagcacacgtcgcaactattttaaaacaacgtttgaaaactacatagttggaaaagagtttcaggctgatcaactcgtgggtgaaacccccctgcttttatcatgggccgtgcttttactctgctgagataacaaaatagttgcaagtgcaatcgatttcatagttttaaaacagttatgacacattaagaataagatgctattttttgacccccgttgattaggagattaactatttggtttctcactatttctcacactcatctgagactggctagtagttcga

SEQ ID NO: 481 - DNA, 3041 bp, Diabrotica virgifera
gttttcaagctactttttattgtctattcaccgttgcgttggttgtatgtgaaacattttatagtgtataatgccacattggaatatttgtaatcactttacctttgaatatttgaaacattgaaacactgtgtattatgcgtatattttcgtgtaatctgttctttatctataaattgtatttaggtatatctaagtgtttgccgttaaggctatgggtacataattcgcaaatattttacgtgtatccctactttttctgtctttacacggcaaattacgcgtagtaaaattcacactggtatggatatgtaaacattactagaatgtcattctacttgaaaatgtcattattaatttcaagagatgggttttgaatgttcttggataactgttatttttataattgcaaattattaattcagttaataaatgtgataattttttcactaactatgtattcagtgattgtaataatttatttgtacaacaaagactaatactcaatcgaaaaaagagaaaaagtgttaaagtgattttttaataatatattgttatggaacgcttacaattttgaacatctttaaggccggccgttgtatgaaagagaggtccccaaatgccggcgcaacagagagaaaagattctttcccgagagatgctgcctctatcggagaaataacgcaatagatatctaagcgaggccgcaaacggcagaatttttagtgagtcgatagtttagttaagtacagagagtatgcaggtgcggcctcgctaagatgactcgaaatcgttttatatatcaggtgcgaacttttaattttttagtaggcggtttaaggacggggtctcgctgaaaattttacttggataaatactgtgctcgtatctcgtggtaaaatctaaaccaaaagtattggagaaatctattttagtccatgtggtgagaccgctcccgtctgggaaaatttctgattcggtttctttgtggattcctattcaaacatgtcccctctaaacaaatctgaagggtgccgggcggaatttttgggcagaaactgtttaaacaatttttataaacaaatagaaaagatcacgtttttttgccccggaacatatatttttaagtttagtgggtcattctaaacaagaaaggtatcttgtaatttttttcaaaaattgatagttttcgagttatagtcgatttaaaatctgaaaagtgcgaaaatgctcatttacgaggcctaaaaactcatatttaaattagaacttttgaggttgccagattcttaaattgaagtttaaacattcagcttgaagattctaaagagtgattgtgtctaaccctaatttaaaccgtcgtgttttaattgttaaatatacatgtccatccgatttttttgtcggtgcggcgcgctctatttcaaaaatctccagttttcctccaaaaaatattttttctagattttttgggacattttaaataaaataagtttcttgacatttttctcaaaagttaacagttttaaagttaacagtttttaaaagaaactttttatttattctaagggactgtcggccctcggcaataacgttttctttcattctgcgtttaatttttttaaaaatacttattagttttctcagtattcgaaaaaaatgaacacatttaaaacacaggaaaattttgagaggcgacattttgcgtctttccccttaaatttttttgcaacatgaatgaagcaccctgtgtattaaattaaaaatatacattcaagtaaataaacaataatattttgttatatcaaagttttcaaacaaattttatatagggtgtctgcataactagcaaccatatggtttcatattaattttattaattattaattttaattattattaatacattattaattttacgggaaaaggtaatacccaagttaaatacataatcataattcatagagtatgtgtttacttaagggtaattatcattagagtaaaagattcactttataggagtaaaactgctaagttgcgttatgggtactaatttatgtttctagtcgtcaaggagtgtgatttgatgtttgattttcatatggcaagcgtaattcaatctatctacatacttcaaagaaaaaaattaggaagggacaataaaatgtaatatattttagacggagtacgttcaacatttcaggacgggaataataaatcattttttcagtaataacacaatatttgatttttgagatttctctagctgttcatgaaataaataaaattgtatataaaaaatgattatctcatttaaaataaatatttcttatttaccaatccttcggtttggcgccccattggggttacgcacgcgtgcaccgcacgcgttgcacgcccggttacggggccctgatattattccaagtacgcaataatgaaccacccgcatccctcaaaacggtattactctctatacagtaccgaaatttccaaaggaaagtttcaaacgggccataccgctcctgaattttgcacatgtataaatatttttcgtagcgccatcttatacataatggctacattaacagagcttagattcttacagattcctatactgtattcgtattatatgtcgaatatttacgtttcacatgccaatttttattaatttcagaaatttattttaaaagtacaccacgcaaaaagtactttattaattcacatttttttaacgttatatccttccattacttctactgtagtgctaaacggaattttatcatgaaattcatttaaatacttaagtaatttagatataaacgctcttatatttattgagaaaaaggcaaaactttcacatttttttataaacaatacacaacaggtaggataacaaaaatatggctggaactagcgacatatattgttagtaggttaagcatttttcggtatacatatatgctctagattatgagtggtgtactttataaaggtgatgggatcggctatacttataacattaccaatggcccgcctta

SEQ ID NO: 482 - DNA, 2462 bp, Diabrotica virgifera
caattatttcagttcaattcttgtttatttttctatggatgctatacaatgtgcaacttctctcactacttacatacattcaaaatgaacaatttctcaggcagtgagaaagtcggggatgcagtgagaaatattttttctcacgggttcaccgccggtttacatatatatgatcgccatttccatggtaacatgcacaatacaaacacaattatttttgtcaaataaaatgtgttcaaacttgtcaaaacttatcaaaaattacattttaagactgttcatctgtgaattataattttaaataaataaagtatataaatattaagaatattaaatacatagtgtatatatgtattttatttcaatttaggcatataatatacctaaaagcacctaaattatttaattttgaagtttgaactcttgacaaaaacgcatctatagaaaaagtacagtgtacaacacgagagaaaatgacacatttctctctcgcttgatttgcggcactcgcatcgtgcctcggctcgtgccaacaaacttctatgctcgtgagaaatatgtcttttttctctcttgttgtacaatataatatttttgtatatacccccttatttataccacatctactaacttgcatgtagtataaactagctacaaaatttgtttgtgttggtattttcgatagtcaatgtgaaatattcacttcaaccttattaaagttggagtatgtcttttggtatttaaagtagaattttcgttcaataaaggaggccctggcgacagcactatgtagtactactttaatattttcttttaaatgaattgtgttaaccctttcagctctggtgacgcgtacgcgcgtccaaatatgactatagattagtgcagtggacgcgtaagtgcgtccatgatacgtaagtattcaaacgaaattatttctgacgatacacaggagctaaggttggaaatattaaagcggagctgaaagggttaatatacttaatatctctatgcccacgcttcattcaaacttcatacaatatagaatgtatgtatattttggttaatttatttttaactttaataatctgctttaaatgggatttaaaaattaaattcatatatattgatgtaaatgatattgttctcgccattgctaatggccagttgcaccattctaaaaaacgatcaatgattatttttcaaacgagttgtaccattctaaaaaaacactattggtttacaaaccgacaatatataagtggcaacatcgtattagtacaccaacggttaaactgcaaaaacctcgtaagtcagttttatgtaactttagaggagagacgaaaaacattttggctcctttattaagattcaatttattcgttttgtgtgtgtaggttcgttttaggtaacgattccattaccattaagtaaaattcagtaatattgttttttttttgtcaaacagttacgaggttttgttatttaaaatcttaaaactatcattaaacttacgaggttttgtctcataaaaatgcagtttacgaggttttgtaacttaaaatcttacttatgaggtttttgtagatgtcgctagtaccattaaatttaaatattaaatacttacaagctttcgtagattaaaagatatgtaaaagtataaaccaacaaagtataaaagtagtaatggaccaaaaatcgacttacgaggttttgcagtttaaccgtcgacacattatcagagtttggtctgttaaggaagattgtcatagtaagctttgtagggttatgttatgaaattgaattgccagttattgaaccagcacagttttagttgatatctaaaaataattaaaaatgcatttctcgtcattcagataaataatggtatatacatataccttgctgtaaaatcagcttcattatactttataacactattatacaaatcattgtgttcttttacagatcttatattatttgctaacatataaaaatatgtataatgcatactatcttcccaatcgtcagaaggcgccgataataaatcgatttttctaaagtatactataatgatactttaaaaactaagctaggaacacataaagtagtgtagaagttaaagaaggttaaaaacagtcgattgtcgatgtggcacgctacatttctagctgctaacactatatccgacatcattactgtttccactagtcaacagttatctcaatgtaaaaaatacgtttagcctctcctacaaatgtgacagtatctctgtattagacaagtatatttttacatttatttggtttccttacatttaataaatataactctttagtattatctttcatttgtccctgctaaatttctcattgtacaatttacattaagataaaacttacctacacctgagacagagctaatcgaagctaacagcaagaacttttcatgttgccttcata

SEQ ID NO: 483 - DNA, 1935 bp, Diabrotica virgifera
tgatcagactatgcttaaaacggaattacatattacgaatacaaggcagcatatatcgtattataaaaaatatgtcattgacgaaatggcaaaagcaaaaggaataacggtattctgtttgccaccttatcattgtcaactaaatccaatagagttaatatggactcgagtaaaaggtgaagtggccagacagaatacaacttttaaattgaagggtgtcaaacaacttttattaaattccataaaaaacgtaacgaaagataactggaccaatgcgtaaaccacgtaaaaaaattaagaaagattgtgaaccgttgataatatcattgaaaaatcttgtcaatatatactcactccaatcgggccggaccacgaatctgaccacagaagaagaggaagagacgaaaatccataatttataagtaaatcagtaagtttttaatttatttacattacttaaatgttagatagcaataagatggatcggctttaacattaattttatttaacattatgaatctgcccctttttgattctcccaacactgacccatgatttttcagacctgttaggtatacagggtgtccccgaaaatagtgcgttccttaaaggtataggtagaaggcacaatgtagagcaaaaaagtcttataacattttttctaaattgatccgtttgaccaaaaaacgaaaatacattttgatatgcaaattgaagtctggcaacaacgcgcaactcaaaaatctaaagattaaaaaagtaggtttgtaggtcagttgcatctggtaggtaaaataatgtaaatatcaaccaaacccatatccattattttgcaggtaggtacctacgatgtcaacaaccccaaaaatcacacctcaaagtaaataaacaaggggttattaggttaaatttccacagtcacagcaagttcttctaggctacgttgccatgtcatttaaattgatgaaaataaaaattcacttatatggagaacaatgtaattttttcttggaaacggttaactttagaaaaaaatgttataggacttttttgttctaaattgtgtattatatccataccttaaaggaacgcactattttcggggacaccggacaccctgtgtagaacctggttgtccaatccatctaccacgatatttctcatctaggtaacgtcttacctctagatacacttcagtggttaagttagcattgagaaaaacaggctcaactatgtggtttcccaaatacctacccaagcatttacttttctgtgaattgagtatgtttttcatgaaacacgtgaggatctgtgtcactcctaataccccacattgtgtgttagcatttccattgaaggaaatgtactttcgtcactaaaacaaattgtttttatgtaatctgactgttggttaatttgattggacatattttcacggaattctagtcttcactcggccactttgatgatttcacagatagaacaacttaagctatagaagaagaccatttctgcaatgatgtcaattttttgtcatcactaattgttggttgatcagatcgtttggtatctcgaacactacctgtttcttcaaacttccgaaggagctcccttaaataagtcctcgatatagggcgatcgggttactgacacagctgctacagtacgtaccattctgcttattaaatatttaaacgtctcgttaaacagtaattaaactaaatattcaaggtataaacactttcgtaaaaacttaagaaagctaaaaacaactagagaattgaaaaacgttaacttttttgacaaataaccaggggcggacgttagaatctgtatttagttaaatacgaaaccataattttggtatttatttaatttattcatcaaatcagcttacacccaaaccaaattgtattattgtataggtatgttcaa

SEQ ID NO: 484 - DNA, 1944 bp, Diabrotica virgifera
tgatcagactatgcttaaaacggaattacatattacgaatacaaggcagcatatatcgtattataaaaaatatgtcattgacgaaatggcaaaagcaaaaggaataacggtattctgtttgccaccttatcattgtcaactaaatccaatagagttaatatggactcgagtaaaaggtgaagtggccagacagaatacaacttttaaattgaagggtgtcaaacaacttttattaaattccataaaaaacgtaacgaaagataactggaccaatgcgtaaaccacgtaaaaaaattaagaaagattgtgaaccgttgataatatcattgaaaaatcttgtcaatatatactcactccaatcgggccggaccacgaatctgaccacagaagaagaggaagagacgaaaatccataatttataagtaaatcagtaagtttttaatttatttacattacttaaatgttagatagcaataagatggatcggctttaacattaattttatttaacattatgaatctgcccctttttgattctcccaacactgacccatgatttttcagacctgttaggtatacagggtgtccccgaaaatagtgcgttccttaaaggtataggtagaaggcacaatgtagagcaaaaaagtcttataacattttttctaaattgatccgtttgaccaaaaaacgaaaatacattttgatatgcaaattgaagtctggcaacaacgcgcaactcaaaaatctaaagattaaaaaagtaggtttgtaggtcagttgcatctggtaggtaaaataatgtaaatatcaaccaaacccatatccattattttgcaggtaggtacctacgatgtcaacaaccccaaaaatcatacctcaaagtaaataaacaggttaaattacagggtattaggttaaatttccacagtcacagcaagttcttctaggctacgttgccatgtcattcaaatttatgaaaataaaaattcacttgtatggagaacaatgtaattttttcttggaaacggttaactttagaaaaaaatgttataggacttttttgttctaaattgtgtattatatccataccttaaaggaacgcactattttcggggacaccggacaccctgtgtagaacctggttgtccaatccatctaccacgatatttctcatctaggtaacgtcttacctctagatacacttcagtggttaagttagcattgagaaaaacaggctcaactatgtggtttcccaaatacctacccaagcatttacttttctgtgaattgagtatgtttttcatgaaacacgtgaggatctgtgtcactcctaataccccacattgtgtgttagcatttccattgaaggaaatgtactttcgtcactaaaacaaattgtttttatgtaatctgactgttggttaatttgattggacatattttcacggaattctagtcttcactcggccactttgatgatttcacagatagaacaacttaagctatagaagaagaccatttctgcaatgatgtcaattttttgtcatcactaattgttggttgatcagatcgtttggtatctcgaacactacctgtttcttcaaacttccgaaggagctcccttaaataagtcctcgatatagggcgatcgggttactgacacagctgctacagtacgtaccattctgcttattaaatatttaaacgtctcgttaaacagtaattaaactaaatattcaaggtataaacactttcgtaaaaacttaagaaagctaaaaacaactagagaattgaaaaacgttaacttttttgacaaataaccaggggcggacgttagaatctgtatttagttaaatacgaaaccataattttggtatttatttaatttattcatcaaatcagcttacacccaaaccaaattgtattattgtataggtatgttcaa

SEQ ID NO: 485 - DNA, 1933 bp, Diabrotica virgifera
ttatctcctgtctttgtttgtcaggagaatttgtggacaccctgtacattgttaatattatatattagtgtgtaaataccacgagcgtatgttaaaattttgaaaatttgtcattttaatgaccagcagtgccaaaacaattttgtcttcgtaaatatttgattgttgactatacagggtgtccccgaaaatagtgtgttccttggaggtatgggtagaaggcacaatgtagagcaggaaagtcataacatttttttctaaattcagccgtttgaccaaaaacgaaaatacattttgatatgcaaactgaagtctggcaacaacgtgtaattcaaagacagtcacaatagtaggtttgtaggtcagtagttgtatctatgtaaatatcaacaaaacctgcaggggtctagtgtttacatttcttcaccctgtccgtggttgtcccctcacatcaaacaaatcaagaatttggtatgttattgacattgaatatttggcataattggttatctagttttattctgtaccaaaagaacgggcatttcttatttcttaacaagtaggcacaacgtgaaatgtggtttcgtcacgacggagccccagagctgtgaaaaatcttcaggataccacgtttaaaatcagaaaatcgacatacgtaggtacaaataatttttcctaagtgcatttacattttaggaattaaaccatagttacttaagtaaaagttataatttatgtaaaatttcgagccctaattataaaaccttcattacttcagataatagcaaaaatgccacattattaaagcaagaaataattattttgcaggtagttacctaccgatgtcaacaaccccaaaaatcacacctcaaatagtaaataaacaaggggttccattaggttaaattttcaacagtcacaacaagttcttctaggctacgttgccatgtcatttaaattgatgaaaataaaaattcacttatatggagaacaatgtaattttttcttggaaacggttaactttagaaaaaaatgttataggacttttttgttctaaattgtgtattatatccataccttaaaggaacgcactattttcggggacaccggacaccctgtgtagaacctggttgtccaatccatctaccacgatatttctcatctaggtaacgtcttacctctagatacacttcagtggttaagttagcattgagaaaaacaggctcaactatgtggtttcccaaatacctacccaagcatttacttttctgtgaattgagtatgtttttcatgaaacacgtgaggatctgtgtcactcctaataccccacattgtgtgttagcatttccattgaaggaaatgtactttcgtcactaaaacaaattgtttttatgtaatctgactgttggttaatttgattggacatattttcacggaattctagtcttcactcggccactttgatgatttcacagatagaacaacttaagctatagaagaagaccatttctgcaatgatgtcaattttttgtcatcactaattgttggttgatcagatcgtttggtatctcgaacactacctgtttcttcaaacttccgaaggagctcccttaaataagtcctcgatatagggcgatcgggttactgacacagctgctacagtacgtaccattctgcttattaaatatttaaacgtctcgttaaacagtaattaaactaaatattcaaggtataaacactttcgtaaaaacttaagaaagctaaaaacaactagagaattgaaaaacgttaacttttttgacaaataaccaggggcggacgttagaatctgtatttagttaaatacgaaaccataattttggtatttatttaatttattcatcaaatcagcttacacccaaaccaaattgtattattgtataggtatgttcaa

SEQ ID NO: 486 - DNA, 3854 bp, Diabrotica virgifera
tgatcagactatgcttaaaacggaattacatattacgaatacaaggcagcatatatcgtattataaaaaatatgtcattgacgaaatggcaaaagcaaaaggaataacggtattctgtttgccaccttatcattgtcaactaaatccaatagagttaatatggactcgagtaaaaggtgaagtggccagacagaatacaacttttaaattgaagggtgtcaaacaacttttattaaattccataaaaaacgtaacgaaagataactggaccaatgcgtaaaccacgtaaaaaaattaagaaagattgtgaaccgttgataatatcattgaaaaatcttgtcaatatatactcactccaatcgggccggaccacgaatctgaccacagaagaagaggaagagacgaaaatccataatttataagtaaatcagtaagtttttaatttatttacattacttaaatgttagatagcaataagatggatcggctttaacattaattttatttaacattatgaatctgcccctttttgattctcccaacactgacccatgatttttcagacctgttaggtatacagggtgtccccgaaaatagtgcgttccttaaaggtataggtagaaggcacaatgtagagcaaaaaagtcttataacattttttctaaattgatccgtttgaccaaaaaacgaaaatacattttgatatgcaaattgaagtctggcaacaacgcgcaactcaaaaatctaaagattaaaaaagtaggtttgtaggtcagttgcatctggtaggtaaaataatgtaaatatcaaccaaacccatatccattattttgcaggtaggtacctacgatgtcaacaaccccaaaaatcacacctcaaagtaaataaacaaggggttattaggttaaatttccacagtcacagcaagttcttctaggctacgttgccatgtcattcaaatttatgaaaataaaaattcacttatatagagaacaacgtaatttttttcttggaaacggttaaggctatgggtacataattcgcaaatattttacgtgtatccctactttttctgtctttacacggcaaattacgcgtagtaaaattcacactggtatggatatgtaaacattactagaatgtcattctacttgaaaatgtcattattaatttcaagagatgggttttgaatgttcttggataactgttatttttataattgcaaattattaattcagttaataaatgtgataattttttcactaactatgtattcagtgattgtaataatttatttgtacaacaaagactaatactcaatcgaaaaaagagaaaaagtgttaaagtgattttttaataatatattgttatggaacgcttacaattttgaacatctttaaggccggccgttgtatgaaagagaggtccccaaatgccggcgcaacagagagaaaagattctttcccgagagatgctgcctctatcggagaaataacgcaatagatatctaagcgaggccgcaaacggcagaatttttagtgagtcgatagtttagttaagtacagagagtatgcaggtgcggcctcgctaagatgactcgaaatcgttttatatatcaggtgcgaacttttaattttttagtaggcggtttaaggacggggtctcgctgaaaattttacttggataaatactgtgctcgtatctcgtggtaaaatctaaaccaaaagtattggagaaatctattttagtccatgtggtgagaccgctcccgtctgggaaaatttctgattcggtttctttgtggattcctattcaaacatgtcccctctaaacaaatctgaagggtgccgggcggaatttttgggcagaaactgtttaaacaatttttataaacaaatagaaaagatcacgtttttttgccccggaacatatatttttaagtttagtgggtcattctaaacaagaaaggtatcttgtaatttttttcaaaaattgatagttttcgagttatagtcgatttaaaatctgaaaagtgcgaaaatgctcatttacgaggcctaaaaactcatatttaaattagaacttttgaggttgccagattcttaaattgaagtttaaacattcagcttgaagattctaaagagtgattgtgtctaaccctaatttaaaccgtcgtgttttaattgttaaatatacatgtccatccgatttttttgtcggtgcggcgcgctctatttcaaaaatctccagttttcctccaaaaaatattttttctagattttttgggacattttaaataaaataagtttcttgacatttttctcaaaagttaacagttttaaagttaacagtttttaaaagaaactttttatttattctaagggactgtcggccctcggcaataacgttttctttcattctgcgtttaatttttttaaaaatacttattagttttctcagtattcgaaaaaaatgaacacatttaaaacacaggaaaattttgagaggcgacattttgcgtctttccccttaaatttttttgcaacatgaatgaagcaccctgtgtattaaattaaaaatatacattcaagtaaataaacaataatattttgttatatcaaagttttcaaacaaattttatatagggtgtctgcataactagcaaccatatggtttcatattaattttattaattattaattttaattattattaatacattattaattttacgggaaaaggtaatacccaagttaaatacataatcataattcatagagtatgtgtttacttaagggtaattatcattagagtaaaagattcactttataggagtaaaactgctaagttgcgttatgggtactaatttatgtttctagtcgtcaaggagtgtgatttgatgtttgattttcatatggcaagcgtaattcaatctatctacatacttcaaagaaaaaaattaggaagggacaataaaatgtaatatattttagacggagtacgttcaacatttcaggacgggaataataaatcattttttcagtaataacacaatatttgatttttgagatttctctagctgttcatgaaataaataaaattgtatataaaaaatgattatctcatttaaaataaatatttcttatttaccaatccttcggtttggcgccccattggggttacgcacgcgtgcaccgcacgcgttgcacgcccggttacggggccctgatattattccaagtacgcaataatgaaccacccgcatccctcaaaacggtattactctctatacagtaccgaaatttccaaaggaaagtttcaaacgggccataccgctcctgaattttgcacatgtataaatatttttcgtagcgccatcttatacataatggctacattaacagagcttagattcttacagattcctatactgtattcgtattatatgtcgaatatttacgtttcacatgccaatttttattaatttcagaaatttattttaaaagtacaccacgcaaaaagtactttattaattcacatttttttaacgttatatccttccattacttctactgtagtgctaaacggaattttatcatgaaattcatttaaatacttaagtaatttagatataaacgctcttatatttattgagaaaaaggcaaaactttcacatttttttataaacaatacacaacaggtaggataacaaaaatatggctggaactagcgacatatattgttagtaggttaagcatttttcggtatacatatatgctctagattatgagtggtgtactttataaaggtgatgggatcggctatacttataacattaccaatggcccgcctta

SEQ ID NO: 487 - DNA, 1684 bp, Diabrotica virgifera
tgatcagactatgcttaaaacggaattacatattacgaatacaaggcagcatatatcgtattataaaaaatatgtcattgacgaaatggcaaaagcaaaaggaataacggtattctgtttgccaccttatcattgtcaactaaatccaatagagttaatatggactcgagtaaaaggtgaagtggccagacagaatacaacttttaaattgaagggtgtcaaacaacttttattaaattccataaaaaacgtaacgaaagataactggaccaatgcgtaaaccacgtaaaaaaattaagaaagattgtgaaccgttgataatatcattgaaaaatcttgtcaatatatactcactccaatcgggccggaccacgaatctgaccacagaagaagaggaagagacgaaaatccataatttataagtaaatcagtaagtttttaatttatttacattacttaaatgttagatagcaataagatggatcggctttaacattaattttatttaacattatgaatctgcccctttttgattctcccaacactgacccatgatttttcagacctgttaggtatacagggtgtccccgaaaatagtgcgttccttaaaggtataggtagaaggcacaatgtagagcaaaaaagtcttataacattttttctaaattgatccgtttgaccaaaaaacgaaaatacattttgatatgcaaattgaagtctggcaacaacgcgcaactcaaaaatctaaagattaaaaaagtaggtttgtaggtcagttgcatctggtaggtaaaataatgtaaatatcaaccaaacccatatccattattttgcaggtaggtacctacgatgtcaacaaccccaaaaatcacacctcaaagtaaataaacaaggggttattaggttaaatttccacagtcacagcaagttcttctaggctacgttgccatgtcattcaaatttatgaaaataaaaattcacttatatagagaacaacgtaatttttttcttggaaacggttaaggctatgggtacataattcgcaaatattttacgtgtatccctactttttctgtctttacacggcaaattacgcgtagtaaaattcacactggtatggatatgtaaacattactagaatgtcattctacttgaaaatgtcattattaatttcaagagatgggttttgaatgttcttggataactgttatttttataattgcaaattattaattcagttaataaatgtgataattttttcactaactatgtattcagtgattgtaataatttatttgtacaacaaagactaatactcaatcgaaaaaagagaaaaagtgttaaagtgattttttaataatatattgttatggaacgcttacaattttgaacatctttaacaacaaaatacttgaattacagaatatattatcctgatgtattctctgcttggatcttccacaaataatacacaataaataactttttattaagttcacgtcttaaatcaatcatttatcaaatacattatatatcaataatatttaatcaataactcaatatattcccgatgcaatgtcaaatatttaaaattctcactgattgtcagtgtctgactgacaatatatgctgacaatattatattcggctgagtgcgttgtaagacaaagatagatttggaaaa

SEQ ID NO: 488 - DNA, 1782 bp, Diabrotica virgifera
caattatttcagttcaattcttgtttatttttctatggatgctatacaatgtgcaacttctctcactacttacatacattcaaaatgaacaatttctcaggcagtgagaaagtcggggatgcagtgagaaatattttttctcacgggttcaccgccggtttacatatatatgatcgccatttccatggtaacatgcacaatacaaacacaattatttttgtcaaataaaatgtgttcaaacttgtcaaaacttatcaaaaattacattttaagactgttcatctgtgaattataattttaaataaataaagtatataaatattaagaatattaaatacatagtgtatatatgtattttatttcaatttaggcatataatatacctaaaagcacctaaattatttaattttgaagtttgaactcttgacaaaaacgcatctatagaaaaagtacagtgtacaacacgagagaaaatgacacatttctctctcgcttgatttgcggcactcgcatcgtgcctcggctcgtgccaacaaacttctatgctcgtgagaaatatgtcttttttctctcttgttgtacaatataatatttttgtatatacccccttatttataccacatctactaacttgcatgtagtataaactagctacaaaatttgtttgtgttggtattttcgatagtcaatgtgaaatattcacttcaaccttattaaagttggagtatgtcttttggtatttaaagtagaattttcgttcaataaaggaggccctggcgacagcactatgtagtactactttaatattttcttttaaatgaattgtgttaaccctttcagctctggtgacgcgtacgcgcgtccaaatatgactatagattagtgcagtggacgcgtaagtgcgtccatgatacgtaagtattcaaacgaaattatttctgacgatacacaggagctaaggttggaaatattaaagcggagctgaaagggttaatatacttaatatctctatgcccacgcttcattcaaacttcatacaatatagaatgtatgtatattttggttaatttatttttaactttaataatctgctttaaatgggatttaaaaattaaattcatatatattgatgtaaatgatattgttctcgccattgctaatggccagttgcaccattctaaaaaacgatcaatgattatttttcaaacgagttgtaccattctaaaaaaacactattggtttacaaaccgacaatatataagtggcaacatcgtattagtacaccaacggttaaactgcaaaaacctcgtaagtcagttttatgtaactttagaggagagacgaaaaacattttggctcctttattaagattcaatttattcgttttgtgtgtgtaggttcgttttaggtaacgattccattaccattaagtaaaattcagtaatattgtttttttttttaagtgacttacgaggtttttttacttaaaatcttaaactatcgttaaacttacgaggttttgtctcataaaaatgaaacttacgaggttttgcaacttaaaattttacttatgagctttttgtagatgtcgctagtaccattaaatttaaatattgacttacaagcttccgtagtttaaaagatatataaaagaataaaccaaaaacgtataaaagtcataattgaccaaaagtcaactcacgaggttttgcagtttaaccatcgatagggtgttcaattaacaaaaagataagttttttcactctgttgatatgggtggcc

SEQ ID NO: 489 - DNA, 1626 bp, Diabrotica virgifera
tatgcagtatatgcattgtcagacagtattaccagtaaatctaattatttttatcaaacaatccgcaaaaaaccatcgtttatgactctatagtgccccccatagatgaaggggcgcacgcatcatattcataaatttatataaaatacgctcacagctgatttttgcagtactgtttgataaaatattataattaactggtaatagtctgacaaatttttaagagtactccagttgttggaggcgccaacgtttagaatcctctctacagggtgtccccgaaaatagtgcgttccttaaaggtataggtagaaggcacaatgtagagcaaaaaagtcttataacattttttctaaattgatccgtttgaccaaaaaacgaaaatacattttgatatgcaaattgaagtctggcaacaacgcgcaactcaaaaatctaaagattaaaaaagtaggtttgtaggtcagttgcatctggtaggtaaaataatgtaaatatcaaccaaacccatatccattattttgcaggtaggtacctacgatgtcaacaaccccaaaaatcacacctcaaagtaaataaacaaggggttattaggttaaatttccacagtcacagcaagttcttctaggctacgttgccatgtcatttaaattgatgaaaataaaaattcacttatatggagaacaatgtaattttttcttggaaacggttaactttagaaaaaaatgttataggacttttttgttctaaattgtgtattatatccataccttaaaggaacgcactattttcggggacaccggacaccctgtgtagaacctggttgtccaatccatctaccacgatatttctcatctaggtaacgtcttacctctagatacacttcagtggttaagttagcattgagaaaaacaggctcaactatgtggtttcccaaatacctacccaagcatttacttttctgtgaattgagtatgtttttcatgaaacacgtgaggatctgtgtcactcctaataccccacattgtgtgttagcatttccattgaaggaaatgtactttcgtcactaaaacaaattgtttttatgtaatctgactgttggttaatttgattggacatattttcacggaattctagtcttcactcggccactttgatgatttcacagatagaacaacttaagctatagaagaagaccatttctgcaatgatgtcaattttttgtcatcactaattgttggttgatcagatcgtttggtatctcgaacactacctgtttcttcaaacttccgaaggagctcccttaaataagtcctcgatatagggcgatcgggttactgacacagctgctacagtacgtaccattctgcttattaaatatttaaacgtctcgttaaacagtaattaaactaaatattcaaggtataaacactttcgtaaaaacttaagaaagctaaaaacaactagagaattgaaaaacgttaacttttttgacaaataaccaggggcggacgttagaatctgtatttagttaaatacgaaaccataattttggtatttatttaatttattcatcaaatcagcttacacccaaaccaaattgtattattgtataggtatgttcaa

SEQ ID NO: 490 - DNA, 1682 bp, Diabrotica virgifera
ttatctcctgtctttgtttgtcaggagaatttgtggacaccctgtacattgttaatattatatattagtgtgtaaataccacgagcgtatgttaaaattttgaaaatttgtcattttaatgaccagcagtgccaaaacaattttgtcttcgtaaatatttgattgttgactatacagggtgtccccgaaaatagtgtgttccttggaggtatgggtagaaggcacaatgtagagcaggaaagtcataacatttttttctaaattcagccgtttgaccaaaaacgaaaatacattttgatatgcaaactgaagtctggcaacaacgtgtaattcaaagacagtcacaatagtaggtttgtaggtcagtagttgtatctatgtaaatatcaacaaaacctgcaggggtctagtgtttacatttcttcaccctgtccgtggttgtcccctcacatcaaacaaatcaagaatttggtatgttattgacattgaatatttggcataattggttatctagttttattctgtaccaaaagaacgggcatttcttatttcttaacaagtaggcacaacgtgaaatgtggtttcgtcacgacggagccccagagctgtgaaaaatcttcaggataccacgtttaaaatcagaaaatcgacatacgtaggtacaaataatttttcctaagtgcatttacattttaggaattaaaccatagttacttaagtaaaagttataatttatgtaaaatttcgagccctaattataaaaccttcattacttcagataatagcaaaaatgccacattattaaagcaagaaataattattttgcaggtagttacctaccgatgtcaacaaccccaaaaatcacacctcaaatagtaaataaacaaggggttccattaggttaaattttcaacagtcacaacaagttcttctaggctacgttgccatgtcattcaaatttatgaaaataaaaattcacttatatagagaacaacgtaatttttttcttggaaacggttaaggctatgggtacataattcgcaaatattttacgtgtatccctactttttctgtctttacacggcaaattacgcgtagtaaaattcacactggtatggatatgtaaacattactagaatgtcattctacttgaaaatgtcattattaatttcaagagatgggttttgaatgttcttggataactgttatttttataattgcaaattattaattcagttaataaatgtgataattttttcactaactatgtattcagtgattgtaataatttatttgtacaacaaagactaatactcaatcgaaaaaagagaaaaagtgttaaagtgattttttaataatatattgttatggaacgcttacaattttgaacatctttaacaacaaaatacttgaattacagaatatattatcctgatgtattctctgcttggatcttccacaaataatacacaataaataactttttattaagttcacgtcttaaatcaatcatttatcaaatacattatatatcaataatatttaatcaataactcaatatattcccgatgcaatgtcaaatatttaaaattctcactgattgtcagtgtctgactgacaatatatgctgacaatattatattcggctgagtgcgttgtaagacaaagatagatttggaaaa

SEQ ID NO: 491 - DNA, 1635 bp, Diabrotica virgifera
tatgcagtatatgcattgtcagacagtattaccagtaaatctaattatttttatcaaacaatccgcaaaaaaccatcgtttatgactctatagtgccccccatagatgaaggggcgcacgcatcatattcataaatttatataaaatacgctcacagctgatttttgcagtactgtttgataaaatattataattaactggtaatagtctgacaaatttttaagagtactccagttgttggaggcgccaacgtttagaatcctctctacagggtgtccccgaaaatagtgcgttccttaaaggtataggtagaaggcacaatgtagagcaaaaaagtcttataacattttttctaaattgatccgtttgaccaaaaaacgaaaatacattttgatatgcaaattgaagtctggcaacaacgcgcaactcaaaaatctaaagattaaaaaagtaggtttgtaggtcagttgcatctggtaggtaaaataatgtaaatatcaaccaaacccatatccattattttgcaggtaggtacctacgatgtcaacaaccccaaaaatcatacctcaaagtaaataaacaggttaaattacagggtattaggttaaatttccacagtcacagcaagttcttctaggctacgttgccatgtcattcaaatttatgaaaataaaaattcacttgtatggagaacaatgtaattttttcttggaaacggttaactttagaaaaaaatgttataggacttttttgttctaaattgtgtattatatccataccttaaaggaacgcactattttcggggacaccggacaccctgtgtagaacctggttgtccaatccatctaccacgatatttctcatctaggtaacgtcttacctctagatacacttcagtggttaagttagcattgagaaaaacaggctcaactatgtggtttcccaaatacctacccaagcatttacttttctgtgaattgagtatgtttttcatgaaacacgtgaggatctgtgtcactcctaataccccacattgtgtgttagcatttccattgaaggaaatgtactttcgtcactaaaacaaattgtttttatgtaatctgactgttggttaatttgattggacatattttcacggaattctagtcttcactcggccactttgatgatttcacagatagaacaacttaagctatagaagaagaccatttctgcaatgatgtcaattttttgtcatcactaattgttggttgatcagatcgtttggtatctcgaacactacctgtttcttcaaacttccgaaggagctcccttaaataagtcctcgatatagggcgatcgggttactgacacagctgctacagtacgtaccattctgcttattaaatatttaaacgtctcgttaaacagtaattaaactaaatattcaaggtataaacactttcgtaaaaacttaagaaagctaaaaacaactagagaattgaaaaacgttaacttttttgacaaataaccaggggcggacgttagaatctgtatttagttaaatacgaaaccataattttggtatttatttaatttattcatcaaatcagcttacacccaaaccaaattgtattattgtataggtatgttcaa

SEQ ID NO: 492 - DNA, 1375 bp, Diabrotica virgifera
tatgcagtatatgcattgtcagacagtattaccagtaaatctaattatttttatcaaacaatccgcaaaaaaccatcgtttatgactctatagtgccccccatagatgaaggggcgcacgcatcatattcataaatttatataaaatacgctcacagctgatttttgcagtactgtttgataaaatattataattaactggtaatagtctgacaaatttttaagagtactccagttgttggaggcgccaacgtttagaatcctctctacagggtgtccccgaaaatagtgcgttccttaaaggtataggtagaaggcacaatgtagagcaaaaaagtcttataacattttttctaaattgatccgtttgaccaaaaaacgaaaatacattttgatatgcaaattgaagtctggcaacaacgcgcaactcaaaaatctaaagattaaaaaagtaggtttgtaggtcagttgcatctggtaggtaaaataatgtaaatatcaaccaaacccatatccattattttgcaggtaggtacctacgatgtcaacaaccccaaaaatcacacctcaaagtaaataaacaaggggttattaggttaaatttccacagtcacagcaagttcttctaggctacgttgccatgtcattcaaatttatgaaaataaaaattcacttatatagagaacaacgtaatttttttcttggaaacggttaaggctatgggtacataattcgcaaatattttacgtgtatccctactttttctgtctttacacggcaaattacgcgtagtaaaattcacactggtatggatatgtaaacattactagaatgtcattctacttgaaaatgtcattattaatttcaagagatgggttttgaatgttcttggataactgttatttttataattgcaaattattaattcagttaataaatgtgataattttttcactaactatgtattcagtgattgtaataatttatttgtacaacaaagactaatactcaatcgaaaaaagagaaaaagtgttaaagtgattttttaataatatattgttatggaacgcttacaattttgaacatctttaacaacaaaatacttgaattacagaatatattatcctgatgtattctctgcttggatcttccacaaataatacacaataaataactttttattaagttcacgtcttaaatcaatcatttatcaaatacattatatatcaataatatttaatcaataactcaatatattcccgatgcaatgtcaaatatttaaaattctcactgattgtcagtgtctgactgacaatatatgctgacaatattatattcggctgagtgcgttgtaagacaaagatagatttggaaaa

SEQ ID NO: 493 - DNA, 1338 bp, Diabrotica virgifera
tgatcagactatgcttaaaacggaattacatattacgaatacaaggcagcatatatcgtattataaaaaatatgtcattgacgaaatggcaaaagcaaaaggaataacggtattctgtttgccaccttatcattgtcaactaaatccaatagagttaatatggactcgagtaaaaggtgaagtggccagacagaatacaacttttaaattgaagggtgtcaaacaacttttattaaattccataaaaaacgtaacgaaagataactggaccaatgcgtaaaccacgtaaaaaaattaagaaagattgtgaaccgttgataatatcattgaaaaatcttgtcaatatatactcactccaatcgggccggaccacgaatctgaccacagaagaagaggaagagacgaaaatccataatttataagtaaatcagtaagtttttaatttatttacattacttaaatgttagatagcaataagatggatcggctttaacattaattttatttaacattatgaatctgcccctttttgattctcccaacactgacccatgatttttcagacctgttaggtatacagggtgtccccgaaaatagtgcgttccttaaaggtataggtagaaggcacaatgtagagcaaaaaagtcttataacattttttctaaattgatccgtttgaccaaaaaacgaaaatacattttgatatgcaaattgaagtctggcaacaacgcgcaactcaaaaatctaaagattaaaaaagtaggtttgtaggtcagttgcatctggtaggtaaaataatgtaaatatcaaccaaacccatatccattattttgcaggtaggtacctacgatgtcaacaaccccaaaaatcacacctcaaagtaaataaacaaggggttattaggttaaatttccacagtcacagcaagttcttctaggctacgttgccatgtcatttaaattgatgaaaataaaaattcacttatatggagaacaatgtaattttttcttggaaacggttaactttagaaaaaaatgttataggacttttttgttctaaattgtgtattatatccataccttaaaggaacgcactattttccgggacacagctggaatattgtcctatattagcggaggagaaaaaaaactgttcgagagttggagaacggctattgaaagggaagacatataagattagcaggtcgaaaacaaagtatatgtgatctggacgtacaggaattgtggggaacaacgaattgcttgggaaaactagaaagaataggagaatttaaatacaatggctcctacataacggaaaatgagacactagaccgaa

SEQ ID NO: 494 - DNA, 1347 bp, Diabrotica virgifera
tgatcagactatgcttaaaacggaattacatattacgaatacaaggcagcatatatcgtattataaaaaatatgtcattgacgaaatggcaaaagcaaaaggaataacggtattctgtttgccaccttatcattgtcaactaaatccaatagagttaatatggactcgagtaaaaggtgaagtggccagacagaatacaacttttaaattgaagggtgtcaaacaacttttattaaattccataaaaaacgtaacgaaagataactggaccaatgcgtaaaccacgtaaaaaaattaagaaagattgtgaaccgttgataatatcattgaaaaatcttgtcaatatatactcactccaatcgggccggaccacgaatctgaccacagaagaagaggaagagacgaaaatccataatttataagtaaatcagtaagtttttaatttatttacattacttaaatgttagatagcaataagatggatcggctttaacattaattttatttaacattatgaatctgcccctttttgattctcccaacactgacccatgatttttcagacctgttaggtatacagggtgtccccgaaaatagtgcgttccttaaaggtataggtagaaggcacaatgtagagcaaaaaagtcttataacattttttctaaattgatccgtttgaccaaaaaacgaaaatacattttgatatgcaaattgaagtctggcaacaacgcgcaactcaaaaatctaaagattaaaaaagtaggtttgtaggtcagttgcatctggtaggtaaaataatgtaaatatcaaccaaacccatatccattattttgcaggtaggtacctacgatgtcaacaaccccaaaaatcatacctcaaagtaaataaacaggttaaattacagggtattaggttaaatttccacagtcacagcaagttcttctaggctacgttgccatgtcattcaaatttatgaaaataaaaattcacttgtatggagaacaatgtaattttttcttggaaacggttaactttagaaaaaaatgttataggacttttttgttctaaattgtgtattatatccataccttaaaggaacgcactattttccgggacacagctggaatattgtcctatattagcggaggagaaaaaaaactgttcgagagttggagaacggctattgaaagggaagacatataagattagcaggtcgaaaacaaagtatatgtgatctggacgtacaggaattgtggggaacaacgaattgcttgggaaaactagaaagaataggagaatttaaatacaatggctcctacataacggaaaatgagacactagaccgaa

SEQ ID NO: 495 - DNA, 1336 bp, Diabrotica virgifera
ttatctcctgtctttgtttgtcaggagaatttgtggacaccctgtacattgttaatattatatattagtgtgtaaataccacgagcgtatgttaaaattttgaaaatttgtcattttaatgaccagcagtgccaaaacaattttgtcttcgtaaatatttgattgttgactatacagggtgtccccgaaaatagtgtgttccttggaggtatgggtagaaggcacaatgtagagcaggaaagtcataacatttttttctaaattcagccgtttgaccaaaaacgaaaatacattttgatatgcaaactgaagtctggcaacaacgtgtaattcaaagacagtcacaatagtaggtttgtaggtcagtagttgtatctatgtaaatatcaacaaaacctgcaggggtctagtgtttacatttcttcaccctgtccgtggttgtcccctcacatcaaacaaatcaagaatttggtatgttattgacattgaatatttggcataattggttatctagttttattctgtaccaaaagaacgggcatttcttatttcttaacaagtaggcacaacgtgaaatgtggtttcgtcacgacggagccccagagctgtgaaaaatcttcaggataccacgtttaaaatcagaaaatcgacatacgtaggtacaaataatttttcctaagtgcatttacattttaggaattaaaccatagttacttaagtaaaagttataatttatgtaaaatttcgagccctaattataaaaccttcattacttcagataatagcaaaaatgccacattattaaagcaagaaataattattttgcaggtagttacctaccgatgtcaacaaccccaaaaatcacacctcaaatagtaaataaacaaggggttccattaggttaaattttcaacagtcacaacaagttcttctaggctacgttgccatgtcatttaaattgatgaaaataaaaattcacttatatggagaacaatgtaattttttcttggaaacggttaactttagaaaaaaatgttataggacttttttgttctaaattgtgtattatatccataccttaaaggaacgcactattttccgggacacagctggaatattgtcctatattagcggaggagaaaaaaaactgttcgagagttggagaacggctattgaaagggaagacatataagattagcaggtcgaaaacaaagtatatgtgatctggacgtacaggaattgtggggaacaacgaattgcttgggaaaactagaaagaataggagaatttaaatacaatggctcctacataacggaaaatgagacactagaccgaa

SEQ ID NO: 496 - DNA, 1265 bp, Diabrotica virgifera
caattatttcagttcaattcttgtttatttttctatggatgctatacaatgtgcaacttctctcactacttacatacattcaaaatgaacaatttctcaggcagtgagaaagtcggggatgcagtgagaaatattttttctcacgggttcaccgccggtttacatatatatgatcgccatttccatggtaacatgcacaatacaaacacaattatttttgtcaaataaaatgtgttcaaacttgtcaaaacttatcaaaaattacattttaagactgttcatctgtgaattataattttaaataaataaagtatataaatattaagaatattaaatacatagtgtatatatgtattttatttcaatttaggcatataatatacctaaaagcacctaaattatttaattttgaagtttgaactcttgacaaaaacgcatctatagaaaaagtacagtgtacaacacgagagaaaatgaaatatttctctctcgcttgatttgcgtgcgttagtgagaaatatttctttttctctcttgttgtacaatatactatttattaacgaaattaacgagtaattaaggctaattatcttttatatgctttgattccaaataaaaatgtcttaaaaagtgaacttttgtcttcggctgattttgttacctggagcaacaaacgcaacgaccgcgttacatattctcgctatctctatagtgacctatcttcgatctgtcttcaatggtatcttctcaggagatttttaagagtcttcaatatgcctacctagcaaatgcctccaatatgcagttagagctttccttatccatattctgttttctcgtgtctattcatttgcctcgttaatatttgtttccagctacaaatagggtcgtaatctatctagtatagcttctctacatttaatggtttgtggttttggtttaactgtaggtgttgtatatctgtgtacacttaggtacagagcacacgtcgcaactattttaaaacaacgtttgaaaactacatagttggaaaagagtttcaggctgatcaactcgtgggtgaaacccccctgcttttatcatgggccgtgcttttactctgctgagataacaaaatagttgcaagtgcaatcgatttcatagttttaaaacagttatgagattagctatttggtttctcactatttctcacactcgtctgagactggctagtagttcgaaaaagattcaacaattttatttttcttcaatccaaagtttctaac

SEQ ID NO: 497 - DNA, 3852 bp, Diabrotica virgifera
ttatctcctgtctttgtttgtcaggagaatttgtggacaccctgtacattgttaatattatatattagtgtgtaaataccacgagcgtatgttaaaattttgaaaatttgtcattttaatgaccagcagtgccaaaacaattttgtcttcgtaaatatttgattgttgactatacagggtgtccccgaaaatagtgtgttccttggaggtatgggtagaaggcacaatgtagagcaggaaagtcataacatttttttctaaattcagccgtttgaccaaaaacgaaaatacattttgatatgcaaactgaagtctggcaacaacgtgtaattcaaagacagtcacaatagtaggtttgtaggtcagtagttgtatctatgtaaatatcaacaaaacctgcaggggtctagtgtttacatttcttcaccctgtccgtggttgtcccctcacatcaaacaaatcaagaatttggtatgttattgacattgaatatttggcataattggttatctagttttattctgtaccaaaagaacgggcatttcttatttcttaacaagtaggcacaacgtgaaatgtggtttcgtcacgacggagccccagagctgtgaaaaatcttcaggataccacgtttaaaatcagaaaatcgacatacgtaggtacaaataatttttcctaagtgcatttacattttaggaattaaaccatagttacttaagtaaaagttataatttatgtaaaatttcgagccctaattataaaaccttcattacttcagataatagcaaaaatgccacattattaaagcaagaaataattattttgcaggtagttacctaccgatgtcaacaaccccaaaaatcacacctcaaatagtaaataaacaaggggttccattaggttaaattttcaacagtcacaacaagttcttctaggctacgttgccatgtcattcaaatttatgaaaataaaaattcacttatatagagaacaacgtaatttttttcttggaaacggttaaggctatgggtacataattcgcaaatattttacgtgtatccctactttttctgtctttacacggcaaattacgcgtagtaaaattcacactggtatggatatgtaaacattactagaatgtcattctacttgaaaatgtcattattaatttcaagagatgggttttgaatgttcttggataactgttatttttataattgcaaattattaattcagttaataaatgtgataattttttcactaactatgtattcagtgattgtaataatttatttgtacaacaaagactaatactcaatcgaaaaaagagaaaaagtgttaaagtgattttttaataatatattgttatggaacgcttacaattttgaacatctttaaggccggccgttgtatgaaagagaggtccccaaatgccggcgcaacagagagaaaagattctttcccgagagatgctgcctctatcggagaaataacgcaatagatatctaagcgaggccgcaaacggcagaatttttagtgagtcgatagtttagttaagtacagagagtatgcaggtgcggcctcgctaagatgactcgaaatcgttttatatatcaggtgcgaacttttaattttttagtaggcggtttaaggacggggtctcgctgaaaattttacttggataaatactgtgctcgtatctcgtggtaaaatctaaaccaaaagtattggagaaatctattttagtccatgtggtgagaccgctcccgtctgggaaaatttctgattcggtttctttgtggattcctattcaaacatgtcccctctaaacaaatctgaagggtgccgggcggaatttttgggcagaaactgtttaaacaatttttataaacaaatagaaaagatcacgtttttttgccccggaacatatatttttaagtttagtgggtcattctaaacaagaaaggtatcttgtaatttttttcaaaaattgatagttttcgagttatagtcgatttaaaatctgaaaagtgcgaaaatgctcatttacgaggcctaaaaactcatatttaaattagaacttttgaggttgccagattcttaaattgaagtttaaacattcagcttgaagattctaaagagtgattgtgtctaaccctaatttaaaccgtcgtgttttaattgttaaatatacatgtccatccgatttttttgtcggtgcggcgcgctctatttcaaaaatctccagttttcctccaaaaaatattttttctagattttttgggacattttaaataaaataagtttcttgacatttttctcaaaagttaacagttttaaagttaacagtttttaaaagaaactttttatttattctaagggactgtcggccctcggcaataacgttttctttcattctgcgtttaatttttttaaaaatacttattagttttctcagtattcgaaaaaaatgaacacatttaaaacacaggaaaattttgagaggcgacattttgcgtctttccccttaaatttttttgcaacatgaatgaagcaccctgtgtattaaattaaaaatatacattcaagtaaataaacaataatattttgttatatcaaagttttcaaacaaattttatatagggtgtctgcataactagcaaccatatggtttcatattaattttattaattattaattttaattattattaatacattattaattttacgggaaaaggtaatacccaagttaaatacataatcataattcatagagtatgtgtttacttaagggtaattatcattagagtaaaagattcactttataggagtaaaactgctaagttgcgttatgggtactaatttatgtttctagtcgtcaaggagtgtgatttgatgtttgattttcatatggcaagcgtaattcaatctatctacatacttcaaagaaaaaaattaggaagggacaataaaatgtaatatattttagacggagtacgttcaacatttcaggacgggaataataaatcattttttcagtaataacacaatatttgatttttgagatttctctagctgttcatgaaataaataaaattgtatataaaaaatgattatctcatttaaaataaatatttcttatttaccaatccttcggtttggcgccccattggggttacgcacgcgtgcaccgcacgcgttgcacgcccggttacggggccctgatattattccaagtacgcaataatgaaccacccgcatccctcaaaacggtattactctctatacagtaccgaaatttccaaaggaaagtttcaaacgggccataccgctcctgaattttgcacatgtataaatatttttcgtagcgccatcttatacataatggctacattaacagagcttagattcttacagattcctatactgtattcgtattatatgtcgaatatttacgtttcacatgccaatttttattaatttcagaaatttattttaaaagtacaccacgcaaaaagtactttattaattcacatttttttaacgttatatccttccattacttctactgtagtgctaaacggaattttatcatgaaattcatttaaatacttaagtaatttagatataaacgctcttatatttattgagaaaaaggcaaaactttcacatttttttataaacaatacacaacaggtaggataacaaaaatatggctggaactagcgacatatattgttagtaggttaagcatttttcggtatacatatatgctctagattatgagtggtgtactttataaaggtgatgggatcggctatacttataacattaccaatggcccgcctta

SEQ ID NO: 498 - DNA, 1265 bp, Diabrotica virgifera
caattatttcagttcaattcttgtttatttttctatggatgctatacaatgtgcaacttctctcactacttacatacattcaaaatgaacaatttctcaggcagtgagaaagtcggggatgcagtgagaaatattttttctcacgggttcaccgccggtttacatatatatgatcgccatttccatggtaacatgcacaatacaaacacaattatttttgtcaaataaaatgtgttcaaacttgtcaaaacttatcaaaaattacattttaagactgttcatctgtgaattataattttaaataaataaagtatataaatattaagaatattaaatacatagtgtatatatgtattttatttcaatttaggcatataatatacctaaaagcacctaaattatttaattttgaagtttgaactcttgacaaaaacgcatctatagaaaaagtacagtgtacaacacgagagaaaatgaaatatttctctctcgcttgatttgcgtgcgttagtgagaaatatttctttttctctcttgttgtacaatatactatttattaacgaaattaacgagtaattaaggctaattatcttttatatgctttgattccaaataaaaatgtcttaaaaagtgaacttttgtcttcggctgattttgttacctggagcaacaaacgcaacgaccgcgttacatattctcgctatctctatagtgacctatcttcgatctgtcttcaatggtatcttctcaggagatttttaagagtcttcaatatgcctacctagcaaatgcctccaatatgcagttagagctttccttatccatattctgttttctcgtgtctattcatttgcctcgttaatatttgtttccagctacaaatagggtcgtaatctatctagtatagcttctctacatttaatggtttgtggttttggtttaactgtaggtgttgtatatctgtgtacacttaggtacagagcacacgtcgcaactattttaaaacaacgtttgaaaactacatagttggaaaagagtttcaggctgatcaactcgtgggtgaaacccccctgcttttatcatgggccgtgcttttactctgctgagataacaaaatagttgcaagtgcaatcgatttcatagttttaaaacagttatgacacattaagaataagatgctattttttgacccccgttgattaggagattaactatttggtttctcactatttctcacactcatctgagactggctagtagttcga

SEQ ID NO: 499 - DNA, 1029 bp, Diabrotica virgifera
tatgcagtatatgcattgtcagacagtattaccagtaaatctaattatttttatcaaacaatccgcaaaaaaccatcgtttatgactctatagtgccccccatagatgaaggggcgcacgcatcatattcataaatttatataaaatacgctcacagctgatttttgcagtactgtttgataaaatattataattaactggtaatagtctgacaaatttttaagagtactccagttgttggaggcgccaacgtttagaatcctctctacagggtgtccccgaaaatagtgcgttccttaaaggtataggtagaaggcacaatgtagagcaaaaaagtcttataacattttttctaaattgatccgtttgaccaaaaaacgaaaatacattttgatatgcaaattgaagtctggcaacaacgcgcaactcaaaaatctaaagattaaaaaagtaggtttgtaggtcagttgcatctggtaggtaaaataatgtaaatatcaaccaaacccatatccattattttgcaggtaggtacctacgatgtcaacaaccccaaaaatcacacctcaaagtaaataaacaaggggttattaggttaaatttccacagtcacagcaagttcttctaggctacgttgccatgtcatttaaattgatgaaaataaaaattcacttatatggagaacaatgtaattttttcttggaaacggttaactttagaaaaaaatgttataggacttttttgttctaaattgtgtattatatccataccttaaaggaacgcactattttccgggacacagctggaatattgtcctatattagcggaggagaaaaaaaactgttcgagagttggagaacggctattgaaagggaagacatataagattagcaggtcgaaaacaaagtatatgtgatctggacgtacaggaattgtggggaacaacgaattgcttgggaaaactagaaagaataggagaatttaaatacaatggctcctacataacggaaaatgagacactagaccgaa

SEQ ID NO: 500 - DNA, 1038 bp, Diabrotica virgifera
tatgcagtatatgcattgtcagacagtattaccagtaaatctaattatttttatcaaacaatccgcaaaaaaccatcgtttatgactctatagtgccccccatagatgaaggggcgcacgcatcatattcataaatttatataaaatacgctcacagctgatttttgcagtactgtttgataaaatattataattaactggtaatagtctgacaaatttttaagagtactccagttgttggaggcgccaacgtttagaatcctctctacagggtgtccccgaaaatagtgcgttccttaaaggtataggtagaaggcacaatgtagagcaaaaaagtcttataacattttttctaaattgatccgtttgaccaaaaaacgaaaatacattttgatatgcaaattgaagtctggcaacaacgcgcaactcaaaaatctaaagattaaaaaagtaggtttgtaggtcagttgcatctggtaggtaaaataatgtaaatatcaaccaaacccatatccattattttgcaggtaggtacctacgatgtcaacaaccccaaaaatcatacctcaaagtaaataaacaggttaaattacagggtattaggttaaatttccacagtcacagcaagttcttctaggctacgttgccatgtcattcaaatttatgaaaataaaaattcacttgtatggagaacaatgtaattttttcttggaaacggttaactttagaaaaaaatgttataggacttttttgttctaaattgtgtattatatccataccttaaaggaacgcactattttccgggacacagctggaatattgtcctatattagcggaggagaaaaaaaactgttcgagagttggagaacggctattgaaagggaagacatataagattagcaggtcgaaaacaaagtatatgtgatctggacgtacaggaattgtggggaacaacgaattgcttgggaaaactagaaagaataggagaatttaaatacaatggctcctacataacggaaaatgagacactagaccgaa

SEQ ID NO: 501 - DNA, 964 bp, Diabrotica virgifera
  SmartBlast Evalue=1E-33; Info=Thioredoxin-like protein n=1 Tax= Graphocephala atropunctata RepID=Q1W2C2_9HEMI
atacgtaattctaacgtgtagaaaagagacgcaaaattgtaatcgtgtgatttctcgagaagggataacacgttagtgccatgcgctacagttgtcctttcataaaagttgctataataaaaagagatagtaaaacgacgttccaatagtattagacgaaggcaagtagttttgttctgttgtgaattttgtgaaatcgtaatcgcttcgccactcgactacagacattcataaatatcacggtctctttgattgacttctgtgttgtcatctccatcttgagagggtcacgtttgttgtattcgtatttcgtgttttaacgttccaaagaaaaacaatccaaaatggttcatcacattaaagataaggatgacttggaagctaaattcaaagaagctggaaccaacttggtagttctcgacttctcagctgcctggtgcggaccttgtaaaatgattagccccaaattggacgaattggctgccgaataccccaacgtcgttattgtaaaaatcgacgttgatgaatgcgaagatctcgctatggaatacaacatcaagtccatgcccacattcattttcctgaagaacggtcaagaaatcgcgaatttcagcggagctaactacgaaagactaaaacaaaccattgaagataacaagtaatgcaaaacccagaatattctgcctaaatatttttttaataaattattcaaaataaatatgtattaatgatattgtagctccgttaaaactatattcgtactgcatagtaattttattttgtacttgttcttgttaatgtcaaatgttttgaaatatttttgaaaagtagtgcctgacgctgttatacacttcatttatctataaatatatatttaagatttacacagttgtcttttaagtatgttaatatattatgtgacatgttgcacatgaaggtaataaaagctgttgctacataaaaa

SEQ ID NO: 502 - DNA, 959 bp, Diabrotica virgifera
  SmartBlast Evalue=1E-33; Info=Thioredoxin-like protein n=1 Tax= Graphocephala atropunctata RepID=Q1W2C2_9HEMI
atacgtaattctaacgtgtagaaaagagacgcaaaattgtaatcgtgtgatttctcgagaagggataacacgttagtgccatgcgctacagttgtcctttcataaaagttgctataataaaaagagatagtaaaacgacgttccaatagtattagacgaaggcaagtagttttgttctgttgtgaattttgtgaaatcgtaatcgcttcgccactcgactacagacattcataaatatcacggtctctttgattgacttctgtgttgtcatctccatcttgagagggtcacgtttgttgtattcgtatttcgtgttttaacgttccaaagaaaaacaatccaaaatggttcatcacattaaagataaggatgacttggaagctaaattcaaagaagctggaaccaacttggtagttctcgacttctcagctgcctggtgcggaccttgtaaaatgattagccccaaattggacgaattggctgccgaataccccaacgtcgttattgtaaaaatcgacgttgatgaatgcgaagatctcgctatggaatacaacatcaagtccatgcccacattcattttcctgaagaacggtcaagaaatcgcgaatttcagcggagctaactacgaaagactaaaacaaaccattgaagataacaagtaatgcaaaacccagaatattctgcctaaatatttttttaataaattattcaaaataaatatgtattaatgatattgtagctccgttaaaactatattcgtactgcatagtaattttattttgtacttgttcttgttaatgtcaaatgttttgaaatatttttgaaaagtagtgcctgacgctgttatacacttcatttatctataaatatatatttaagatttacacagttgtcttttaagtatgttaatatattatgtgacatgttgcacatgaaggtaataaaagctgttgctacat

SEQ ID NO: 503 - DNA, 988 bp, Diabrotica virgifera
tgatcagactatgcttaaaacggaattacatattacgaatacaaggcagcatatatcgtattataaaaaatatgtcattgacgaaatggcaaaagcaaaaggaataacggtattctgtttgccaccttatcattgtcaactaaatccaatagagttaatatggactcgagtaaaaggtgaagtggccagacagaatacaacttttaaattgaagggtgtcaaacaacttttattaaattccataaaaaacgtaacgaaagataactggaccaatgcgtaaaccacgtaaaaaaattaagaaagattgtgaaccgttgataatatcattgaaaaatcttgtcaatatatactcactccaatcgggccggaccacgaatctgaccacagaagaagaggaagagacgaaaatccataatttataagtaaatcagtaagtttttaatttatttacattacttaaatgttagatagcaataagatggatcggctttaacattaattttatttaacattatgaatctgcccctttttgattctcccaacactgacccatgatttttcagacctgttaggtatacagggtgtccccgaaaatagtgcgttccttaaaggtataggtagaaggcacaatgtagagcaaaaaagtcttataacattttttctaaattgatccgtttgaccaaaaaacgaaaatacattttgatatgcaaattgaagtctggcaacaacgcgcaactcaaaaatctaaagattaaaaaagtaggtttgtaggtcagttgcatctggtaggtaaaataatgtaataatgtaatgtaataaggtaaatatcaaccaaaccaatatccattattttgcaggtatgtcaacaaccccaaaaatcacacctcaaagtaaatagacaaggggttataccctaaagaaacgcactattttcggggacaccctgtataaaaacatacactatcagttatgaagacctctgagtact

SEQ ID NO: 504 - DNA, 871 bp, Diabrotica virgifera
gttttcaagctactttttattgtctattcaccgttgcgttggttgtatgtgaaacattttatagtgtataatgccacattggaatatttgtaatcactttacctttgaatatttgaaacattgaaacactgtgtattatgcgtatattttcgtgtaatctgttctttatctataaattgtatttaggtatatctaagtgtttgccgttaaggctatgggtacataattcgcaaatattttacgtgtatccctactttttctgtctttacacggcaaattacgcgtagtaaaattcacactggtatggatatgtaaacattactagaatgtcattctacttgaaaatgtcattattaatttcaagagatgggttttgaatgttcttggataactgttatttttataattgcaaattattaattcagttaataaatgtgataattttttcactaactatgtattcagtgattgtaataatttatttgtacaacaaagactaatactcaatcgaaaaaagagaaaaagtgttaaagtgattttttaataatatattgttatggaacgcttacaattttgaacatctttaacaacaaaatacttgaattacagaatatattatcctgatgtattctctgcttggatcttccacaaataatacacaataaataactttttattaagttcacgtcttaaatcaatcatttatcaaatacattatatatcaataatatttaatcaataactcaatatattcccgatgcaatgtcaaatatttaaaattctcactgattgtcagtgtctgactgacaatatatgctgacaatattatattcggctgagtgcgttgtaagacaaagatagatttggaaaa

SEQ ID NO: 505 - DNA, 679 bp, Diabrotica virgifera
tatgcagtatatgcattgtcagacagtattaccagtaaatctaattatttttatcaaacaatccgcaaaaaaccatcgtttatgactctatagtgccccccatagatgaaggggcgcacgcatcatattcataaatttatataaaatacgctcacagctgatttttgcagtactgtttgataaaatattataattaactggtaatagtctgacaaatttttaagagtactccagttgttggaggcgccaacgtttagaatcctctctacagggtgtccccgaaaatagtgcgttccttaaaggtataggtagaaggcacaatgtagagcaaaaaagtcttataacattttttctaaattgatccgtttgaccaaaaaacgaaaatacattttgatatgcaaattgaagtctggcaacaacgcgcaactcaaaaatctaaagattaaaaaagtaggtttgtaggtcagttgcatctggtaggtaaaataatgtaataatgtaatgtaataaggtaaatatcaaccaaaccaatatccattattttgcaggtatgtcaacaaccccaaaaatcacacctcaaagtaaatagacaaggggttataccctaaagaaacgcactattttcggggacaccctgtataaaaacatacactatcagttatgaagacctctgagtact

SEQ ID NO: 506 - DNA, 621 bp, Diabrotica virgifera
ggttaaaggtaaaactcactaagtgcacatttttgagattttgacattttatttatttatttatctagttatttattaatcatacgggaaaagcccattaatagtataattataaagtaaataataataataagtagcatcaacacaataaaagtagtactcatgaaagaagacaatgcaataatacaaataatcacaatatacctaaaatataaaatgtaacaaatataacatataacacttaatttaacaagacgtattaaggccatcggtacataattcgcaaatattttacggctatccctactttttctgtctttacacggcaaattacgtgtagtaaaattctcactggtatggatatgtaaactttacttgacaatgtcatcattaactttaaagatggcttttgaatgttcttggataactgttacttgtataattaattgccttaatgtattaattcagttaattaatatgattatttcattcataggagattctgaccaatagaaagctacagaaattaaactgataatttttgataatttcccgtcgtcaagtatattacgtcagatgcccttcgttgctatgaaaaaatacattcagtgatattaatga

SEQ ID NO: 507 - DNA, 3545 bp, Diabrotica virgifera
tatgcagtatatgcattgtcagacagtattaccagtaaatctaattatttttatcaaacaatccgcaaaaaaccatcgtttatgactctatagtgccccccatagatgaaggggcgcacgcatcatattcataaatttatataaaatacgctcacagctgatttttgcagtactgtttgataaaatattataattaactggtaatagtctgacaaatttttaagagtactccagttgttggaggcgccaacgtttagaatcctctctacagggtgtccccgaaaatagtgcgttccttaaaggtataggtagaaggcacaatgtagagcaaaaaagtcttataacattttttctaaattgatccgtttgaccaaaaaacgaaaatacattttgatatgcaaattgaagtctggcaacaacgcgcaactcaaaaatctaaagattaaaaaagtaggtttgtaggtcagttgcatctggtaggtaaaataatgtaaatatcaaccaaacccatatccattattttgcaggtaggtacctacgatgtcaacaaccccaaaaatcacacctcaaagtaaataaacaaggggttattaggttaaatttccacagtcacagcaagttcttctaggctacgttgccatgtcattcaaatttatgaaaataaaaattcacttatatagagaacaacgtaatttttttcttggaaacggttaaggctatgggtacataattcgcaaatattttacgtgtatccctactttttctgtctttacacggcaaattacgcgtagtaaaattcacactggtatggatatgtaaacattactagaatgtcattctacttgaaaatgtcattattaatttcaagagatgggttttgaatgttcttggataactgttatttttataattgcaaattattaattcagttaataaatgtgataattttttcactaactatgtattcagtgattgtaataatttatttgtacaacaaagactaatactcaatcgaaaaaagagaaaaagtgttaaagtgattttttaataatatattgttatggaacgcttacaattttgaacatctttaaggccggccgttgtatgaaagagaggtccccaaatgccggcgcaacagagagaaaagattctttcccgagagatgctgcctctatcggagaaataacgcaatagatatctaagcgaggccgcaaacggcagaatttttagtgagtcgatagtttagttaagtacagagagtatgcaggtgcggcctcgctaagatgactcgaaatcgttttatatatcaggtgcgaacttttaattttttagtaggcggtttaaggacggggtctcgctgaaaattttacttggataaatactgtgctcgtatctcgtggtaaaatctaaaccaaaagtattggagaaatctattttagtccatgtggtgagaccgctcccgtctgggaaaatttctgattcggtttctttgtggattcctattcaaacatgtcccctctaaacaaatctgaagggtgccgggcggaatttttgggcagaaactgtttaaacaatttttataaacaaatagaaaagatcacgtttttttgccccggaacatatatttttaagtttagtgggtcattctaaacaagaaaggtatcttgtaatttttttcaaaaattgatagttttcgagttatagtcgatttaaaatctgaaaagtgcgaaaatgctcatttacgaggcctaaaaactcatatttaaattagaacttttgaggttgccagattcttaaattgaagtttaaacattcagcttgaagattctaaagagtgattgtgtctaaccctaatttaaaccgtcgtgttttaattgttaaatatacatgtccatccgatttttttgtcggtgcggcgcgctctatttcaaaaatctccagttttcctccaaaaaatattttttctagattttttgggacattttaaataaaataagtttcttgacatttttctcaaaagttaacagttttaaagttaacagtttttaaaagaaactttttatttattctaagggactgtcggccctcggcaataacgttttctttcattctgcgtttaatttttttaaaaatacttattagttttctcagtattcgaaaaaaatgaacacatttaaaacacaggaaaattttgagaggcgacattttgcgtctttccccttaaatttttttgcaacatgaatgaagcaccctgtgtattaaattaaaaatatacattcaagtaaataaacaataatattttgttatatcaaagttttcaaacaaattttatatagggtgtctgcataactagcaaccatatggtttcatattaattttattaattattaattttaattattattaatacattattaattttacgggaaaaggtaatacccaagttaaatacataatcataattcatagagtatgtgtttacttaagggtaattatcattagagtaaaagattcactttataggagtaaaactgctaagttgcgttatgggtactaatttatgtttctagtcgtcaaggagtgtgatttgatgtttgattttcatatggcaagcgtaattcaatctatctacatacttcaaagaaaaaaattaggaagggacaataaaatgtaatatattttagacggagtacgttcaacatttcaggacgggaataataaatcattttttcagtaataacacaatatttgatttttgagatttctctagctgttcatgaaataaataaaattgtatataaaaaatgattatctcatttaaaataaatatttcttatttaccaatccttcggtttggcgccccattggggttacgcacgcgtgcaccgcacgcgttgcacgcccggttacggggccctgatattattccaagtacgcaataatgaaccacccgcatccctcaaaacggtattactctctatacagtaccgaaatttccaaaggaaagtttcaaacgggccataccgctcctgaattttgcacatgtataaatatttttcgtagcgccatcttatacataatggctacattaacagagcttagattcttacagattcctatactgtattcgtattatatgtcgaatatttacgtttcacatgccaatttttattaatttcagaaatttattttaaaagtacaccacgcaaaaagtactttattaattcacatttttttaacgttatatccttccattacttctactgtagtgctaaacggaattttatcatgaaattcatttaaatacttaagtaatttagatataaacgctcttatatttattgagaaaaaggcaaaactttcacatttttttataaacaatacacaacaggtaggataacaaaaatatggctggaactagcgacatatattgttagtaggttaagcatttttcggtatacatatatgctctagattatgagtggtgtactttataaaggtgatgggatcggctatacttataacattaccaatggcccgcctta

SEQ ID NO: 508 - DNA, 3576 bp, Diabrotica virgifera
tgatcagactatgcttaaaacggaattacatattacgaatacaaggcagcatatatcgtattataaaaaatatgtcattgacgaaatggcaaaagcaaaaggaataacggtattctgtttgccaccttatcattgtcaactaaatccaatagagttaatatggactcgagtaaaaggtgaagtggccagacagaatacaacttttaaattgaagggtgtcaaacaacttttattaaattccataaaaaacgtaacgaaagataactggaccaatgcgtaaaccacgtaaaaaaattaagaaagattgtgaaccgttgataatatcattgaaaaatcttgtcaatatatactcactccaatcgggccggaccacgaatctgaccacagaagaagaggaagagacgaaaatccataatttataagtaaatcagtaagtttttaatttatttacattacttaaatgttagatagcaataagatggatcggctttaacattaattttatttaacattatgaatctgcccctttttgattctcccaacactgacccatgatttttcagacctgttaggtatacagggtgtccccgaaaatagtgcgttccttaaaggtataggtagaaggcacaatgtagagcaaaaaagtcttataacattttttctaaattgatccgtttgaccaaaaaacgaaaatacattttgatatgcaaattgaagtctggcaacaacgcgcaactcaaaaatctaaagattaaaaaagtaggtttgtaggtcagttgcatctggtaggtaaaataatgtaaatatcaaccaaacccatatccattattttgcaggtaggtacctacgatgtcaacaaccccaaaaatcacacctcaaagtaaataaacaaggggttattaggttaaatttccacagtcacagcaagttcttctaggctacgttgccatgtcatttaaattgatgaaaataaaaattcacttatatggagaacaatgtaattttttcttggaaacggttaactttagaaaaaaatgttataggacttttttgttctaaattgtgtattatatccataccttggaaaggaacgcactattttcgggggcaccctgtataaaaacgttttaaaaatcaccaagtacatcttttttgatttagcatgtgggttttcgacggcaatccataaatattatattatactagtacgccgctaaacagttcctaaaaacatctgtttttatataaatgcagactaaaaatttaaaatttaaggaaataacgcagaaaacataaaaaatcgctgatataacttaattaaactatgaaatgccgatagtgtcgaaagtttcataaatgtcagttgtatcaaaatttcataacagtggagtaaacttgtctgaggttggaccaattacaaacaagcattgcggcgcgctaaatttggattactcctcctggtttaaaaacaaggtatagtatcattaaaatgggcgtgtagtcaaaaattgagactactttaaaaattatcctaggactaggaaaatgattaaatcctaggtgcactatgtatatataagctttatactaagtacaagctttttctttggctacacttggatttaactgaaaaaatatatgtattacgccttttttttttcgagaaatttatagaaagtatatctggagggtatttttttggtctgacaaggaagctatttacctgactgtatgtgttgatctccattaactataccagaaatggcaaaacttatataacttctcaaaaattcctattatttcaagcatcatgcatttagttcctgtcttctgatacgataagaatatctgctacacaatatttttgacagaatagcaggctaaacctaggtttaacgtatcatgccatagctgatataagcttctccaaaagccatatctactacgaaagttggctatcaccatggcaactttaactcccgaggcaaatactcatcacagttggatagaacttcaagtgaacgattcccttaggttttgtaacctagacatatttcttctaactgtgctgcgtttgactcatcttcatgtgtaaaatatccctgatactgttgttttctcgttttaattgcaagccagcaatagtgattaaccccttgagaatgacatttgggcattacaatttattgactcttgtaagcaggaatccactccaccccgccccagctccagactatccatcccccccccccctccgaacagcacgttgatgcgctataggggctctctattagcaaagtgcttaacatgtgtcgagtccgtgccgtgtacccagaactcgaaactttctggatacgaaatcgtaatcaatgcaggccagcgtgagacgctctatttgtgacgataatatattaattttatcgtctagagtacgccaatgaattaagtaaaacgtgttttgtaccgactctgacgatataaaagtcggaacgaaaagcctagttgatttattattcttggagtgttgatcgaataataataaacaacaacgaggtataagaggtgagtttaagtagtatatcccgaccatttccgtaatcctacaactcccgtcgtctttggtgtgctgaacgaatttcgacggttttccttttacctattcttatacgagcggtgatctatttcccaacatgtcttttcctctggcgagctgagcgagatttcctctccttatacgtccatttcatattaataaaagtaattcctaatccacgcgatcctcaatatcattcattcatgtacaaaatatcgtcacatcgacccgaaccgaaagctcgatgcgtagattataaatatattttattaacgaaattaacgagtaatcaaggctaattatcttatcttttgtatgttttgattccaaataaaaatgtcttaaaaagtgaacttttgtcttcggctgattttgttacctggagcaacaaacgcaacgaccgcgttacatattctcgctatctctatagtgacctatcttcgatctgtcttcaatggtatcttctcaggagatttttaagagtcttcaatatgcctacctagcaaatgcctccaatatgcagttagagctttccttatccatattctgttttctcgtgtctattcatttgcctcgttaatatttgtttccagctacaaatagggtcgtaatctatctagtatagcttctctacatttaatggtttgtggttttggtttaactgtaggtgttgtatatctgtgtacacttaggtacagagcacacgtcgcaactattttaaaacaacgtttgaaaactacatagttggaaaagagtttcaggctgatcaactcgtgggtgaaacccccctgcttttatcatgggccgtgcttttactctgctgagataacaaaatagttgcaagtgcaatcgatttcatagttttaaaacagttatgagattagctatttggtttctcactatttctcacactcgtctgagactggctagtagttcgaaaaagattcaacaattttatttttcttcaatccaaagtttctaac

SEQ ID NO: 509 - DNA, 3576 bp, Diabrotica virgifera
tgatcagactatgcttaaaacggaattacatattacgaatacaaggcagcatatatcgtattataaaaaatatgtcattgacgaaatggcaaaagcaaaaggaataacggtattctgtttgccaccttatcattgtcaactaaatccaatagagttaatatggactcgagtaaaaggtgaagtggccagacagaatacaacttttaaattgaagggtgtcaaacaacttttattaaattccataaaaaacgtaacgaaagataactggaccaatgcgtaaaccacgtaaaaaaattaagaaagattgtgaaccgttgataatatcattgaaaaatcttgtcaatatatactcactccaatcgggccggaccacgaatctgaccacagaagaagaggaagagacgaaaatccataatttataagtaaatcagtaagtttttaatttatttacattacttaaatgttagatagcaataagatggatcggctttaacattaattttatttaacattatgaatctgcccctttttgattctcccaacactgacccatgatttttcagacctgttaggtatacagggtgtccccgaaaatagtgcgttccttaaaggtataggtagaaggcacaatgtagagcaaaaaagtcttataacattttttctaaattgatccgtttgaccaaaaaacgaaaatacattttgatatgcaaattgaagtctggcaacaacgcgcaactcaaaaatctaaagattaaaaaagtaggtttgtaggtcagttgcatctggtaggtaaaataatgtaaatatcaaccaaacccatatccattattttgcaggtaggtacctacgatgtcaacaaccccaaaaatcacacctcaaagtaaataaacaaggggttattaggttaaatttccacagtcacagcaagttcttctaggctacgttgccatgtcatttaaattgatgaaaataaaaattcacttatatggagaacaatgtaattttttcttggaaacggttaactttagaaaaaaatgttataggacttttttgttctaaattgtgtattatatccataccttggaaaggaacgcactattttcgggggcaccctgtataaaaacgttttaaaaatcaccaagtacatcttttttgatttagcatgtgggttttcgacggcaatccataaatattatattatactagtacgccgctaaacagttcctaaaaacatctgtttttatataaatgcagactaaaaatttaaaatttaaggaaataacgcagaaaacataaaaaatcgctgatataacttaattaaactatgaaatgccgatagtgtcgaaagtttcataaatgtcagttgtatcaaaatttcataacagtggagtaaacttgtctgaggttggaccaattacaaacaagcattgcggcgcgctaaatttggattactcctcctggtttaaaaacaaggtatagtatcattaaaatgggcgtgtagtcaaaaattgagactactttaaaaattatcctaggactaggaaaatgattaaatcctaggtgcactatgtatatataagctttatactaagtacaagctttttctttggctacacttggatttaactgaaaaaatatatgtattacgccttttttttttcgagaaatttatagaaagtatatctggagggtatttttttggtctgacaaggaagctatttacctgactgtatgtgttgatctccattaactataccagaaatggcaaaacttatataacttctcaaaaattcctattatttcaagcatcatgcatttagttcctgtcttctgatacgataagaatatctgctacacaatatttttgacagaatagcaggctaaacctaggtttaacgtatcatgccatagctgatataagcttctccaaaagccatatctactacgaaagttggctatcaccatggcaactttaactcccgaggcaaatactcatcacagttggatagaacttcaagtgaacgattcccttaggttttgtaacctagacatatttcttctaactgtgctgcgtttgactcatcttcatgtgtaaaatatccctgatactgttgttttctcgttttaattgcaagccagcaatagtgattaaccccttgagaatgacatttgggcattacaatttattgactcttgtaagcaggaatccactccaccccgccccagctccagactatccatcccccccccccctccgaacagcacgttgatgcgctataggggctctctattagcaaagtgcttaacatgtgtcgagtccgtgccgtgtacccagaactcgaaactttctggatacgaaatcgtaatcaatgcaggccagcgtgagacgctctatttgtgacgataatatattaattttatcgtctagagtacgccaatgaattaagtaaaacgtgttttgtaccgactctgacgatataaaagtcggaacgaaaagcctagttgatttattattcttggagtgttgatcgaataataataaacaacaacgaggtataagaggtgagtttaagtagtatatcccgaccatttccgtaatcctacaactcccgtcgtctttggtgtgctgaacgaatttcgacggttttccttttacctattcttatacgagcggtgatctatttcccaacatgtcttttcctctggcgagctgagcgagatttcctctccttatacgtccatttcatattaataaaagtaattcctaatccacgcgatcctcaatatcattcattcatgtacaaaatatcgtcacatcgacccgaaccgaaagctcgatgcgtagattataaatatattttattaacgaaattaacgagtaatcaaggctaattatcttatcttttgtatgttttgattccaaataaaaatgtcttaaaaagtgaacttttgtcttcggctgattttgttacctggagcaacaaacgcaacgaccgcgttacatattctcgctatctctatagtgacctatcttcgatctgtcttcaatggtatcttctcaggagatttttaagagtcttcaatatgcctacctagcaaatgcctccaatatgcagttagagctttccttatccatattctgttttctcgtgtctattcatttgcctcgttaatatttgtttccagctacaaatagggtcgtaatctatctagtatagcttctctacatttaatggtttgtggttttggtttaactgtaggtgttgtatatctgtgtacacttaggtacagagcacacgtcgcaactattttaaaacaacgtttgaaaactacatagttggaaaagagtttcaggctgatcaactcgtgggtgaaacccccctgcttttatcatgggccgtgcttttactctgctgagataacaaaatagttgcaagtgcaatcgatttcatagttttaaaacagttatgacacattaagaataagatgctattttttgacccccgttgattaggagattaactatttggtttctcactatttctcacactcatctgagactggctagtagttcga

SEQ ID NO: 510 - DNA, 3585 bp, Diabrotica virgifera
tgatcagactatgcttaaaacggaattacatattacgaatacaaggcagcatatatcgtattataaaaaatatgtcattgacgaaatggcaaaagcaaaaggaataacggtattctgtttgccaccttatcattgtcaactaaatccaatagagttaatatggactcgagtaaaaggtgaagtggccagacagaatacaacttttaaattgaagggtgtcaaacaacttttattaaattccataaaaaacgtaacgaaagataactggaccaatgcgtaaaccacgtaaaaaaattaagaaagattgtgaaccgttgataatatcattgaaaaatcttgtcaatatatactcactccaatcgggccggaccacgaatctgaccacagaagaagaggaagagacgaaaatccataatttataagtaaatcagtaagtttttaatttatttacattacttaaatgttagatagcaataagatggatcggctttaacattaattttatttaacattatgaatctgcccctttttgattctcccaacactgacccatgatttttcagacctgttaggtatacagggtgtccccgaaaatagtgcgttccttaaaggtataggtagaaggcacaatgtagagcaaaaaagtcttataacattttttctaaattgatccgtttgaccaaaaaacgaaaatacattttgatatgcaaattgaagtctggcaacaacgcgcaactcaaaaatctaaagattaaaaaagtaggtttgtaggtcagttgcatctggtaggtaaaataatgtaaatatcaaccaaacccatatccattattttgcaggtaggtacctacgatgtcaacaaccccaaaaatcatacctcaaagtaaataaacaggttaaattacagggtattaggttaaatttccacagtcacagcaagttcttctaggctacgttgccatgtcattcaaatttatgaaaataaaaattcacttgtatggagaacaatgtaattttttcttggaaacggttaactttagaaaaaaatgttataggacttttttgttctaaattgtgtattatatccataccttggaaaggaacgcactattttcgggggcaccctgtataaaaacgttttaaaaatcaccaagtacatcttttttgatttagcatgtgggttttcgacggcaatccataaatattatattatactagtacgccgctaaacagttcctaaaaacatctgtttttatataaatgcagactaaaaatttaaaatttaaggaaataacgcagaaaacataaaaaatcgctgatataacttaattaaactatgaaatgccgatagtgtcgaaagtttcataaatgtcagttgtatcaaaatttcataacagtggagtaaacttgtctgaggttggaccaattacaaacaagcattgcggcgcgctaaatttggattactcctcctggtttaaaaacaaggtatagtatcattaaaatgggcgtgtagtcaaaaattgagactactttaaaaattatcctaggactaggaaaatgattaaatcctaggtgcactatgtatatataagctttatactaagtacaagctttttctttggctacacttggatttaactgaaaaaatatatgtattacgccttttttttttcgagaaatttatagaaagtatatctggagggtatttttttggtctgacaaggaagctatttacctgactgtatgtgttgatctccattaactataccagaaatggcaaaacttatataacttctcaaaaattcctattatttcaagcatcatgcatttagttcctgtcttctgatacgataagaatatctgctacacaatatttttgacagaatagcaggctaaacctaggtttaacgtatcatgccatagctgatataagcttctccaaaagccatatctactacgaaagttggctatcaccatggcaactttaactcccgaggcaaatactcatcacagttggatagaacttcaagtgaacgattcccttaggttttgtaacctagacatatttcttctaactgtgctgcgtttgactcatcttcatgtgtaaaatatccctgatactgttgttttctcgttttaattgcaagccagcaatagtgattaaccccttgagaatgacatttgggcattacaatttattgactcttgtaagcaggaatccactccaccccgccccagctccagactatccatcccccccccccctccgaacagcacgttgatgcgctataggggctctctattagcaaagtgcttaacatgtgtcgagtccgtgccgtgtacccagaactcgaaactttctggatacgaaatcgtaatcaatgcaggccagcgtgagacgctctatttgtgacgataatatattaattttatcgtctagagtacgccaatgaattaagtaaaacgtgttttgtaccgactctgacgatataaaagtcggaacgaaaagcctagttgatttattattcttggagtgttgatcgaataataataaacaacaacgaggtataagaggtgagtttaagtagtatatcccgaccatttccgtaatcctacaactcccgtcgtctttggtgtgctgaacgaatttcgacggttttccttttacctattcttatacgagcggtgatctatttcccaacatgtcttttcctctggcgagctgagcgagatttcctctccttatacgtccatttcatattaataaaagtaattcctaatccacgcgatcctcaatatcattcattcatgtacaaaatatcgtcacatcgacccgaaccgaaagctcgatgcgtagattataaatatattttattaacgaaattaacgagtaatcaaggctaattatcttatcttttgtatgttttgattccaaataaaaatgtcttaaaaagtgaacttttgtcttcggctgattttgttacctggagcaacaaacgcaacgaccgcgttacatattctcgctatctctatagtgacctatcttcgatctgtcttcaatggtatcttctcaggagatttttaagagtcttcaatatgcctacctagcaaatgcctccaatatgcagttagagctttccttatccatattctgttttctcgtgtctattcatttgcctcgttaatatttgtttccagctacaaatagggtcgtaatctatctagtatagcttctctacatttaatggtttgtggttttggtttaactgtaggtgttgtatatctgtgtacacttaggtacagagcacacgtcgcaactattttaaaacaacgtttgaaaactacatagttggaaaagagtttcaggctgatcaactcgtgggtgaaacccccctgcttttatcatgggccgtgcttttactctgctgagataacaaaatagttgcaagtgcaatcgatttcatagttttaaaacagttatgagattagctatttggtttctcactatttctcacactcgtctgagactggctagtagttcgaaaaagattcaacaattttatttttcttcaatccaaagtttctaac

SEQ ID NO: 511 - DNA, 3585 bp, Diabrotica virgifera
tgatcagactatgcttaaaacggaattacatattacgaatacaaggcagcatatatcgtattataaaaaatatgtcattgacgaaatggcaaaagcaaaaggaataacggtattctgtttgccaccttatcattgtcaactaaatccaatagagttaatatggactcgagtaaaaggtgaagtggccagacagaatacaacttttaaattgaagggtgtcaaacaacttttattaaattccataaaaaacgtaacgaaagataactggaccaatgcgtaaaccacgtaaaaaaattaagaaagattgtgaaccgttgataatatcattgaaaaatcttgtcaatatatactcactccaatcgggccggaccacgaatctgaccacagaagaagaggaagagacgaaaatccataatttataagtaaatcagtaagtttttaatttatttacattacttaaatgttagatagcaataagatggatcggctttaacattaattttatttaacattatgaatctgcccctttttgattctcccaacactgacccatgatttttcagacctgttaggtatacagggtgtccccgaaaatagtgcgttccttaaaggtataggtagaaggcacaatgtagagcaaaaaagtcttataacattttttctaaattgatccgtttgaccaaaaaacgaaaatacattttgatatgcaaattgaagtctggcaacaacgcgcaactcaaaaatctaaagattaaaaaagtaggtttgtaggtcagttgcatctggtaggtaaaataatgtaaatatcaaccaaacccatatccattattttgcaggtaggtacctacgatgtcaacaaccccaaaaatcatacctcaaagtaaataaacaggttaaattacagggtattaggttaaatttccacagtcacagcaagttcttctaggctacgttgccatgtcattcaaatttatgaaaataaaaattcacttgtatggagaacaatgtaattttttcttggaaacggttaactttagaaaaaaatgttataggacttttttgttctaaattgtgtattatatccataccttggaaaggaacgcactattttcgggggcaccctgtataaaaacgttttaaaaatcaccaagtacatcttttttgatttagcatgtgggttttcgacggcaatccataaatattatattatactagtacgccgctaaacagttcctaaaaacatctgtttttatataaatgcagactaaaaatttaaaatttaaggaaataacgcagaaaacataaaaaatcgctgatataacttaattaaactatgaaatgccgatagtgtcgaaagtttcataaatgtcagttgtatcaaaatttcataacagtggagtaaacttgtctgaggttggaccaattacaaacaagcattgcggcgcgctaaatttggattactcctcctggtttaaaaacaaggtatagtatcattaaaatgggcgtgtagtcaaaaattgagactactttaaaaattatcctaggactaggaaaatgattaaatcctaggtgcactatgtatatataagctttatactaagtacaagctttttctttggctacacttggatttaactgaaaaaatatatgtattacgccttttttttttcgagaaatttatagaaagtatatctggagggtatttttttggtctgacaaggaagctatttacctgactgtatgtgttgatctccattaactataccagaaatggcaaaacttatataacttctcaaaaattcctattatttcaagcatcatgcatttagttcctgtcttctgatacgataagaatatctgctacacaatatttttgacagaatagcaggctaaacctaggtttaacgtatcatgccatagctgatataagcttctccaaaagccatatctactacgaaagttggctatcaccatggcaactttaactcccgaggcaaatactcatcacagttggatagaacttcaagtgaacgattcccttaggttttgtaacctagacatatttcttctaactgtgctgcgtttgactcatcttcatgtgtaaaatatccctgatactgttgttttctcgttttaattgcaagccagcaatagtgattaaccccttgagaatgacatttgggcattacaatttattgactcttgtaagcaggaatccactccaccccgccccagctccagactatccatcccccccccccctccgaacagcacgttgatgcgctataggggctctctattagcaaagtgcttaacatgtgtcgagtccgtgccgtgtacccagaactcgaaactttctggatacgaaatcgtaatcaatgcaggccagcgtgagacgctctatttgtgacgataatatattaattttatcgtctagagtacgccaatgaattaagtaaaacgtgttttgtaccgactctgacgatataaaagtcggaacgaaaagcctagttgatttattattcttggagtgttgatcgaataataataaacaacaacgaggtataagaggtgagtttaagtagtatatcccgaccatttccgtaatcctacaactcccgtcgtctttggtgtgctgaacgaatttcgacggttttccttttacctattcttatacgagcggtgatctatttcccaacatgtcttttcctctggcgagctgagcgagatttcctctccttatacgtccatttcatattaataaaagtaattcctaatccacgcgatcctcaatatcattcattcatgtacaaaatatcgtcacatcgacccgaaccgaaagctcgatgcgtagattataaatatattttattaacgaaattaacgagtaatcaaggctaattatcttatcttttgtatgttttgattccaaataaaaatgtcttaaaaagtgaacttttgtcttcggctgattttgttacctggagcaacaaacgcaacgaccgcgttacatattctcgctatctctatagtgacctatcttcgatctgtcttcaatggtatcttctcaggagatttttaagagtcttcaatatgcctacctagcaaatgcctccaatatgcagttagagctttccttatccatattctgttttctcgtgtctattcatttgcctcgttaatatttgtttccagctacaaatagggtcgtaatctatctagtatagcttctctacatttaatggtttgtggttttggtttaactgtaggtgttgtatatctgtgtacacttaggtacagagcacacgtcgcaactattttaaaacaacgtttgaaaactacatagttggaaaagagtttcaggctgatcaactcgtgggtgaaacccccctgcttttatcatgggccgtgcttttactctgctgagataacaaaatagttgcaagtgcaatcgatttcatagttttaaaacagttatgacacattaagaataagatgctattttttgacccccgttgattaggagattaactatttggtttctcactatttctcacactcatctgagactggctagtagttcga

SEQ ID NO: 512 - DNA, 3574 bp, Diabrotica virgifera
ttatctcctgtctttgtttgtcaggagaatttgtggacaccctgtacattgttaatattatatattagtgtgtaaataccacgagcgtatgttaaaattttgaaaatttgtcattttaatgaccagcagtgccaaaacaattttgtcttcgtaaatatttgattgttgactatacagggtgtccccgaaaatagtgtgttccttggaggtatgggtagaaggcacaatgtagagcaggaaagtcataacatttttttctaaattcagccgtttgaccaaaaacgaaaatacattttgatatgcaaactgaagtctggcaacaacgtgtaattcaaagacagtcacaatagtaggtttgtaggtcagtagttgtatctatgtaaatatcaacaaaacctgcaggggtctagtgtttacatttcttcaccctgtccgtggttgtcccctcacatcaaacaaatcaagaatttggtatgttattgacattgaatatttggcataattggttatctagttttattctgtaccaaaagaacgggcatttcttatttcttaacaagtaggcacaacgtgaaatgtggtttcgtcacgacggagccccagagctgtgaaaaatcttcaggataccacgtttaaaatcagaaaatcgacatacgtaggtacaaataatttttcctaagtgcatttacattttaggaattaaaccatagttacttaagtaaaagttataatttatgtaaaatttcgagccctaattataaaaccttcattacttcagataatagcaaaaatgccacattattaaagcaagaaataattattttgcaggtagttacctaccgatgtcaacaaccccaaaaatcacacctcaaatagtaaataaacaaggggttccattaggttaaattttcaacagtcacaacaagttcttctaggctacgttgccatgtcatttaaattgatgaaaataaaaattcacttatatggagaacaatgtaattttttcttggaaacggttaactttagaaaaaaatgttataggacttttttgttctaaattgtgtattatatccataccttggaaaggaacgcactattttcgggggcaccctgtataaaaacgttttaaaaatcaccaagtacatcttttttgatttagcatgtgggttttcgacggcaatccataaatattatattatactagtacgccgctaaacagttcctaaaaacatctgtttttatataaatgcagactaaaaatttaaaatttaaggaaataacgcagaaaacataaaaaatcgctgatataacttaattaaactatgaaatgccgatagtgtcgaaagtttcataaatgtcagttgtatcaaaatttcataacagtggagtaaacttgtctgaggttggaccaattacaaacaagcattgcggcgcgctaaatttggattactcctcctggtttaaaaacaaggtatagtatcattaaaatgggcgtgtagtcaaaaattgagactactttaaaaattatcctaggactaggaaaatgattaaatcctaggtgcactatgtatatataagctttatactaagtacaagctttttctttggctacacttggatttaactgaaaaaatatatgtattacgccttttttttttcgagaaatttatagaaagtatatctggagggtatttttttggtctgacaaggaagctatttacctgactgtatgtgttgatctccattaactataccagaaatggcaaaacttatataacttctcaaaaattcctattatttcaagcatcatgcatttagttcctgtcttctgatacgataagaatatctgctacacaatatttttgacagaatagcaggctaaacctaggtttaacgtatcatgccatagctgatataagcttctccaaaagccatatctactacgaaagttggctatcaccatggcaactttaactcccgaggcaaatactcatcacagttggatagaacttcaagtgaacgattcccttaggttttgtaacctagacatatttcttctaactgtgctgcgtttgactcatcttcatgtgtaaaatatccctgatactgttgttttctcgttttaattgcaagccagcaatagtgattaaccccttgagaatgacatttgggcattacaatttattgactcttgtaagcaggaatccactccaccccgccccagctccagactatccatcccccccccccctccgaacagcacgttgatgcgctataggggctctctattagcaaagtgcttaacatgtgtcgagtccgtgccgtgtacccagaactcgaaactttctggatacgaaatcgtaatcaatgcaggccagcgtgagacgctctatttgtgacgataatatattaattttatcgtctagagtacgccaatgaattaagtaaaacgtgttttgtaccgactctgacgatataaaagtcggaacgaaaagcctagttgatttattattcttggagtgttgatcgaataataataaacaacaacgaggtataagaggtgagtttaagtagtatatcccgaccatttccgtaatcctacaactcccgtcgtctttggtgtgctgaacgaatttcgacggttttccttttacctattcttatacgagcggtgatctatttcccaacatgtcttttcctctggcgagctgagcgagatttcctctccttatacgtccatttcatattaataaaagtaattcctaatccacgcgatcctcaatatcattcattcatgtacaaaatatcgtcacatcgacccgaaccgaaagctcgatgcgtagattataaatatattttattaacgaaattaacgagtaatcaaggctaattatcttatcttttgtatgttttgattccaaataaaaatgtcttaaaaagtgaacttttgtcttcggctgattttgttacctggagcaacaaacgcaacgaccgcgttacatattctcgctatctctatagtgacctatcttcgatctgtcttcaatggtatcttctcaggagatttttaagagtcttcaatatgcctacctagcaaatgcctccaatatgcagttagagctttccttatccatattctgttttctcgtgtctattcatttgcctcgttaatatttgtttccagctacaaatagggtcgtaatctatctagtatagcttctctacatttaatggtttgtggttttggtttaactgtaggtgttgtatatctgtgtacacttaggtacagagcacacgtcgcaactattttaaaacaacgtttgaaaactacatagttggaaaagagtttcaggctgatcaactcgtgggtgaaacccccctgcttttatcatgggccgtgcttttactctgctgagataacaaaatagttgcaagtgcaatcgatttcatagttttaaaacagttatgagattagctatttggtttctcactatttctcacactcgtctgagactggctagtagttcgaaaaagattcaacaattttatttttcttcaatccaaagtttctaac

SEQ ID NO: 513 - DNA, 3574 bp, Diabrotica virgifera
ttatctcctgtctttgtttgtcaggagaatttgtggacaccctgtacattgttaatattatatattagtgtgtaaataccacgagcgtatgttaaaattttgaaaatttgtcattttaatgaccagcagtgccaaaacaattttgtcttcgtaaatatttgattgttgactatacagggtgtccccgaaaatagtgtgttccttggaggtatgggtagaaggcacaatgtagagcaggaaagtcataacatttttttctaaattcagccgtttgaccaaaaacgaaaatacattttgatatgcaaactgaagtctggcaacaacgtgtaattcaaagacagtcacaatagtaggtttgtaggtcagtagttgtatctatgtaaatatcaacaaaacctgcaggggtctagtgtttacatttcttcaccctgtccgtggttgtcccctcacatcaaacaaatcaagaatttggtatgttattgacattgaatatttggcataattggttatctagttttattctgtaccaaaagaacgggcatttcttatttcttaacaagtaggcacaacgtgaaatgtggtttcgtcacgacggagccccagagctgtgaaaaatcttcaggataccacgtttaaaatcagaaaatcgacatacgtaggtacaaataatttttcctaagtgcatttacattttaggaattaaaccatagttacttaagtaaaagttataatttatgtaaaatttcgagccctaattataaaaccttcattacttcagataatagcaaaaatgccacattattaaagcaagaaataattattttgcaggtagttacctaccgatgtcaacaaccccaaaaatcacacctcaaatagtaaataaacaaggggttccattaggttaaattttcaacagtcacaacaagttcttctaggctacgttgccatgtcatttaaattgatgaaaataaaaattcacttatatggagaacaatgtaattttttcttggaaacggttaactttagaaaaaaatgttataggacttttttgttctaaattgtgtattatatccataccttggaaaggaacgcactattttcgggggcaccctgtataaaaacgttttaaaaatcaccaagtacatcttttttgatttagcatgtgggttttcgacggcaatccataaatattatattatactagtacgccgctaaacagttcctaaaaacatctgtttttatataaatgcagactaaaaatttaaaatttaaggaaataacgcagaaaacataaaaaatcgctgatataacttaattaaactatgaaatgccgatagtgtcgaaagtttcataaatgtcagttgtatcaaaatttcataacagtggagtaaacttgtctgaggttggaccaattacaaacaagcattgcggcgcgctaaatttggattactcctcctggtttaaaaacaaggtatagtatcattaaaatgggcgtgtagtcaaaaattgagactactttaaaaattatcctaggactaggaaaatgattaaatcctaggtgcactatgtatatataagctttatactaagtacaagctttttctttggctacacttggatttaactgaaaaaatatatgtattacgccttttttttttcgagaaatttatagaaagtatatctggagggtatttttttggtctgacaaggaagctatttacctgactgtatgtgttgatctccattaactataccagaaatggcaaaacttatataacttctcaaaaattcctattatttcaagcatcatgcatttagttcctgtcttctgatacgataagaatatctgctacacaatatttttgacagaatagcaggctaaacctaggtttaacgtatcatgccatagctgatataagcttctccaaaagccatatctactacgaaagttggctatcaccatggcaactttaactcccgaggcaaatactcatcacagttggatagaacttcaagtgaacgattcccttaggttttgtaacctagacatatttcttctaactgtgctgcgtttgactcatcttcatgtgtaaaatatccctgatactgttgttttctcgttttaattgcaagccagcaatagtgattaaccccttgagaatgacatttgggcattacaatttattgactcttgtaagcaggaatccactccaccccgccccagctccagactatccatcccccccccccctccgaacagcacgttgatgcgctataggggctctctattagcaaagtgcttaacatgtgtcgagtccgtgccgtgtacccagaactcgaaactttctggatacgaaatcgtaatcaatgcaggccagcgtgagacgctctatttgtgacgataatatattaattttatcgtctagagtacgccaatgaattaagtaaaacgtgttttgtaccgactctgacgatataaaagtcggaacgaaaagcctagttgatttattattcttggagtgttgatcgaataataataaacaacaacgaggtataagaggtgagtttaagtagtatatcccgaccatttccgtaatcctacaactcccgtcgtctttggtgtgctgaacgaatttcgacggttttccttttacctattcttatacgagcggtgatctatttcccaacatgtcttttcctctggcgagctgagcgagatttcctctccttatacgtccatttcatattaataaaagtaattcctaatccacgcgatcctcaatatcattcattcatgtacaaaatatcgtcacatcgacccgaaccgaaagctcgatgcgtagattataaatatattttattaacgaaattaacgagtaatcaaggctaattatcttatcttttgtatgttttgattccaaataaaaatgtcttaaaaagtgaacttttgtcttcggctgattttgttacctggagcaacaaacgcaacgaccgcgttacatattctcgctatctctatagtgacctatcttcgatctgtcttcaatggtatcttctcaggagatttttaagagtcttcaatatgcctacctagcaaatgcctccaatatgcagttagagctttccttatccatattctgttttctcgtgtctattcatttgcctcgttaatatttgtttccagctacaaatagggtcgtaatctatctagtatagcttctctacatttaatggtttgtggttttggtttaactgtaggtgttgtatatctgtgtacacttaggtacagagcacacgtcgcaactattttaaaacaacgtttgaaaactacatagttggaaaagagtttcaggctgatcaactcgtgggtgaaacccccctgcttttatcatgggccgtgcttttactctgctgagataacaaaatagttgcaagtgcaatcgatttcatagttttaaaacagttatgacacattaagaataagatgctattttttgacccccgttgattaggagattaactatttggtttctcactatttctcacactcatctgagactggctagtagttcga

SEQ ID NO: 514 - DNA, 1065 bp, Diabrotica virgifera
catgattacgactcagctcatgtgatgaggtttgttatcacaaagttaagtcgacagtttttttgtataaatacaagatctttttctaaatgtccaccttcagttcaagacaagtaataacaacaatgctagctgctaaagttgtcttgtttttgggccttgcccttttcgtctcagccggtgaagatcttgacaagggttatgaaattgtggaatgtgccaattatgtaatgagagcaggagtacccgaattgggagtaccacaacacgacccctacgtcaaactcagggacctacaatggagtggaaacctcggtgttgccaaagcccatatcgagctccatgataatagatggtatggtcttgccgactgggaaattcaagcttaccaaatcagtgctgacactgacaacgaggctgtctttgactacaccacatactggcccagttttagaatcgtaggcaactacgaagcaaccgttaaagagcttttccttacacagcactacaaaggaacctacaacataaccatgattaaaccaaaatggactggaagaatcagcgcacaaaaagtccccactgtcttaacacctaagcccattgtagacagttttaccgtcgactggcaagttgcagatgtaaaatgcaaaatcactggtatgggaataattggagacacttatgctctcgctattcaagaaggtattgaaacggccctcaaccatggtcttatcggaaataccgtcggagacttccttaaaatgagattcaacactgtctggtatcccactggcaaagtctggcaaatgatggactggtgcaacggcggctccaccgacgccccaacaacagctgcaccatacacaaatgcaccctcaacagctgcaccatagacagatgcaccctcaacagctgcaccatacacttatgcagcaccagcccttttttaagcaaaaaattaatttaaaaaataaccaagaatatattttcctccagctttgtaacgatagaatacaataaaatcgtatccattatttactagaaaaaaaaaaaaaaaaaaaaaaa

SEQ ID NO: 515 - DNA, 962 bp, Diabrotica virgifera
catgattacgactcagctcatgtgatgaggtttgttatcacaaagttaagtcgacagtttttttgtataaatacaagatctttttctaaatgtccaccttcagttcaagacaagtaataacaacaatgctagctgctaaagttgtcttgtttttgggccttgcccttttcgtctcagccggtgaagatcttgacaagggttatgaaattgtggaatgtgccaattatgtaatgagagcaggagtacccgaattgggagtaccacaacacgacccctacgtcaaactcagggacctacaatggagtggaaacctcggtgttgccaaagcccatatcgagctccatgataatagatggtatggtcttgccgactgggaaattcaagcttaccaaatcagtgctgacactgacaacgaggctgtctttgactacaccacatcatggtcaaatggatttcaactctctatgaactacaatgcaaccattaaggaacttttcctttcacagcactactcaggaaccatcaagataaccatgaaacaaccagtatggactggaagaatcagcgcacaaaaaacccccactgacttaaaacctaacaccactgtagacagttttaccgtcgactggcacgttgcagatgtaaaatgcaaaatcactggtatgggattacttggagacacttatgctctcgctattcaagaaggtattgaaggtgccctcaaccatggtcttatcggaaataccgttggagacttccttaaaatgagattcaacactgtctggtatcccactggcaaagtctggcaaatgctggactattgcaactccctcgtgtccaccccagatgcacgacaagcctagtttgaatcaaataatcaggttaaataagaaggtattttcctttgtaacgataaaatacaattaaatggtaataattattatttaccaaaaaaaaaaaaa

SEQ ID NO: 516 - DNA, 973 bp, Diabrotica virgifera
catgattacgactcagctcatgtgatgaggtttgttatcacaaagttaagtcgacagtttttttgtataaatacaagatctttttctaaatgtccaccttcagttcaagacaagtaataacaacaatgctagctgctaaagttgtcttgtttttgggccttgcccttttcgtctcagccggtgaagatcttgacaagggttatgaaattgtggaatgtgccaattatgtaatgagagcaggagtacccgaattgggagtaccacaacacgacccctacgtcaaactcagggacctacaatggagtggaaacctcggtgttgccaaagcccatatcgagctccatgataatagatggtatggtcttgccgactgggaaattcaagcttaccaaatcagtgctgacactgacaacgaggctgtctttgactacaccacatcatggtcaaatggatttcaactctctatgaactacaatgcaaccattaaggaacttttcctttcacagcactactcaggaaccatcaagataaccatgaaacaaccagtatggactggaagaatcagcgcacaaaaaacccccactgacttaaaacctaacaccactgtagacagttttaccgtcgactggcacgttgcagatgtaaaatgcaaaatcactggtatgggattacttggagacacttatgctctcgctattcaagaaggtattgaaggtgccctcaaccatggtcttatcggaaataccgttggagacttccttaaaatgagattcaacactgtctggtatcccactggcaaagtctggcaaatgctggactattgcaactccctcgtgtccaccccagatgcacgacaagcctagtttgaatcaaataattattaccatttaattgtattttatcgttacaaaggaaaataccttcttatttaacctgattatttgattcaaactaggcttgtcgtgcatctggg

SEQ ID NO: 517 - DNA, 690 bp, Diabrotica virgifera
  SmartBlast Evalue=1E-64; Info=Superoxide dismutase n=2 Tax= Culicini RepID=B0X9L3_CULQU
aacactctaaaccaactttttattgataaaaactgaatgacactttttaaattaaaaataaacttatataattactcttttactggtcccctacaaaaatattttaaatcttggccaagccaatgactccgcaggccaatcttccaccagcatttcctgttgttttgctcaattcgtgaccaccaactcccaaatcatcaggatctgcatggactactacggtacgaccgacgatgttgtgttctccctccaaggaaatatatttgtctgagatgttaattttggcaacaccgctagcatcagctacaacgttgccaagatctccgacatgacgaacggaagcgtcgggaccaccatggtctttaccgtgaggattgaagtgagctccggctgagatgcaaccgttggtgttgtcgccgaattcgtgaatgtggaagccgtgttggccttgggttaaaccggagatttcgccacttacttggacaggactggaaccacttgcttggtcaaaaaagacagttccggtgacttctccctttagtacacaaactgctttggctggcattatggtttagtaaataagcaaacaaattggaaatttgtatcaaaccaaaccaaattaaattaattcgagtaaaaccaattttacttttacggctcaactttcggcacggcaaatgaaaaagtgac

SEQ ID NO: 518 - DNA, 624 bp, Diabrotica virgifera
  SmartBlast Evalue=3E-53; Info="ABC transporter, putative n=1 Tax=Pediculus humanus corporis RepID=E0W3T6_PEDHC"
acgtcatgaaatatactatcgttacgtaaagtatacagaatatggtctggaatggcatatctgatatcgttattgccagatagtaagacctcagggaataccatcgattaaaatgttcttttaacaaaactggcatttcaagtgggaaggacaaaatggttatagtcatggaagtgtacatcaagaacaacatgttgaaaaacaggaaaccaagattactaagtactttggacccatcgtttccaattttgaagtataaggcaccaattaggaatccaaccaaaatgtgggcgaataaacgtaggtacatcaaagtccaatctcttctactgaacaataacgcacgttttaaaataatgaaaaattgttggaattccgaattaccatatctgggctgtttaaccacaacggaagtatttaataaggcactatcaacattagctttttcgacatctttagaatcgattccagtatcttcgttaacgttgtttgattttctattgccattcacggtactgccctctttggataattcatcagaaataagggttttcaagttgtctttggcgtattggtaagcgttattcaaaccgtcgctcattttgaaacctactatttggctgg

SEQ ID NO: 519 - DNA, 1123 bp, Diabrotica virgifera
  SmartBlast Evalue=3E-55; Info="CG3164, isoform A n=10 Tax= Drosophila RepID=Q8IPV3_DROME"
cttcttggactattaatcttacagtagcggaatgcttaaaaacaggcaaaaaatgggttctgtagtcacttattggttagatcattatttgatatattatgacaactgacatataatagagcaaaatacatcgtagcctgtagaaccaaagcaatgaaaggtttaaagaatattgtttcctacgtaaaataatgaatcaatcaattttacatttttttagacgctaaacatcatataaatataaaagaaagtttacaaacaataaattctgtataaatcataatacgtttaattttagtacgtcatagagaatataaatagaagcagtactaggaaaatagtacttttaaagatgatgaaacgacggtaactactcatcggccattttttattggaatatccttcataccagtatctagagatgaataaataaaagaacacaggtttaattctaggcatcacgctgttaatgagtcagaagataaaaaaatagctgctaagtacaattctggcaagaacagctgtatttttgaaattcagtatgagaaattgattgtatataacataatattacattattattaaagataccaatgtacaacctgcgtcctttctatataaaaccacgattaataacaatatttaacattattaaatatatcctaaacttaatggtttgatttaagtttccacttcaagaagaggtaagcggaaactcttaaaaagaagaatatcacaactagagccaaaatgtcgaaccagtaactcgatttatccatgtccaactcttcgagagttgtgagtgcctttttaaagtggcaatattgagcgaaacaatccaggtttggtctgttgtatccgtatgtggcaagcgcagtcccttcgaatccgtatctgatgtaggacagatacgttatccagcgaaggtagatgggaatagcatcgaatgatacaaagaatccggagaacaacaggaatggtactgacattactggagctaagaatacaccgttctgaacattcatagcagctcctactacgagtccaacactttgggccacgaatgatactaacaaggaagacagtaaaaacattccaaatctagccggatccaagggttggg

SEQ ID NO: 520 - DNA, 1228 bp, Diabrotica virgifera
  SmartBlast Evalue=1E-123; Info=Abc transporter n=1 Tax=Aedes aegypti RepID=Q16Y47_AEDAE
catctcggatgtcattcttaccattttctatagcgttaactaacgttctcgtgtgatctccatattccccacatgctacttctataatataggaggctggattgtggtatgaaggacactgtaactgcagacttgccaaaaagggcaccaagaatgtcgtagaaccttggtaaacacattgaccatcagcgagtgtataaagttggtcgaacatttcaaacagtctagctgaaggttggtgaatagtacatattatagttcttccacctttagctaaggttttcaacagtgatatacattgaaaacatgatgaagaatccaatccactagtaggttcatcgaaaaacataactggaggattactaactaattctaaggcgattgacaatctcttcttttggccccccgacaacccgcttgtcattgttttcttatgatccagcagtccaagtgtgtctaggatttcgttaatgatatcttctcgatcttttggacttttggcgccaattttaagtgcagctgcgacagccatagcttcatccactcttagattagcatgtagttggttatcctgcataatatatgccgataattttcggaattgactaagatctctatcactgccgttcattaacacatggccttttacccctatggttttgtatccagtgagtatattgagtaaggtggattttccagcaccagatggtcccataatagcgcatagttcaccggaacgtagcattccactgacatttttcaaaatctttttctctttgctcccttgcttaaccacatattccaagtccgaaaaagccaaatcaactttgggtctctcaggtaaatgaactaacttttttggttgattagatacgatttgcaacttcacatcagacttattttttaagagtccttcggtggccatcttaaaaagatttaaaacaaataatttagaggacaaagaagcgactaccgtttaaataaaatgttctaatccactaaaacaccactagaaaagttatcaccaactaatagtgtacctaatcttatcacacatacactgctagctcataccgaaaacaatgataatattgaattgatattgggtatttattaatcaccgatcttcgagtaacgaggacatcaacaataaaattaacgttcgaacaaatgaggttttgatgatgattatttgcacttggaacttcgacttgacacttagtaagtg

SEQ ID NO: 521 - DNA, 624 bp, Diabrotica virgifera
  SmartBlast Evalue=3E-53; Info="ABC transporter, putative n=1 Tax=Pediculus humanus corporis RepID=E0W3T6_PEDHC"
aagtcatgaaatatactatcgttacgtaaagtatacagaagatggtctggaatggcatatctgatatcgttattgccagataataagacctcagggaataccatcgattaaaatgttcctttagtaaaactggcatttcaagtgggaaggacaaaatggttatagtcatggaagtgtacatcaagaacaacatgttgaaaaacaggaaaccaagattactaagtactttggacccatcgtttccaattttgaagtataaggcaccaattaggaatccaaccaaaatatgggcgaataaacgtaggtacatcaaagtccaatctcttctactgaacaataacgcacgttttaaaataatgaaaaattgttggaattccgaattaccatatctgggctgcttaactacaacggaagtatttaataaggcactatcaacattagctttttcgacatctttagaatctattccagtatcttcgttaacgttgtttgattttctattgccattcacggtactgccctctttggacaattcatcagaaataagggttttcaagttatctttggcgtattggtaagcgttattcaaaccgtcgctcattttgaaacctactatttggctag

SEQ ID NO: 522 - DNA, 4845 bp, Diabrotica virgifera
  SmartBlast Evalue=1E-171; Info=Cytochrome P450 9Z4 n=1 Tax= Tribolium castaneum RepID=D6WWU4_TRICA
cagtgcatccttgaacgttgttggactgttatgtgattggtcacactattaattagtatcaaaaataaacttgtttataaaaatattattgatatgttaaccagtgttatgtggattgaatattaaataacaaggaatcaaaaatgttgcaattagtactagtcttggccgctttggctgtattgttctattattttgccgtcaaacccatgagttactggaaggaaaggggaataaaacagacgaaacctgtatggttgcttggcgatagttggggtactgttataaagaagcacagtttagtggattttgtccaatatatctacgaccaagttccgggtgtaagatattttggatgctaccagatggtaacacctactcttgtcatacgagacccagatcttatcaaaaatattgccgttaaagactttgaccactttatggaccacagacaaatgatcccagcaaatgccgaccctctattcggaaagaatctatttgcattaaaaggtcaagtatggcgtgacacgagaccgatccttagtccaaccttcaccagcagcaaaatgcgtgccatgttcgttctgatgtctgaatgtggtgagaacttcataaaatatttccagaacaataacaaagatatcatcgaaatggaaatgaaggatacttttagacgttttacgaacgatgttattgctacaacagcttttggcgttaaaacagattctttaaaggacagagataatgaattcttcactatgggaacgagagcagtagattttggattctggcgaagtcttaagttttttggctactttctgataccgaaaattttagcgtttttcaaagtttcaatatttggcaaagaattaagtgacttctttatagaactgattgataagacagttcgaactagagaagagagaggaattgttcgtcctgacatgatacacttactaatggaggctaaaaaaggagttcaacaaaaagatgagaaagttatagatactggatttgcagtagtagaagaagcggatttaggaaatgctaaaggtgccatagaaatcaccaacgtcgatatagctgcgcacgctatggtcttctttttcgctggttttgatgccgtatcttctttgatgtgctttacaacctacgaattagcagtaaaccctgatatccaaaatagattgagagaagaagtcgaagatacgctgagagaatgtaatggcaagctaacatatgaaggtttattgaaaatgaaatacttggatatggttgtttcagaaaccttacgaaaatggccaattggtgtaatggccgacagaatatgtaccaaaccttacaccatcccagctgcaacacccgaggaaaagccgcttgttcttgaaaagaacacagttcttctctttcccgtatgggcgatacatagagatccagcattctacgaaaacccagagaggttcgacccagaaagattcaacgacgaaaacaagtcaaaaatcaacccttacacgtatcttcccttcggcattggtcctaggaactgtataggatctcgatttgctctattggaagcaaaagtggtgttgttttatctcttgtccaattttatagtcgagccttccgcaagacttacagtaccactgaaaatttctaggaagcagatcaatgtgacagctgagggtggtttctggtttaacttgaagaagttgaagaattaaaacgtacctaccgactaccgaggtgtatatacctattattgttacatgatataaactgagttgcgtgttttaacaattaccaactcatctttgtgcggattactgcgtgtgaacaacaaaaacttcatttactaaaatttttacccgacatcactgcttttgaaataatcgaaggtactgatttctttttggctaggtactagttgttttaaatgcatatatttagtagttctcggacatgtatatgtacctatatgtataatactaattattattaataataagtctactaggtacgcttaatatatttttactttatatgtgctatatgtgtgctaagaatagctattgttgttattacgatgtttgaagttatacttctttaggcgcgattgagattgagggtgaatttatattgatctgcgcgcatgcgcacaccgacagtatggtattagtcgttatacgggctctgattgggtgttgaaatgatctgtcaataataaataattgttcaatatgaaggtaaacaaatgtataatatattagttttattgttgtgaggacagaaacaaaaaagtttataattgtagtgacatttaaatagtttttaaaagcaacaggtacgtaataattgtaaatgtatcataggtacctacctatttgaacctaccaaagtacatagtatgtaatacttttatttacataatttgattaccatcaaaatttctatcaatgttcacctaatatattgttttcttactatatgtttttttgtattttttcaattctaaatcatttcaattcaaaatcaaaataatttaatttaattcaaaaatttcaaaagcttaatccgtttagttagtcgatcttcgcacataatgacacattgcctccgtggcgaagcatttaaggcgaatgaaccccaatataccaaccgcgctgatagctggttggaatcccaataaaaacttttattttttatttttatacattttatgactgtaagtatatttattatataattttattttcagaaaatacgtatttagttaaaaaaaatttccgacaattaatgttcagaaataatttgtggcattattaatgtgtttgtgtgtgttttattcttttattattttaatttttggcactgttttaataaaaatgtttgagaagtagtaagtataaattagtttaatatttaaataaaatataaataaaaagtatattaatttcgtttaaatcatataatagaagtataagttcttacgtgcgtacaaagtacacacacattcttttttttaatttatttattgccattctatatttatctttatactagtaatagtcggtatgatgttcaagctgtttattgttgagtccatcaatatcctcaatagtgaaaaaagattaaacacttcaataaaataactttataaaattcgtccactggataatagccatttcctaattattaccactgacagtacgtattttatcaataatactacacatcgacgtacgtttcactttatgttttgatttaacttgtttaaaaatgaatcatgacgtatgggcaaagataaaatggaaaaactatatcaagcataggcgaatgctgggtctattatacgccattctggaaattattgaaaaaaatcttaaactgactcaatttgaagtacaatacaggaagaaaatatccatatgagttaggtatttgaaactcttgtttattcggtttttacttcaatgttgttaacggttcttacgataatatcaatggcttctttcatttcttcttcggtgattattagaggtggtgaaaatcgtatgatatcttcgtgggtatgtttcgcaattaaaccgttttcttttaacttcaaacagacgtcccaggcatgtatacaatttctattaatatcgatagcgttcaataatcctttgcctctgacatccatcacaataggatttccattgttcagctttttccttaattccaccctgaaaatttcccctaatttaaaagcgttttcagctaaattttcatcttcgagaacttctagggctgttatagctacttttgacgctaagggattaccaccgaaggtagaaccatgggttcctggttcaatgactagcataatatcatcattagctaaacaggccgacactggataaaccccacctcccagcgcctttccaaggaccagaatatcgggcttaacattttcgtaatctacagccagtctttttccagttcttcctaaacctgtttggatttcatcggcaatccaaaggacgttgtatttggtgcacaactctctaacgcctttgaggtatccttcatctggaactttgataccagcttcaccttgaatgggttccaccatgtaagcacagactaagggatcttggagggatttctctaaagctttcaaatcgttgtaaggtacacagctgaatcccggtacaaatggtccatagtcctcaaagcataaaggatctgtcgatgaggaacatgcagctaatgatcgcccccaaaaattatccgcagcaaaaataatctttgcttgattcttggggatcttctttttcctgtagccccatttcctagctagtttacaagccgtatctcctgcctcaacacctgtattcataggcatcagtttgtcgtatccaaacagcttggtgattgcttcagcatattgtcccaactggtctgaaaagaaggctctggaggtgtggtgcaaaacagcactttgttcgtgcagcgcctttaatattttgggatgacaatgtccaaaattattggctgagtagccgcttaagaagtcgaaatattttttaccttctacgtcccaaacaaacacaccttgtcccttggtcaaagctactggtagtgggtgatagttatgagccgcatattttgcttccttgtcaaaaacttcctgtgaactgagtgaccttttttcgagtagttttatacaccgttcgagattttttgatagtctcgtagctcttctagacgagggtaacattgtttatcaaatataatgaaccaagctattacacaatttgcagccaactaagaagtcttgaagtaggtatttaccgtacgaatacc

SEQ ID NO: 523 - DNA, 4684 bp, Diabrotica virgifera
  SmartBlast Evalue=1E-171; Info=Cytochrome P450 9Z4 n=1 Tax= Tribolium castaneum RepID=D6WWU4_TRICA
cagtgcatccttgaacgttgttggactgttatgtgattggtcacactattaattagtatcaaaaataaacttgtttataaaaatattattgatatgttaaccagtgttatgtggattgaatattaaataacaaggtattttttatgtaattggtatatcaagtaagacgtaggaatcaaaaatgttgcaattagtactagtcttggccgctttggctgtattgttctattattttgccgtcaaacccatgagttactggaaggaaaggggaataaaacagacgaaacctgtatggttgcttggcgatagttggggtactgttataaagaagcacagtttagtggattttgtccaatatatctacgaccaagttccgggtgtaagatattttggatgctaccagatggtaacacctactcttgtcatacgagacccagatcttatcaaaaatattgccgttaaagactttgaccactttatggaccacagacaaatgatcccagcaaatgccgaccctctattcggaaagaatctatttgcattaaaaggtcaagtatggcgtgacacgagaccgatccttagtccaaccttcaccagcagcaaaatgcgtgccatgttcgttctgatgtctgaatgtggtgagaacttcataaaatatttccagaacaataacaaagatatcatcgaaatggaaatgaaggatacttttagacgttttacgaacgatgttattgctacaacagcttttggcgttaaaacagattctttaaaggacagagataatgaattcttcactatgggaacgagagcagtagattttggattctggcgaagtcttaagttttttggctactttctgataccgaaaattttagcgtttttcaaagtttcaatatttggcaaagaattaagtgacttctttatagaactgattgataagacagttcgaactagagaagagagaggaattgttcgtcctgacatgatacacttactaatggaggctaaaaaaggagttcaacaaaaagatgagaaagttatagatactggatttgcagtagtagaagaagcggatttaggaaatgctaaaggtgccatagaaatcaccaacgtcgatatagctgcgcacgctatggtcttctttttcgctggttttgatgccgtatcttctttgatgtgctttacaacctacgaattagcagtaaaccctgatatccaaaatagattgagagaagaagtcgaagatacgctgagagaatgtaatggcaagctaacatatgaaggtttattgaaaatgaaatacttggatatggttgtttcagaaaccttacgaaaatggccaattggtgtaatggccgacagaatatgtaccaaaccttacaccatcccagctgcaacacccgaggaaaagccgcttgttcttgaaaagaacacagttcttctctttcccgtatgggcgatacatagagatccagcattctacgaaaacccagagaggttcgacccagaaagattcaacgacgaaaacaagtcaaaaatcaacccttacacgtatcttcccttcggcattggtcctaggaactgtataggatctcgatttgctctattggaagcaaaagtggtgttgttttatctcttgtccaattttatagtcgagccttccgcaagacttacagtaccactgaaaatttctaggaagcagatcaatgtgacagctgagggtggtttctggtttaacttgaagaagttgaagaattaaaacgtacctaccgactaccgaggtgtatatacctattattgttacatgatataaactgagttgcgtgttttaacaattaccaactcatctttgtgcggattactgcgtgtgaacaacaaaaacttcatttactaaaatttttacccgacatcactgcttttgaaataatcgaaggtactgatttctttttggctaggtactagttgttttaaatgcatatatttagtagttctcggacatgtatatgtacctatatgtataatactaattattattaataataagtctactaggtacgcttaatatatttttactttatatgtgctatatgtgtgctaagaatagctattgttgttattacgatgtttgaagttatacttctttaggcgcgattgagattgagggtgaatttatattgatctgcgcgcatgcgcacaccgacagtatggtattagtcgttatacgggctctgattgggtgttgaaatgatctgtcaataataaataattgttcaatatgaaggtaaacaaatgtataatatattagttttattgttgtgaggacagaaacaaaaaagtttataattgtagtgacatttaaatagtttttaaaagcaacaggtacgtaataattgtaaatgtatcataggtacctacctatttgaacctaccaaagtacatagtatgtaatacttttatttacataatttgattaccatcaaaatttctatcaatgttcacctaatatattgttttcttactatatgtttttttgtattttttcaattctaaatcatttcaattcaaaatcaaaataatttaatttaattcaaaaatttcaaaagcttaatccgtttagttagtcgatcttcgcacataatgacacattgcctccgtggcgaagcatttaaggcgaatgaaccccaatataccaaccgcgctgatagctggttggaatcccaataaaaacttttattttttatttttatacattttatgactgtaagtatatttattatataattttattttcagaaaatacgtatttagttaaaaaaaatttccgacaattaatgttcagaaataatttgtggcattattaatgtgtttgtgtgtgttttattcttttattattttaatttttggcactgttttaataaaaatgtttgagaagtagtaagtataaattagtttaatatttaaataaaatataaataaaaagtatattaatttcgtttaaatcatataatagaagtataagttcttacgtgcgtacaaagtacacacacattcttttttttaatttatttattgccattctatatttatctttatactagtaatagtcggtatgatgttcaagctgtttattgttgagtccatcaatatcctcaatagtgaaaaaagattaaacacttcaataaaataactttataaaattcgtccactggataatagccatttcctaattattaccactgacagtacgtattttatcaataatactacacatcgacgtacgtttcactttatgttttgatttaacttgtttaaaaatgaatcatgacgtatgggcaaagataaaatgaaaaaaatcatcttcctagtctcagcatccgtatggattgcaaattgtagaagcctcggaggtgtaaccagagaaggttcccattgttttcattctggtgggatgtagaatagcattatgttgttttatatgccattagagtgaaaacttagtatttttgctagcagttgccgctagggcatctatgccatttcgttcgttgcaatccgggactgcacgctggggtttgttttggttggatcagggagagcagcatatgtgcctcctgatgagagactaataagtttcgaaaccggtagaggtgcttgcagcactctctgattggactggaatatggttcggctgtattttcgttttgcaacgaaattgaaaatggttattcattttttatttactttttatttacttgtagaccccatatatcatactcttcaattagttttggtgctatatagttcaaatcgtcttgagccactgacttgatcgtctgcaaagttgagcgtatttaacatagtgttggtgagtggtacctccattctacatttttgtttccatatttttgaagcactttccacgtatattttatataaagtgggggacagacaacacccttgctttaatccttttggcaggtaaaagggggagaagtgtactttttgatgttatataatctatattatgttatataattatataatcctttttatgttataaatcttgttgttatttgtgtccctgtttttatttttgttattggttgattgtatagtactttgacggcttttattaattctattttaatattcgtgctttccattgattgccacagcttcttccgtggaacactgtcgtaggcttttcgtagttcgacaaacaacctaatatttttatgcgaaccggttaaaccttctaagacgtcgccgcaaaggcatttatcccatgtcaataatattttttttaaatgttgaatatttttttgtttacctaaggattttaactatgttgtttaattgatgggattttgtcgaaagtactagtaagttcttttaacgttattatgtaaatatttttattctggataattcgatttacctgtattatgtaaataacttttagcccatagaaaaagcggtttgtttcatgaataatcaaaaacattttattttggtatttaaggcaacgattgtgaatgatttttttagtgtgtttacgattcttgaaagctatcacataaattgttacaaataaactacatgtgagtccttagttacttattttataagtattgtaaatgttttaatacatataaggtgttgtaaaataaagggtttattaagt

SEQ ID NO: 524 - DNA, 4646 bp, Diabrotica virgifera
  SmartBlast Evalue=1E-171; Info=Cytochrome P450 9Z4 n=1 Tax= Tribolium castaneum RepID=D6WWU4_TRICA
cagtgcatccttgaacgttgttggactgttatgtgattggtcacactattaattagtatcaaaaataaacttgtttataaaaatattattgatatgttaaccagtgttatgtggattgaatattaaataacaaggaatcaaaaatgttgcaattagtactagtcttggccgctttggctgtattgttctattattttgccgtcaaacccatgagttactggaaggaaaggggaataaaacagacgaaacctgtatggttgcttggcgatagttggggtactgttataaagaagcacagtttagtggattttgtccaatatatctacgaccaagttccgggtgtaagatattttggatgctaccagatggtaacacctactcttgtcatacgagacccagatcttatcaaaaatattgccgttaaagactttgaccactttatggaccacagacaaatgatcccagcaaatgccgaccctctattcggaaagaatctatttgcattaaaaggtcaagtatggcgtgacacgagaccgatccttagtccaaccttcaccagcagcaaaatgcgtgccatgttcgttctgatgtctgaatgtggtgagaacttcataaaatatttccagaacaataacaaagatatcatcgaaatggaaatgaaggatacttttagacgttttacgaacgatgttattgctacaacagcttttggcgttaaaacagattctttaaaggacagagataatgaattcttcactatgggaacgagagcagtagattttggattctggcgaagtcttaagttttttggctactttctgataccgaaaattttagcgtttttcaaagtttcaatatttggcaaagaattaagtgacttctttatagaactgattgataagacagttcgaactagagaagagagaggaattgttcgtcctgacatgatacacttactaatggaggctaaaaaaggagttcaacaaaaagatgagaaagttatagatactggatttgcagtagtagaagaagcggatttaggaaatgctaaaggtgccatagaaatcaccaacgtcgatatagctgcgcacgctatggtcttctttttcgctggttttgatgccgtatcttctttgatgtgctttacaacctacgaattagcagtaaaccctgatatccaaaatagattgagagaagaagtcgaagatacgctgagagaatgtaatggcaagctaacatatgaaggtttattgaaaatgaaatacttggatatggttgtttcagaaaccttacgaaaatggccaattggtgtaatggccgacagaatatgtaccaaaccttacaccatcccagctgcaacacccgaggaaaagccgcttgttcttgaaaagaacacagttcttctctttcccgtatgggcgatacatagagatccagcattctacgaaaacccagagaggttcgacccagaaagattcaacgacgaaaacaagtcaaaaatcaacccttacacgtatcttcccttcggcattggtcctaggaactgtataggatctcgatttgctctattggaagcaaaagtggtgttgttttatctcttgtccaattttatagtcgagccttccgcaagacttacagtaccactgaaaatttctaggaagcagatcaatgtgacagctgagggtggtttctggtttaacttgaagaagttgaagaattaaaacgtacctaccgactaccgaggtgtatatacctattattgttacatgatataaactgagttgcgtgttttaacaattaccaactcatctttgtgcggattactgcgtgtgaacaacaaaaacttcatttactaaaatttttacccgacatcactgcttttgaaataatcgaaggtactgatttctttttggctaggtactagttgttttaaatgcatatatttagtagttctcggacatgtatatgtacctatatgtataatactaattattattaataataagtctactaggtacgcttaatatatttttactttatatgtgctatatgtgtgctaagaatagctattgttgttattacgatgtttgaagttatacttctttaggcgcgattgagattgagggtgaatttatattgatctgcgcgcatgcgcacaccgacagtatggtattagtcgttatacgggctctgattgggtgttgaaatgatctgtcaataataaataattgttcaatatgaaggtaaacaaatgtataatatattagttttattgttgtgaggacagaaacaaaaaagtttataattgtagtgacatttaaatagtttttaaaagcaacaggtacgtaataattgtaaatgtatcataggtacctacctatttgaacctaccaaagtacatagtatgtaatacttttatttacataatttgattaccatcaaaatttctatcaatgttcacctaatatattgttttcttactatatgtttttttgtattttttcaattctaaatcatttcaattcaaaatcaaaataatttaatttaattcaaaaatttcaaaagcttaatccgtttagttagtcgatcttcgcacataatgacacattgcctccgtggcgaagcatttaaggcgaatgaaccccaatataccaaccgcgctgatagctggttggaatcccaataaaaacttttattttttatttttatacattttatgactgtaagtatatttattatataattttattttcagaaaatacgtatttagttaaaaaaaatttccgacaattaatgttcagaaataatttgtggcattattaatgtgtttgtgtgtgttttattcttttattattttaatttttggcactgttttaataaaaatgtttgagaagtagtaagtataaattagtttaatatttaaataaaatataaataaaaagtatattaatttcgtttaaatcatataatagaagtataagttcttacgtgcgtacaaagtacacacacattcttttttttaatttatttattgccattctatatttatctttatactagtaatagtcggtatgatgttcaagctgtttattgttgagtccatcaatatcctcaatagtgaaaaaagattaaacacttcaataaaataactttataaaattcgtccactggataatagccatttcctaattattaccactgacagtacgtattttatcaataatactacacatcgacgtacgtttcactttatgttttgatttaacttgtttaaaaatgaatcatgacgtatgggcaaagataaaatgaaaaaaatcatcttcctagtctcagcatccgtatggattgcaaattgtagaagcctcggaggtgtaaccagagaaggttcccattgttttcattctggtgggatgtagaatagcattatgttgttttatatgccattagagtgaaaacttagtatttttgctagcagttgccgctagggcatctatgccatttcgttcgttgcaatccgggactgcacgctggggtttgttttggttggatcagggagagcagcatatgtgcctcctgatgagagactaataagtttcgaaaccggtagaggtgcttgcagcactctctgattggactggaatatggttcggctgtattttcgttttgcaacgaaattgaaaatggttattcattttttatttactttttatttacttgtagaccccatatatcatactcttcaattagttttggtgctatatagttcaaatcgtcttgagccactgacttgatcgtctgcaaagttgagcgtatttaacatagtgttggtgagtggtacctccattctacatttttgtttccatatttttgaagcactttccacgtatattttatataaagtgggggacagacaacacccttgctttaatccttttggcaggtaaaagggggagaagtgtactttttgatgttatataatctatattatgttatataattatataatcctttttatgttataaatcttgttgttatttgtgtccctgtttttatttttgttattggttgattgtatagtactttgacggcttttattaattctattttaatattcgtgctttccattgattgccacagcttcttccgtggaacactgtcgtaggcttttcgtagttcgacaaacaacctaatatttttatgcgaaccggttaaaccttctaagacgtcgccgcaaaggcatttatcccatgtcaataatattttttttaaatgttgaatatttttttgtttacctaaggattttaactatgttgtttaattgatgggattttgtcgaaagtactagtaagttcttttaacgttattatgtaaatatttttattctggataattcgatttacctgtattatgtaaataacttttagcccatagaaaaagcggtttgtttcatgaataatcaaaaacattttattttggtatttaaggcaacgattgtgaatgatttttttagtgtgtttacgattcttgaaagctatcacataaattgttacaaataaactacatgtgagtccttagttacttattttataagtattgtaaatgttttaatacatataaggtgttgtaaaataaagggtttattaagt

SEQ ID NO: 525 - DNA, 3502 bp, Diabrotica virgifera
  SmartBlast Evalue=1E-171; Info=Cytochrome P450 9Z4 n=1 Tax= Tribolium castaneum RepID=D6WWU4_TRICA
cagtgcatccttgaacgttgttggactgttatgtgattggtcacactattaattagtatcaaaaataaacttgtttataaaaatattattgatatgttaaccagtgttatgtggattgaatattaaataacaaggtattttttatgtaattggtatatcaagtaagacgtaggaatcaaaaatgttgcaattagtactagtcttggccgctttggctgtattgttctattattttgccgtcaaacccatgagttactggaaggaaaggggaataaaacagacgaaacctgtatggttgcttggcgatagttggggtactgttataaagaagcacagtttagtggattttgtccaatatatctacgaccaagttccgggtgtaagatattttggatgctaccagatggtaacacctactcttgtcatacgagacccagatcttatcaaaaatattgccgttaaagactttgaccactttatggaccacagacaaatgatcccagcaaatgccgaccctctattcggaaagaatctatttgcattaaaaggtcaagtatggcgtgacacgagaccgatccttagtccaaccttcaccagcagcaaaatgcgtgccatgttcgttctgatgtctgaatgtggtgagaacttcataaaatatttccagaacaataacaaagatatcatcgaaatggaaatgaaggatacttttagacgttttacgaacgatgttattgctacaacagcttttggcgttaaaacagattctttaaaggacagagataatgaattcttcactatgggaacgagagcagtagattttggattctggcgaagtcttaagttttttggctactttctgataccgaaaattttagcgtttttcaaagtttcaatatttggcaaagaattaagtgacttctttatagaactgattgataagacagttcgaactagagaagagagaggaattgttcgtcctgacatgatacacttactaatggaggctaaaaaaggagttcaacaaaaagatgagaaagttatagatactggatttgcagtagtagaagaagcggatttaggaaatgctaaaggtgccatagaaatcaccaacgtcgatatagctgcgcacgctatggtcttctttttcgctggttttgatgccgtatcttctttgatgtgctttacaacctacgaattagcagtaaaccctgatatccaaaatagattgagagaagaagtcgaagatacgctgagagaatgtaatggcaagctaacatatgaaggtttattgaaaatgaaatacttggatatggttgtttcagaaaccttacgaaaatggccaattggtgtaatggccgacagaatatgtaccaaaccttacaccatcccagctgcaacacccgaggaaaagccgcttgttcttgaaaagaacacagttcttctctttcccgtatgggcgatacatagagatccagcattctacgaaaacccagagaggttcgacccagaaagattcaacgacgaaaacaagtcaaaaatcaacccttacacgtatcttcccttcggcattggtcctaggaactgtataggatctcgatttgctctattggaagcaaaagtggtgttgttttatctcttgtccaattttatagtcgagccttccgcaagacttacagtaccactgaaaatttctaggaagcagatcaatgtgacagctgagggtggtttctggtttaacttgaagaagttgaagaattaaaacgtacctaccgactaccgaggtgtatatacctattattgttacatgatataaactgagttgcgtgttttaacaattaccaactcatctttgtgcggattactgcgtgtgaacaacaaaaacttcatttactaaaatttttacccgacatcactgcttttgaaataatcgaaggtactgatttctttttggctaggtactagttgttttaaatgcatatatttagtagttctcggacatgtatatgtacctatatgtataatactaattattattaataataagtctactaggtacgcttaatatatttttactttatatgtgctatatgtgtgctaagaatagctattgttgttattacgatgtttgaagttatacttctttaggcgcgattgagattgagggtgaatttatattgatctgcgcgcatgcgcacaccgacagtatggtattagtcgttatacgggctctgattgggtgttgaaatgatctgtcaataataaataattgttcaatatgaaggtaaacaaatgtataatatattagttttattgttgtgaggacagaaacaaaaaagtttataattgtagtgacatttaaatagtttttaaaagcaacaggtacgtaataattgtaaatgtatcataggtacctacctatttgaacctaccaaagtacatagtatgtaatacttttatttacataatttgattaccatcaaaatttctatcaatgttcacctaatatattgttttcttactatatgtttttttgtattttttcaattctaaatcatttcaattcaaaatcaaaataatttaatttaattcaaaaatttcaaaagcttaatccgtttagttagtcgatcttcgcacataatgacacattgcctccgtggcgaagcatttaaggcgaatgaaccccaatataccaaccgcgctgatagctggttggaatcccaataaaaacttttattttttatttttatacattttatgactgtaagtatatttattatataattttattttcagaaaatacgtatttagttaaaaaaaatttccgacaattaatgttcagaaataatttgtggcattattaatgtgtttgtgtgtgttttattcttttattattttaatttttggcactgttttaataaaaatgtttgagaagtagtaagtataaattagtttaatatttaaataaaatataaataaaaagtatattaatttcgtttaaatcatataatagaagtataagttcttacgtgcgtacaaagtacacacacattcttttttttaatttatttattgccattctatatttatctttatactagtaatagtcggtatgatgttcaagctgtttattgttgagtccatcaatatcctcaatagtgaaaaaagattaaacacttcaataaaataactttataaaattcgtccactggataatagccatttcctaattattaccactgacagtacgtattttatcaataatactacacatcgacgtacgtttcactttatgttttgatttaacttgtttaaaaatgaatcatgacgtatgggcaaagataaaatgaaaaaaatcatcttcctagtctcagcatccgtatggattgcaaattgtagaagcctcggaggtgttaccagagaaggttcccattgttttcagtctggtaggatgtggaacaacatttttggatgttgttttatgtgctattagattgaaaacttt

SEQ ID NO: 526 - DNA, 3464 bp, Diabrotica virgifera
  SmartBlast Evalue=1E-171; Info=Cytochrome P450 9Z4 n=1 Tax= Tribolium castaneum RepID=D6WWU4_TRICA
cagtgcatccttgaacgttgttggactgttatgtgattggtcacactattaattagtatcaaaaataaacttgtttataaaaatattattgatatgttaaccagtgttatgtggattgaatattaaataacaaggaatcaaaaatgttgcaattagtactagtcttggccgctttggctgtattgttctattattttgccgtcaaacccatgagttactggaaggaaaggggaataaaacagacgaaacctgtatggttgcttggcgatagttggggtactgttataaagaagcacagtttagtggattttgtccaatatatctacgaccaagttccgggtgtaagatattttggatgctaccagatggtaacacctactcttgtcatacgagacccagatcttatcaaaaatattgccgttaaagactttgaccactttatggaccacagacaaatgatcccagcaaatgccgaccctctattcggaaagaatctatttgcattaaaaggtcaagtatggcgtgacacgagaccgatccttagtccaaccttcaccagcagcaaaatgcgtgccatgttcgttctgatgtctgaatgtggtgagaacttcataaaatatttccagaacaataacaaagatatcatcgaaatggaaatgaaggatacttttagacgttttacgaacgatgttattgctacaacagcttttggcgttaaaacagattctttaaaggacagagataatgaattcttcactatgggaacgagagcagtagattttggattctggcgaagtcttaagttttttggctactttctgataccgaaaattttagcgtttttcaaagtttcaatatttggcaaagaattaagtgacttctttatagaactgattgataagacagttcgaactagagaagagagaggaattgttcgtcctgacatgatacacttactaatggaggctaaaaaaggagttcaacaaaaagatgagaaagttatagatactggatttgcagtagtagaagaagcggatttaggaaatgctaaaggtgccatagaaatcaccaacgtcgatatagctgcgcacgctatggtcttctttttcgctggttttgatgccgtatcttctttgatgtgctttacaacctacgaattagcagtaaaccctgatatccaaaatagattgagagaagaagtcgaagatacgctgagagaatgtaatggcaagctaacatatgaaggtttattgaaaatgaaatacttggatatggttgtttcagaaaccttacgaaaatggccaattggtgtaatggccgacagaatatgtaccaaaccttacaccatcccagctgcaacacccgaggaaaagccgcttgttcttgaaaagaacacagttcttctctttcccgtatgggcgatacatagagatccagcattctacgaaaacccagagaggttcgacccagaaagattcaacgacgaaaacaagtcaaaaatcaacccttacacgtatcttcccttcggcattggtcctaggaactgtataggatctcgatttgctctattggaagcaaaagtggtgttgttttatctcttgtccaattttatagtcgagccttccgcaagacttacagtaccactgaaaatttctaggaagcagatcaatgtgacagctgagggtggtttctggtttaacttgaagaagttgaagaattaaaacgtacctaccgactaccgaggtgtatatacctattattgttacatgatataaactgagttgcgtgttttaacaattaccaactcatctttgtgcggattactgcgtgtgaacaacaaaaacttcatttactaaaatttttacccgacatcactgcttttgaaataatcgaaggtactgatttctttttggctaggtactagttgttttaaatgcatatatttagtagttctcggacatgtatatgtacctatatgtataatactaattattattaataataagtctactaggtacgcttaatatatttttactttatatgtgctatatgtgtgctaagaatagctattgttgttattacgatgtttgaagttatacttctttaggcgcgattgagattgagggtgaatttatattgatctgcgcgcatgcgcacaccgacagtatggtattagtcgttatacgggctctgattgggtgttgaaatgatctgtcaataataaataattgttcaatatgaaggtaaacaaatgtataatatattagttttattgttgtgaggacagaaacaaaaaagtttataattgtagtgacatttaaatagtttttaaaagcaacaggtacgtaataattgtaaatgtatcataggtacctacctatttgaacctaccaaagtacatagtatgtaatacttttatttacataatttgattaccatcaaaatttctatcaatgttcacctaatatattgttttcttactatatgtttttttgtattttttcaattctaaatcatttcaattcaaaatcaaaataatttaatttaattcaaaaatttcaaaagcttaatccgtttagttagtcgatcttcgcacataatgacacattgcctccgtggcgaagcatttaaggcgaatgaaccccaatataccaaccgcgctgatagctggttggaatcccaataaaaacttttattttttatttttatacattttatgactgtaagtatatttattatataattttattttcagaaaatacgtatttagttaaaaaaaatttccgacaattaatgttcagaaataatttgtggcattattaatgtgtttgtgtgtgttttattcttttattattttaatttttggcactgttttaataaaaatgtttgagaagtagtaagtataaattagtttaatatttaaataaaatataaataaaaagtatattaatttcgtttaaatcatataatagaagtataagttcttacgtgcgtacaaagtacacacacattcttttttttaatttatttattgccattctatatttatctttatactagtaatagtcggtatgatgttcaagctgtttattgttgagtccatcaatatcctcaatagtgaaaaaagattaaacacttcaataaaataactttataaaattcgtccactggataatagccatttcctaattattaccactgacagtacgtattttatcaataatactacacatcgacgtacgtttcactttatgttttgatttaacttgtttaaaaatgaatcatgacgtatgggcaaagataaaatgaaaaaaatcatcttcctagtctcagcatccgtatggattgcaaattgtagaagcctcggaggtgttaccagagaaggttcccattgttttcagtctggtaggatgtggaacaacatttttggatgttgttttatgtgctattagattgaaaacttt

SEQ ID NO: 527 - DNA, 2948 bp, Diabrotica virgifera
aatgacataaacttagcagaatatttcgttcccattttactcacaaataaattacaaacaatgacgtataatacctagactcacccaatgctgtcctaatttgattacttccggtaagtactatagttctgacgaatagaaacttatttgtttattttcacgagattacttactgtttaactttttatttttgaagttatacttctttaggcgcgattgatattgagggtgaatttatattgatctgcgcgcatgcgcacaccgacagtatggtattagtcgttatacgggctctgattgggtgttgaaatgatctgtcaataataaataattgttcaatatgaaggtaaacaaatgtataatatattagttttattgttgtgaggacagaaacaaaaaagtttataattgtagtgacatttaaatagtttttaaaagcaacaggtacgtaataattgtaaatgtatcataggtacctacctatttgaacctaccaaagtacatagtatgtaatacttttatttacataatttgattaccatcaaaatttctatcaatgttcacctaatatattgttttcttactatatgtttttttgtattttttcaattctaaatcatttcaattcaaaatcaaaataatttaatttaattcaaaaatttcaaaagcttaatccgtttagttagtcgatcttcgcacataatgacacattgcctccgtggcgaagcatttaaggcgaatgaaccccaatataccaaccgcgctgatagctggttggaatcccaataaaaacttttattttttatttttatacattttatgactgtaagtatatttattatataattttattttcagaaaatacgtatttagttaaaaaaaatttccgacaattaatgttcagaaataatttgtggcattattaatgtgtttgtgtgtgttttattcttttattattttaatttttggcactgttttaataaaaatgtttgagaagtagtaagtataaattagtttaatatttaaataaaatataaataaaaagtatattaatttcgtttaaatcatataatagaagtataagttcttacgtgcgtacaaagtacacacacattcttttttttaatttatttattgccattctatatttatctttatactagtaatagtcggtatgatgttcaagctgtttattgttgagtccatcaatatcctcaatagtgaaaaaagattaaacacttcaataaaataactttataaaattcgtccactggataatagccatttcctaattattaccactgacagtacgtattttatcaataatactacacatcgacgtacgtttcactttatgttttgatttaacttgtttaaaaatgaatcatgacgtatgggcaaagataaaatgaaaaaaatcatcttcctagtctcagcatccgtatggattgcaaattgtagaagcctcggaggtgtaaccagagaaggttcccattgttttcattctggtgggatgtagaatagcattatgttgttttatatgccattagagtgaaaacttagtatttttgctagcagttgccgctagggcatctatgccatttcgttcgttgcaatccgggactgcacgctggggtttgttttggttggatcagggagagcagcatatgtgcctcctgatgagagactaataagtttcgaaaccggtagaggtgcttgcagcactctctgattggactggaatatggttcggctgtattttcgttttgcaacgaaattgaaaatggttattcatttttgatttacaatatattctgtacatagaatgtacattgttatgcaaaatatcccgaccacctcgtaatttccagaacacaattattataaaataaattcacctacttagtttccaagtttccagtttttatttaattaaaaattgttatctgttggtgtaaaataaactgtagtgcacctattaattaaattaaaaacaaaattagaaatcctaagatagattaataatttttagaacgctgtgtgattatcgggggccagatttttttatgaaaaaaaggtaaaaacaaatcagtagttagcatcaaattttaatgaatgcatacagatttaaacataattttgagtcgtctttaacttataagatgtcttagttgcaaaacttagtggttactttggcaaaacactcctgtaaatgattttaatttaacgttttagaactgtgaattcaaatgacaaaatgaattgttttcctagagttgtcgtccatctttgaaattttgagcgccctctgttggaatttaattttgcgaatattttccatttttttagagttatgacacttacgaagtcggggtgcgacgtattgaaattatttaaaaaaaataaaaagtcacgtctattttatatatgttatgtctagataagaatttaatatgctgtatacacttttttgataattctactctttatttttaatttattgtttcaaggctgctcgcttttggtggctaattgtattttttagtttttagggatgtactcaatttatttgttttatgtatgtaactatagcacaaatgaacaagagacaaatacaaaccagctaaaaaacgattttctatcgataactttgaattttaccattatttaaatcaaagtaagaattttaagcaataattctaaggggatccccgcacaaaggtaatattagctgaaatagcttgtataataaagattttcttttataaccaataaaaataatgatacattgttttcgagacatctaggatattggttgtaataatttcgacctcacttttgatctgcaaatgtgacagatattaccaaatgcgatgggacaacatccagaattgagcagaccacagccgcttttagaaggatgtccaaggtatgtaaaggtcgcgtct

SEQ ID NO: 528 - DNA, 3087 bp, Diabrotica virgifera
  SmartBlast Evalue=1E-171; Info=Cytochrome P450 9Z4 n=1 Tax= Tribolium castaneum RepID=D6WWU4_TRICA
cagtgcatccttgaacgttgttggactgttatgtgattggtcacactattaattagtatcaaaaataaacttgtttataaaaatattattgatatgttaaccagtgttatgtggattgaatattaaataacaaggtattttttatgtaattggtatatcaagtaagacgtaggaatcaaaaatgttgcaattagtactagtcttggccgctttggctgtattgttctattattttgccgtcaaacccatgagttactggaaggaaaggggaataaaacagacgaaacctgtatggttgcttggcgatagttggggtactgttataaagaagcacagtttagtggattttgtccaatatatctacgaccaagttccgggtgtaagatattttggatgctaccagatggtaacacctactcttgtcatacgagacccagatcttatcaaaaatattgccgttaaagactttgaccactttatggaccacagacaaatgatcccagcaaatgccgaccctctattcggaaagaatctatttgcattaaaaggtcaagtatggcgtgacacgagaccgatccttagtccaaccttcaccagcagcaaaatgcgtgccatgttcgttctgatgtctgaatgtggtgagaacttcataaaatatttccagaacaataacaaagatatcatcgaaatggaaatgaaggatacttttagacgttttacgaacgatgttattgctacaacagcttttggcgttaaaacagattctttaaaggacagagataatgaattcttcactatgggaacgagagcagtagattttggattctggcgaagtcttaagttttttggctactttctgataccgaaaattttagcgtttttcaaagtttcaatatttggcaaagaattaagtgacttctttatagaactgattgataagacagttcgaactagagaagagagaggaattgttcgtcctgacatgatacacttactaatggaggctaaaaaaggagttcaacaaaaagatgagaaagttatagatactggatttgcagtagtagaagaagcggatttaggaaatgctaaaggtgccatagaaatcaccaacgtcgatatagctgcgcacgctatggtcttctttttcgctggttttgatgccgtatcttctttgatgtgctttacaacctacgaattagcagtaaaccctgatatccaaaatagattgagagaagaagtcgaagatacgctgagagaatgtaatggcaagctaacatatgaaggtttattgaaaatgaaatacttggatatggttgtttcagaaaccttacgaaaatggccaattggtgtaatggccgacagaatatgtaccaaaccttacaccatcccagctgcaacacccgaggaaaagccgcttgttcttgaaaagaacacagttcttctctttcccgtatgggcgatacatagagatccagcattctacgaaaacccagagaggttcgacccagaaagattcaacgacgaaaacaagtcaaaaatcaacccttacacgtatcttcccttcggcattggtcctaggaactgtataggatctcgatttgctctattggaagcaaaagtggtgttgttttatctcttgtccaattttatagtcgagccttccgcaagacttacagtaccactgaaaatttctaggaagcagatcaatgtgacagctgagggtggtttctggtttaacttgaagaagttgaagaattaaaacgtacctaccgactaccgaggtgtatatacctattattgttacatgatataaactgagttgcgtgttttaacaattaccaactcatctttgtgcggattactgcgtgtgaacaacaaaaacttcatttactaaaatttttacccgacatcactgcttttgaaataatcgaaggtactgatttctttttggctaggtactagttgttttaaatgcatatatttagtagttctcggacatgtatatgtacctatatgtataatactaattattattaataataagtctactaggtacgcttaatatatttttactttatatgtgctatatgtgtgctaagaatagctattgttgttattacgatgtttgaagttatacttctttaggcgcgattgagattgagggtgaatttatattgatctgcgcgcatgcgcacaccgacagtatggtattagtcgttatacgggctctgattgggtgttgaaatgatctgtcaataataaataattgttcaatatgaaggtaaacaaatgtataatatattagttttattgttgtgaggacagaaacaaaaaagtttataattgtagtgacatttaaatagtttttaaaagcaacaggtacgtaataattgtaaatgtatcataggtacctacctatttgaacctaccaaagtacatagtatgtaatacttttatttacataatttgattaccatcaaaatttctatcaatgttcacctaatatattgttttcttactatatgtttttttgtattttttcaattctaaatcatttcaattcaaaatcaaaataatttaatttaattcaaaaatttcaaaagcttaatccgtttagttagtcgatcttcgcacataatgacacattgcctccgtggcgaagcatttaaggcgaatgaaccccaatataccaaccgcgctgatagctggttcgaatcccaataaaaacttttattttttttattttttttatacattttatgattgtaagtatatttattatataattttattttcagaaaatacgtatttagttaaaaaattttccgacaattaatgttcagaaatcatttgtggcatttttaatgtgtttgtgtgtgttttattcttttattattttaatttttggcactgttttaataaaaatgtttgagaagtagtaagtataaattagtttaatatttaaataaaatataaataaaaagtatattaatttcgtttaaatcatataatagaagtataacttcttacgtgcgtacaaagtacacacacattctttttttttagttcaatgctgaacatacgtct

SEQ ID NO: 529 - DNA, 2911 bp, Diabrotica virgifera
aatgacataaacttagcagaatatttcgttcccattttactcacaaataaattacaaacaatgacgtataatacctagactcacccaatgctgtcctaatttgattacttccggtaagtactatagttctgacgaatagaaacttatttgtttattttcacgagattacttactgtttaactttttatttttgaagttatacttctttaggcgcgattgatattgagggtgaatttatattgatctgcgcgcatgcgcacaccgacagtatggtattagtcgttatacgggctctgattgggtgttgaaatgatctgtcaataataaataattgttcaatatgaaggtaaacaaatgtataatatattagttttattgttgtgaggacagaaacaaaaaagtttataattgtagtgacatttaaatagtttttaaaagcaacaggtacgtaataattgtaaatgtatcataggtacctacctatttgaacctaccaaagtacatagtatgtaatacttttatttacataatttgattaccatcaaaatttctatcaatgttcacctaatatattgttttcttactatatgtttttttgtattttttcaattctaaatcatttcaattcaaaatcaaaataatttaatttaattcaaaaatttcaaaagcttaatccgtttagttagtcgatcttcgcacataatgacacattgcctccgtggcgaagcatttaaggcgaatgaaccccaatataccaaccgcgctgatagctggttggaatcccaataaaaacttttattttttatttttatacattttatgactgtaagtatatttattatataattttattttcagaaaatacgtatttagttaaaaaaaatttccgacaattaatgttcagaaataatttgtggcattattaatgtgtttgtgtgtgttttattcttttattattttaatttttggcactgttttaataaaaatgtttgagaagtagtaagtataaattagtttaatatttaaataaaatataaataaaaagtatattaatttcgtttaaatcatataatagaagtataagttcttacgtgcgtacaaagtacacacacattcttttttttaatttatttattgccattctatatttatctttatactagtaatagtcggtatgatgttcaagctgtttattgttgagtccatcaatatcctcaatagtgaaaaaagattaaacacttcaataaaataactttataaaattcgtccactggataatagccatttcctaattattaccactgacagtacgtattttatcaataatactacacatcgacgtacgtttcactttatgttttgatttaacttgtttaaaaatgaatcatgacgtatgggcaaagataaaatgaaaaaaatcatcttcctagtctcagcatccgtatggattgcaaattgtagaagcctcggaggtgtaaccagagaaggttcccattgttttcattctggtgggatgtagaatagcattatgttgttttatatgccattagagtgaaaacttagtatttttgctagcagttgccgctagggcatctatgccatttcgttcgttgcaatccgggactgcacgctggggtttgttttggttggatcagggagagcagcatatgtgcctcctgatgagagactaataagtttcgaaaccggtagaggtgcttgcagcactctctgattggactggaatatggttcggctgtattttcgttttgcaacgaaattgaaaatggttattcatttttgatttacaatatattctgtacatagaatgttccagaacacaattattataaaataaattcacctacttagtttccaagtttccagtttttatttaattaaaaattgttatctgttggtgtaaaataaactgtagtgcacctattaattaaattaaaaacaaaattagaaatcctaagatagattaataatttttagaacgctgtgtgattatcgggggccagatttttttatgaaaaaaaggtaaaaacaaatcagtagttagcatcaaattttaatgaatgcatacagatttaaacataattttgagtcgtctttaacttataagatgtcttagttgcaaaacttagtggttactttggcaaaacactcctgtaaatgattttaatttaacgttttagaactgtgaattcaaatgacaaaatgaattgttttcctagagttgtcgtccatctttgaaattttgagcgccctctgttggaatttaattttgcgaatattttccatttttttagagttatgacacttacgaagtcggggtgcgacgtattgaaattatttaaaaaaaataaaaagtcacgtctattttatatatgttatgtctagataagaatttaatatgctgtatacacttttttgataattctactctttatttttaatttattgtttcaaggctgctcgcttttggtggctaattgtattttttagtttttagggatgtactcaatttatttgttttatgtatgtaactatagcacaaatgaacaagagacaaatacaaaccagctaaaaaacgattttctatcgataactttgaattttaccattatttaaatcaaagtaagaattttaagcaataattctaaggggatccccgcacaaaggtaatattagctgaaatagcttgtataataaagattttcttttataaccaataaaaataatgatacattgttttcgagacatctaggatattggttgtaataatttcgacctcacttttgatctgcaaatgtgacagatattaccaaatgcgatgggacaacatccagaattgagcagaccacagccgcttttagaaggatgtccaaggtatgtaaaggtcgcgtct

SEQ ID NO: 530 - DNA, 3049 bp, Diabrotica virgifera
  SmartBlast Evalue=1E-171; Info=Cytochrome P450 9Z4 n=1 Tax= Tribolium castaneum RepID=D6WWU4_TRICA
cagtgcatccttgaacgttgttggactgttatgtgattggtcacactattaattagtatcaaaaataaacttgtttataaaaatattattgatatgttaaccagtgttatgtggattgaatattaaataacaaggaatcaaaaatgttgcaattagtactagtcttggccgctttggctgtattgttctattattttgccgtcaaacccatgagttactggaaggaaaggggaataaaacagacgaaacctgtatggttgcttggcgatagttggggtactgttataaagaagcacagtttagtggattttgtccaatatatctacgaccaagttccgggtgtaagatattttggatgctaccagatggtaacacctactcttgtcatacgagacccagatcttatcaaaaatattgccgttaaagactttgaccactttatggaccacagacaaatgatcccagcaaatgccgaccctctattcggaaagaatctatttgcattaaaaggtcaagtatggcgtgacacgagaccgatccttagtccaaccttcaccagcagcaaaatgcgtgccatgttcgttctgatgtctgaatgtggtgagaacttcataaaatatttccagaacaataacaaagatatcatcgaaatggaaatgaaggatacttttagacgttttacgaacgatgttattgctacaacagcttttggcgttaaaacagattctttaaaggacagagataatgaattcttcactatgggaacgagagcagtagattttggattctggcgaagtcttaagttttttggctactttctgataccgaaaattttagcgtttttcaaagtttcaatatttggcaaagaattaagtgacttctttatagaactgattgataagacagttcgaactagagaagagagaggaattgttcgtcctgacatgatacacttactaatggaggctaaaaaaggagttcaacaaaaagatgagaaagttatagatactggatttgcagtagtagaagaagcggatttaggaaatgctaaaggtgccatagaaatcaccaacgtcgatatagctgcgcacgctatggtcttctttttcgctggttttgatgccgtatcttctttgatgtgctttacaacctacgaattagcagtaaaccctgatatccaaaatagattgagagaagaagtcgaagatacgctgagagaatgtaatggcaagctaacatatgaaggtttattgaaaatgaaatacttggatatggttgtttcagaaaccttacgaaaatggccaattggtgtaatggccgacagaatatgtaccaaaccttacaccatcccagctgcaacacccgaggaaaagccgcttgttcttgaaaagaacacagttcttctctttcccgtatgggcgatacatagagatccagcattctacgaaaacccagagaggttcgacccagaaagattcaacgacgaaaacaagtcaaaaatcaacccttacacgtatcttcccttcggcattggtcctaggaactgtataggatctcgatttgctctattggaagcaaaagtggtgttgttttatctcttgtccaattttatagtcgagccttccgcaagacttacagtaccactgaaaatttctaggaagcagatcaatgtgacagctgagggtggtttctggtttaacttgaagaagttgaagaattaaaacgtacctaccgactaccgaggtgtatatacctattattgttacatgatataaactgagttgcgtgttttaacaattaccaactcatctttgtgcggattactgcgtgtgaacaacaaaaacttcatttactaaaatttttacccgacatcactgcttttgaaataatcgaaggtactgatttctttttggctaggtactagttgttttaaatgcatatatttagtagttctcggacatgtatatgtacctatatgtataatactaattattattaataataagtctactaggtacgcttaatatatttttactttatatgtgctatatgtgtgctaagaatagctattgttgttattacgatgtttgaagttatacttctttaggcgcgattgagattgagggtgaatttatattgatctgcgcgcatgcgcacaccgacagtatggtattagtcgttatacgggctctgattgggtgttgaaatgatctgtcaataataaataattgttcaatatgaaggtaaacaaatgtataatatattagttttattgttgtgaggacagaaacaaaaaagtttataattgtagtgacatttaaatagtttttaaaagcaacaggtacgtaataattgtaaatgtatcataggtacctacctatttgaacctaccaaagtacatagtatgtaatacttttatttacataatttgattaccatcaaaatttctatcaatgttcacctaatatattgttttcttactatatgtttttttgtattttttcaattctaaatcatttcaattcaaaatcaaaataatttaatttaattcaaaaatttcaaaagcttaatccgtttagttagtcgatcttcgcacataatgacacattgcctccgtggcgaagcatttaaggcgaatgaaccccaatataccaaccgcgctgatagctggttcgaatcccaataaaaacttttattttttttattttttttatacattttatgattgtaagtatatttattatataattttattttcagaaaatacgtatttagttaaaaaattttccgacaattaatgttcagaaatcatttgtggcatttttaatgtgtttgtgtgtgttttattcttttattattttaatttttggcactgttttaataaaaatgtttgagaagtagtaagtataaattagtttaatatttaaataaaatataaataaaaagtatattaatttcgtttaaatcatataatagaagtataacttcttacgtgcgtacaaagtacacacacattctttttttttagttcaatgctgaacatacgtct

SEQ ID NO: 531 - DNA, 2815 bp, Diabrotica virgifera
aatgacataaacttagcagaatatttcgttcccattttactcacaaataaattacaaacaatgacgtataatacctagactcacccaatgctgtcctaatttgattacttccggtaagtactatagttctgacgaatagaaacttatttgtttattttcacgagattacttactgtttaactttttatttttgaagttatacttctttaggcgcgattgatattgagggtgaatttatattgatctgcgcgcatgcgcacaccgacagtatggtattagtcgttatacgggctctgattgggtgttgaaatgatctgtcaataataaataattgttcaatatgaaggtaaacaaatgtataatatattagttttattgttgtgaggacagaaacaaaaaagtttataattgtagtgacatttaaatagtttttaaaagcaacaggtacgtaataattgtaaatgtatcataggtacctacctatttgaacctaccaaagtacatagtatgtaatacttttatttacataatttgattaccatcaaaatttctatcaatgttcacctaatatattgttttcttactatatgtttttttgtattttttcaattctaaatcatttcaattcaaaatcaaaataatttaatttaattcaaaaatttcaaaagcttaatccgtttagttagtcgatcttcgcacataatgacacattgcctccgtggcgaagcatttaaggcgaatgaaccccaatataccaaccgcgctgatagctggttggaatcccaataaaaacttttattttttatttttatacattttatgactgtaagtatatttattatataattttattttcagaaaatacgtatttagttaaaaaaaatttccgacaattaatgttcagaaataatttgtggcattattaatgtgtttgtgtgtgttttattcttttattattttaatttttggcactgttttaataaaaatgtttgagaagtagtaagtataaattagtttaatatttaaataaaatataaataaaaagtatattaatttcgtttaaatcatataatagaagtataagttcttacgtgcgtacaaagtacacacacattcttttttttaatttatttattgccattctatatttatctttatactagtaatagtcggtatgatgttcaagctgtttattgttgagtccatcaatatcctcaatagtgaaaaaagattaaacacttcaataaaataactttataaaattcgtccactggataatagccatttcctaattattaccactgacagtacgtattttatcaataatactacacatcgacgtacgtttcactttatgttttgatttaacttgtttaaaaatgaatcatgacgtatgggcaaagataaaatgaaaaaaatcatcttcctagtctcagcatccgtatggattgcaaattgtagaagcctcggaggtgtaaccagagaaggttcccattgttttcattctggtgggatgtagaatagcattatgttgttttatatgccattagagtgaaaacttagtatttttgctagcagttgccgctagggcatctatgccatttcgttcgttgcaatccgggactgcacgctggggtttgttttggttggatcagggagagcagcatatgtgcctcctgatgagagactaataagtttcgaaaccggtagaggtgcttgcagcactctctgattggactggaatatggttcggctgtattttcgttttgcaacgaaattgaaaatggttattcatttttgatttacaatatattctgtacatagaatgtacattgttatgcaaaatatcccgaccacctcgtaatttccagaacacaattattataaaataaattcacctacttagtttccaagtttccagtttttatttaattaaaaattgttatctgttggtgtaaaataaactgtagtgcacctattaattaaattaaaaacaaaattagaaatcctaagatagattaataatttttagaacgctgtgtgattatcgggggccagatttttttatgaaaaaaaggtaaaaacaaatcagtagttagcatcaaattttaatgaatgcatacagatttaaacataattttgagtcgtctttaacttataagatgtcttagttgcaaaacttagtggttactttggcaaaacactcctgtaaatgattttaatttaacgttttagaactgtgaattcaaatgacaaaatgaattgttttcctagagttgtcgtccatctttgaaattttgagcgccctctgttggaatttaattttgcgaatggtcaacgtgttcgacctaaccttacacatttttcttcccaacgtgttcccatgcacaagtttattgcacaagtatactggaacgggtgttgggtaatgctagcacaagtacgttaactgtacaagtggcaagagacttgtgaacattttgtaatttttacttgttaattttttacgcaagtgtaattgagagtgtgtgtgtgaaagacttgtacaaagtttaatacagttgagttttgaccattcgtgtagacatacgatactggatgcttcaactactgatgttcaagtttaaaatggcgcattgtgcatgcatacttgtacatgtgttgtcgacacatacagggtgttagcaaataagtatgaaaaactttaaagggcaattctacatgaaaaaataatgccggtttgctcgacaaacatatgtccgcaaatgattcgcttccgagatacggggtgttgaaatttttcatttaaaactgc

SEQ ID NO: 532 - DNA, 4883 bp, Diabrotica virgifera
  SmartBlast Evalue=1E-171; Info=Cytochrome P450 9Z4 n=1 Tax= Tribolium castaneum RepID=D6WWU4_TRICA
cagtgcatccttgaacgttgttggactgttatgtgattggtcacactattaattagtatcaaaaataaacttgtttataaaaatattattgatatgttaaccagtgttatgtggattgaatattaaataacaaggtattttttatgtaattggtatatcaagtaagacgtaggaatcaaaaatgttgcaattagtactagtcttggccgctttggctgtattgttctattattttgccgtcaaacccatgagttactggaaggaaaggggaataaaacagacgaaacctgtatggttgcttggcgatagttggggtactgttataaagaagcacagtttagtggattttgtccaatatatctacgaccaagttccgggtgtaagatattttggatgctaccagatggtaacacctactcttgtcatacgagacccagatcttatcaaaaatattgccgttaaagactttgaccactttatggaccacagacaaatgatcccagcaaatgccgaccctctattcggaaagaatctatttgcattaaaaggtcaagtatggcgtgacacgagaccgatccttagtccaaccttcaccagcagcaaaatgcgtgccatgttcgttctgatgtctgaatgtggtgagaacttcataaaatatttccagaacaataacaaagatatcatcgaaatggaaatgaaggatacttttagacgttttacgaacgatgttattgctacaacagcttttggcgttaaaacagattctttaaaggacagagataatgaattcttcactatgggaacgagagcagtagattttggattctggcgaagtcttaagttttttggctactttctgataccgaaaattttagcgtttttcaaagtttcaatatttggcaaagaattaagtgacttctttatagaactgattgataagacagttcgaactagagaagagagaggaattgttcgtcctgacatgatacacttactaatggaggctaaaaaaggagttcaacaaaaagatgagaaagttatagatactggatttgcagtagtagaagaagcggatttaggaaatgctaaaggtgccatagaaatcaccaacgtcgatatagctgcgcacgctatggtcttctttttcgctggttttgatgccgtatcttctttgatgtgctttacaacctacgaattagcagtaaaccctgatatccaaaatagattgagagaagaagtcgaagatacgctgagagaatgtaatggcaagctaacatatgaaggtttattgaaaatgaaatacttggatatggttgtttcagaaaccttacgaaaatggccaattggtgtaatggccgacagaatatgtaccaaaccttacaccatcccagctgcaacacccgaggaaaagccgcttgttcttgaaaagaacacagttcttctctttcccgtatgggcgatacatagagatccagcattctacgaaaacccagagaggttcgacccagaaagattcaacgacgaaaacaagtcaaaaatcaacccttacacgtatcttcccttcggcattggtcctaggaactgtataggatctcgatttgctctattggaagcaaaagtggtgttgttttatctcttgtccaattttatagtcgagccttccgcaagacttacagtaccactgaaaatttctaggaagcagatcaatgtgacagctgagggtggtttctggtttaacttgaagaagttgaagaattaaaacgtacctaccgactaccgaggtgtatatacctattattgttacatgatataaactgagttgcgtgttttaacaattaccaactcatctttgtgcggattactgcgtgtgaacaacaaaaacttcatttactaaaatttttacccgacatcactgcttttgaaataatcgaaggtactgatttctttttggctaggtactagttgttttaaatgcatatatttagtagttctcggacatgtatatgtacctatatgtataatactaattattattaataataagtctactaggtacgcttaatatatttttactttatatgtgctatatgtgtgctaagaatagctattgttgttattacgatgtttgaagttatacttctttaggcgcgattgagattgagggtgaatttatattgatctgcgcgcatgcgcacaccgacagtatggtattagtcgttatacgggctctgattgggtgttgaaatgatctgtcaataataaataattgttcaatatgaaggtaaacaaatgtataatatattagttttattgttgtgaggacagaaacaaaaaagtttataattgtagtgacatttaaatagtttttaaaagcaacaggtacgtaataattgtaaatgtatcataggtacctacctatttgaacctaccaaagtacatagtatgtaatacttttatttacataatttgattaccatcaaaatttctatcaatgttcacctaatatattgttttcttactatatgtttttttgtattttttcaattctaaatcatttcaattcaaaatcaaaataatttaatttaattcaaaaatttcaaaagcttaatccgtttagttagtcgatcttcgcacataatgacacattgcctccgtggcgaagcatttaaggcgaatgaaccccaatataccaaccgcgctgatagctggttggaatcccaataaaaacttttattttttatttttatacattttatgactgtaagtatatttattatataattttattttcagaaaatacgtatttagttaaaaaaaatttccgacaattaatgttcagaaataatttgtggcattattaatgtgtttgtgtgtgttttattcttttattattttaatttttggcactgttttaataaaaatgtttgagaagtagtaagtataaattagtttaatatttaaataaaatataaataaaaagtatattaatttcgtttaaatcatataatagaagtataagttcttacgtgcgtacaaagtacacacacattcttttttttaatttatttattgccattctatatttatctttatactagtaatagtcggtatgatgttcaagctgtttattgttgagtccatcaatatcctcaatagtgaaaaaagattaaacacttcaataaaataactttataaaattcgtccactggataatagccatttcctaattattaccactgacagtacgtattttatcaataatactacacatcgacgtacgtttcactttatgttttgatttaacttgtttaaaaatgaatcatgacgtatgggcaaagataaaatgaaaaaaatcatcttcctagtctcagcatccgtatggattgcaaattgtagaagcctcggaggtgtaaccagagaaggttcccattgttttcattctggtgggatgtagaatagcattatgttgttttatatgccattagagtgaaaacttagtatttttgctagcagttgccgctagggcatctatgccatttcgttcgttgcaatccgggactgcacgctggggtttgttttggttggatcagggagagcagcatatgtgcctcctgatgagagactaataagtttcgaaaccggtagaggtgcttgcagcactctctgattggactggaatatggttcggctgtattttcgttttgcaacgaaattgaaaatggttattcatttttgatttacaatatattctgtacatagaatgtacattgttatgcaaaatatcccgaccacctcgtaatttccagaacacaattattataaaataaattcacctacttagtttccaagtttccagtttttatttaattaaaaattgttatctgttggtgtaaaataaactgtagtgcacctattaattaaattaaaaacaaaattagaaatcctaagatagattaataatttttagaacgctgtgtgattatcgggggccagatttttttatgaaaaaaaggtaaaaacaaatcagtagttagcatcaaattttaatgaatgcatacagatttaaacataattttgagtcgtctttaacttataagatgtcttagttgcaaaacttagtggttactttggcaaaacactcctgtaaatgattttaatttaacgttttagaactgtgaattcaaatgacaaaatgaattgttttcctagagttgtcgtccatctttgaaattttgagcgccctctgttggaatttaattttgcgaatattttccatttttttagagttatgacacttacgaagtcggggtgcgacgtattgaaattatttaaaaaaaataaaaagtcacgtctattttatatatgttatgtctagataagaatttaatatgctgtatacacttttttgataattctactctttatttttaatttattgtttcaaggctgctcgcttttggtggctaattgtattttttagtttttagggatgtactcaatttatttgttttatgtatgtaactatagcacaaatgaacaagagacaaatacaaaccagctaaaaaacgattttctatcgataactttgaattttaccattatttaaatcaaagtaagaattttaagcaataattctaaggggatccccgcacaaaggtaatattagctgaaatagcttgtataataaagattttcttttataaccaataaaaataatgatacattgttttcgagacatctaggatattggttgtaataatttcgacctcacttttgatctgcaaatgtgacagatattaccaaatgcgatgggacaacatccagaattgagcagaccacagccgcttttagaaggatgtccaaggtatgtaaaggtcgcgtct

SEQ ID NO: 533 - DNA, 2778 bp, Diabrotica virgifera
aatgacataaacttagcagaatatttcgttcccattttactcacaaataaattacaaacaatgacgtataatacctagactcacccaatgctgtcctaatttgattacttccggtaagtactatagttctgacgaatagaaacttatttgtttattttcacgagattacttactgtttaactttttatttttgaagttatacttctttaggcgcgattgatattgagggtgaatttatattgatctgcgcgcatgcgcacaccgacagtatggtattagtcgttatacgggctctgattgggtgttgaaatgatctgtcaataataaataattgttcaatatgaaggtaaacaaatgtataatatattagttttattgttgtgaggacagaaacaaaaaagtttataattgtagtgacatttaaatagtttttaaaagcaacaggtacgtaataattgtaaatgtatcataggtacctacctatttgaacctaccaaagtacatagtatgtaatacttttatttacataatttgattaccatcaaaatttctatcaatgttcacctaatatattgttttcttactatatgtttttttgtattttttcaattctaaatcatttcaattcaaaatcaaaataatttaatttaattcaaaaatttcaaaagcttaatccgtttagttagtcgatcttcgcacataatgacacattgcctccgtggcgaagcatttaaggcgaatgaaccccaatataccaaccgcgctgatagctggttggaatcccaataaaaacttttattttttatttttatacattttatgactgtaagtatatttattatataattttattttcagaaaatacgtatttagttaaaaaaaatttccgacaattaatgttcagaaataatttgtggcattattaatgtgtttgtgtgtgttttattcttttattattttaatttttggcactgttttaataaaaatgtttgagaagtagtaagtataaattagtttaatatttaaataaaatataaataaaaagtatattaatttcgtttaaatcatataatagaagtataagttcttacgtgcgtacaaagtacacacacattcttttttttaatttatttattgccattctatatttatctttatactagtaatagtcggtatgatgttcaagctgtttattgttgagtccatcaatatcctcaatagtgaaaaaagattaaacacttcaataaaataactttataaaattcgtccactggataatagccatttcctaattattaccactgacagtacgtattttatcaataatactacacatcgacgtacgtttcactttatgttttgatttaacttgtttaaaaatgaatcatgacgtatgggcaaagataaaatgaaaaaaatcatcttcctagtctcagcatccgtatggattgcaaattgtagaagcctcggaggtgtaaccagagaaggttcccattgttttcattctggtgggatgtagaatagcattatgttgttttatatgccattagagtgaaaacttagtatttttgctagcagttgccgctagggcatctatgccatttcgttcgttgcaatccgggactgcacgctggggtttgttttggttggatcagggagagcagcatatgtgcctcctgatgagagactaataagtttcgaaaccggtagaggtgcttgcagcactctctgattggactggaatatggttcggctgtattttcgttttgcaacgaaattgaaaatggttattcatttttgatttacaatatattctgtacatagaatgttccagaacacaattattataaaataaattcacctacttagtttccaagtttccagtttttatttaattaaaaattgttatctgttggtgtaaaataaactgtagtgcacctattaattaaattaaaaacaaaattagaaatcctaagatagattaataatttttagaacgctgtgtgattatcgggggccagatttttttatgaaaaaaaggtaaaaacaaatcagtagttagcatcaaattttaatgaatgcatacagatttaaacataattttgagtcgtctttaacttataagatgtcttagttgcaaaacttagtggttactttggcaaaacactcctgtaaatgattttaatttaacgttttagaactgtgaattcaaatgacaaaatgaattgttttcctagagttgtcgtccatctttgaaattttgagcgccctctgttggaatttaattttgcgaatggtcaacgtgttcgacctaaccttacacatttttcttcccaacgtgttcccatgcacaagtttattgcacaagtatactggaacgggtgttgggtaatgctagcacaagtacgttaactgtacaagtggcaagagacttgtgaacattttgtaatttttacttgttaattttttacgcaagtgtaattgagagtgtgtgtgtgaaagacttgtacaaagtttaatacagttgagttttgaccattcgtgtagacatacgatactggatgcttcaactactgatgttcaagtttaaaatggcgcattgtgcatgcatacttgtacatgtgttgtcgacacatacagggtgttagcaaataagtatgaaaaactttaaagggcaattctacatgaaaaaataatgccggtttgctcgacaaacatatgtccgcaaatgattcgcttccgagatacggggtgttgaaatttttcatttaaaactgc

SEQ ID NO: 534 - DNA, 2948 bp, Diabrotica virgifera
  SmartBlast Evalue=1E-161; Info="Ornithine aminotransferase, putative n=1 Tax=Pediculus humanus corporis RepID=E0VYE0_PEDHC"
aatgacataaacttagcagaatatttcgttcccattttactcacaaataaattacaaacaatgacgtataatacctagactcacccaatgctgtcctaatttgattacttccggtaagtactatagttctgacgaatagaaacttatttgtttattttcacgagattacttactgtttaactttttatttttgaagttatacttctttaggcgcgattgatattgagggtgaatttatattgatctgcgcgcatgcgcacaccgacagtatggtattagtcgttatacgggctctgattgggtgttgaaatgatctgtcaataataaataattgttcaatatgaaggtaaacaaatgtataatatattagttttattgttgtgaggacagaaacaaaaaagtttataattgtagtgacatttaaatagtttttaaaagcaacaggtacgtaataattgtaaatgtatcataggtacctacctatttgaacctaccaaagtacatagtatgtaatacttttatttacataatttgattaccatcaaaatttctatcaatgttcacctaatatattgttttcttactatatgtttttttgtattttttcaattctaaatcatttcaattcaaaatcaaaataatttaatttaattcaaaaatttcaaaagcttaatccgtttagttagtcgatcttcgcacataatgacacattgcctccgtggcgaagcatttaaggcgaatgaaccccaatataccaaccgcgctgatagctggttggaatcccaataaaaacttttattttttatttttatacattttatgactgtaagtatatttattatataattttattttcagaaaatacgtatttagttaaaaaaaatttccgacaattaatgttcagaaataatttgtggcattattaatgtgtttgtgtgtgttttattcttttattattttaatttttggcactgttttaataaaaatgtttgagaagtagtaagtataaattagtttaatatttaaataaaatataaataaaaagtatattaatttcgtttaaatcatataatagaagtataagttcttacgtgcgtacaaagtacacacacattcttttttttaatttatttattgccattctatatttatctttatactagtaatagtcggtatgatgttcaagctgtttattgttgagtccatcaatatcctcaatagtgaaaaaagattaaacacttcaataaaataactttataaaattcgtccactggataatagccatttcctaattattaccactgacagtacgtattttatcaataatactacacatcgacgtacgtttcactttatgttttgatttaacttgtttaaaaatgaatcatgacgtatgggcaaagataaaatggaaaaactatatcaagcataggcgaatgctgggtctattatacgccattctggaaattattgaaaaaaatcttaaactgactcaatttgaagtacaatacaggaagaaaatatccatatgagttaggtatttgaaactcttgtttattcggtttttacttcaatgttgttaacggttcttacgataatatcaatggcttctttcatttcttcttcggtgattattagaggtggtgaaaatcgtatgatatcttcgtgggtatgtttcgcaattaaaccgttttcttttaacttcaaacagacgtcccaggcatgtatacaatttctattaatatcgatagcgttcaataatcctttgcctctgacatccatcacaataggatttccattgttcagctttttccttaattccaccctgaaaatttcccctaatttaaaagcgttttcagctaaattttcatcttcgagaacttctagggctgttatagctacttttgacgctaagggattaccaccgaaggtagaaccatgggttcctggttcaatgactagcataatatcatcattagctaaacaggccgacactggataaaccccacctcccagcgcctttccaaggaccagaatatcgggcttaacattttcgtaatctacagccagtctttttccagttcttcctaaacctgtttggatttcatcggcaatccaaaggacgttgtatttggtgcacaactctctaacgcctttgaggtatccttcatctggaactttgataccagcttcaccttgaatgggttccaccatgtaagcacagactaagggatcttggagggatttctctaaagctttcaaatcgttgtaaggtacacagctgaatcccggtacaaatggtccatagtcctcaaagcataaaggatctgtcgatgaggaacatgcagctaatgatcgcccccaaaaattatccgcagcaaaaataatctttgcttgattcttggggatcttctttttcctgtagccccatttcctagctagtttacaagccgtatctcctgcctcaacacctgtattcataggcatcagtttgtcgtatccaaacagcttggtgattgcttcagcatattgtcccaactggtctgaaaagaaggctctggaggtgtggtgcaaaacagcactttgttcgtgcagcgcctttaatattttgggatgacaatgtccaaaattattggctgagtagccgcttaagaagtcgaaatattttttaccttctacgtcccaaacaaacacaccttgtcccttggtcaaagctactggtagtgggtgatagttatgagccgcatattttgcttccttgtcaaaaacttcctgtgaactgagtgaccttttttcgagtagttttatacaccgttcgagattttttgatagtctcgtagctcttctagacgagggtaacattgtttatcaaatataatgaaccaagctattacacaatttgcagccaactaagaagtcttgaagtaggtatttaccgtacgaatacc

SEQ ID NO: 535 - DNA, 2749 bp, Diabrotica virgifera
aatgacataaacttagcagaatatttcgttcccattttactcacaaataaattacaaacaatgacgtataatacctagactcacccaatgctgtcctaatttgattacttccggtaagtactatagttctgacgaatagaaacttatttgtttattttcacgagattacttactgtttaactttttatttttgaagttatacttctttaggcgcgattgatattgagggtgaatttatattgatctgcgcgcatgcgcacaccgacagtatggtattagtcgttatacgggctctgattgggtgttgaaatgatctgtcaataataaataattgttcaatatgaaggtaaacaaatgtataatatattagttttattgttgtgaggacagaaacaaaaaagtttataattgtagtgacatttaaatagtttttaaaagcaacaggtacgtaataattgtaaatgtatcataggtacctacctatttgaacctaccaaagtacatagtatgtaatacttttatttacataatttgattaccatcaaaatttctatcaatgttcacctaatatattgttttcttactatatgtttttttgtattttttcaattctaaatcatttcaattcaaaatcaaaataatttaatttaattcaaaaatttcaaaagcttaatccgtttagttagtcgatcttcgcacataatgacacattgcctccgtggcgaagcatttaaggcgaatgaaccccaatataccaaccgcgctgatagctggttggaatcccaataaaaacttttattttttatttttatacattttatgactgtaagtatatttattatataattttattttcagaaaatacgtatttagttaaaaaaaatttccgacaattaatgttcagaaataatttgtggcattattaatgtgtttgtgtgtgttttattcttttattattttaatttttggcactgttttaataaaaatgtttgagaagtagtaagtataaattagtttaatatttaaataaaatataaataaaaagtatattaatttcgtttaaatcatataatagaagtataagttcttacgtgcgtacaaagtacacacacattcttttttttaatttatttattgccattctatatttatctttatactagtaatagtcggtatgatgttcaagctgtttattgttgagtccatcaatatcctcaatagtgaaaaaagattaaacacttcaataaaataactttataaaattcgtccactggataatagccatttcctaattattaccactgacagtacgtattttatcaataatactacacatcgacgtacgtttcactttatgttttgatttaacttgtttaaaaatgaatcatgacgtatgggcaaagataaaatgaaaaaaatcatcttcctagtctcagcatccgtatggattgcaaattgtagaagcctcggaggtgtaaccagagaaggttcccattgttttcattctggtgggatgtagaatagcattatgttgttttatatgccattagagtgaaaacttagtatttttgctagcagttgccgctagggcatctatgccatttcgttcgttgcaatccgggactgcacgctggggtttgttttggttggatcagggagagcagcatatgtgcctcctgatgagagactaataagtttcgaaaccggtagaggtgcttgcagcactctctgattggactggaatatggttcggctgtattttcgttttgcaacgaaattgaaaatggttattcattttttatttactttttatttacttgtagaccccatatatcatactcttcaattagttttggtgctatatagttcaaatcgtcttgagccactgacttgatcgtctgcaaagttgagcgtatttaacatagtgttggtgagtggtacctccattctacatttttgtttccatatttttgaagcactttccacgtatattttatataaagtgggggacagacaacacccttgctttaatccttttggcaggtaaaagggggagaagtgtactttttgatgttatataatctatattatgttatataattatataatcctttttatgttataaatcttgttgttatttgtgtccctgtttttatttttgttattggttgattgtatagtactttgacggcttttattaattctattttaatattcgtgctttccattgattgccacagcttcttccgtggaacactgtcgtaggcttttcgtagttcgacaaacaacctaatatttttatgcgaaccggttaaaccttctaagacgtcgccgcaaaggcatttatcccatgtcaataatattttttttaaatgttgaatatttttttgtttacctaaggattttaactatgttgtttaattgatgggattttgtcgaaagtactagtaagttcttttaacgttattatgtaaatatttttattctggataattcgatttacctgtattatgtaaataacttttagcccatagaaaaagcggtttgtttcatgaataatcaaaaacattttattttggtatttaaggcaacgattgtgaatgatttttttagtgtgtttacgattcttgaaagctatcacataaattgttacaaataaactacatgtgagtccttagttacttattttataagtattgtaaatgttttaatacatataaggtgttgtaaaataaagggtttattaagt

SEQ ID NO: 536 - DNA, 2760 bp, Diabrotica virgifera
  SmartBlast Evalue=1E-171; Info=Cytochrome P450 9Z4 n=1 Tax= Tribolium castaneum RepID=D6WWU4_TRICA
cagtgcatccttgaacgttgttggactgttatgtgattggtcacactattaattagtatcaaaaataaacttgtttataaaaatattattgatatgttaaccagtgttatgtggattgaatattaaataacaaggtattttttatgtaattggtatatcaagtaagacgtaggaatcaaaaatgttgcaattagtactagtcttggccgctttggctgtattgttctattattttgccgtcaaacccatgagttactggaaggaaaggggaataaaacagacgaaacctgtatggttgcttggcgatagttggggtactgttataaagaagcacagtttagtggattttgtccaatatatctacgaccaagttccgggtgtaagatattttggatgctaccagatggtaacacctactcttgtcatacgagacccagatcttatcaaaaatattgccgttaaagactttgaccactttatggaccacagacaaatgatcccagcaaatgccgaccctctattcggaaagaatctatttgcattaaaaggtcaagtatggcgtgacacgagaccgatccttagtccaaccttcaccagcagcaaaatgcgtgccatgttcgttctgatgtctgaatgtggtgagaacttcataaaatatttccagaacaataacaaagatatcatcgaaatggaaatgaaggatacttttagacgttttacgaacgatgttattgctacaacagcttttggcgttaaaacagattctttaaaggacagagataatgaattcttcactatgggaacgagagcagtagattttggattctggcgaagtcttaagttttttggctactttctgataccgaaaattttagcgtttttcaaagtttcaatatttggcaaagaattaagtgacttctttatagaactgattgataagacagttcgaactagagaagagagaggaattgttcgtcctgacatgatacacttactaatggaggctaaaaaaggagttcaacaaaaagatgagaaagttatagatactggatttgcagtagtagaagaagcggatttaggaaatgctaaaggtgccatagaaatcaccaacgtcgatatagctgcgcacgctatggtcttctttttcgctggttttgatgccgtatcttctttgatgtgctttacaacctacgaattagcagtaaaccctgatatccaaaatagattgagagaagaagtcgaagatacgctgagagaatgtaatggcaagctaacatatgaaggtttattgaaaatgaaatacttggatatggttgtttcagaaaccttacgaaaatggccaattggtgtaatggccgacagaatatgtaccaaaccttacaccatcccagctgcaacacccgaggaaaagccgcttgttcttgaaaagaacacagttcttctctttcccgtatgggcgatacatagagatccagcattctacgaaaacccagagaggttcgacccagaaagattcaacgacgaaaacaagtcaaaaatcaacccttacacgtatcttcccttcggcattggtcctaggaactgtataggatctcgatttgctctattggaagcaaaagtggtgttgttttatctcttgtccaattttatagtcgagccttccgcaagacttacagtaccactgaaaatttctaggaagcagatcaatgtgacagctgagggtggtttctggtttaacttgaagaagttgaagaattaaaacgtacctaccgactaccgaggtgtatatacctattattgttacatgatataaactgagttgcgtgttttaacaattaccaactcatctttgtgcggattactgcgtgtgaacaacaaaaacttcatttactaaaatttttacccgacatcactgcttttgaaataatcgaaggtactgatttctttttggctaggtactagttgttttaaatgcatatatttagtagttctcggacatgtatatgtacctatatgtataatactaattattattaataataagtctactaggtacgcttaatatatttttactttatatgtgctatatgtgtgctaagaatagctattgttgttattacgatgtttgaagttatacttctttaggcgcgattgagattgagggtgaatttatattgatctgcgcgcatgcgcacaccgacagtatggtattagtcgttatacgggctctgattgggtgttgaaatgatctgtcaataataaataattgttcaatatgaaggtaaacaaatgtataatatattagttttattgttgtgaggacagaaacaaaaaagtttataattgtagtgacatttaaatagtttttaaaagcaacaggtacgtaataattgtaaatgtatcataggtacctacctatttgaacctaccaaaatacatagtatgtaatacttttatttacataatttgattaccatcaaaatttctatcaatgttcacctaatatattgttttcttactctatgttttgttgtattttttcaattctaaatcatttcaattcaaaatcaaaataatttaatttaattcaaaaatgtcaaaagtttaatccgtttagttagtcgatcttcgcacataatgacacgttgtctccgtggcgaagcgtttaatgcgaatgaaccccaatacaacgccaataccaaccgcgctgataagttggttcgaatcccaagagaaacttttattttttttatacatttt

SEQ ID NO: 537 - DNA, 2722 bp, Diabrotica virgifera
  SmartBlast Evalue=1E-171; Info=Cytochrome P450 9Z4 n=1 Tax= Tribolium castaneum RepID=D6WWU4_TRICA
cagtgcatccttgaacgttgttggactgttatgtgattggtcacactattaattagtatcaaaaataaacttgtttataaaaatattattgatatgttaaccagtgttatgtggattgaatattaaataacaaggaatcaaaaatgttgcaattagtactagtcttggccgctttggctgtattgttctattattttgccgtcaaacccatgagttactggaaggaaaggggaataaaacagacgaaacctgtatggttgcttggcgatagttggggtactgttataaagaagcacagtttagtggattttgtccaatatatctacgaccaagttccgggtgtaagatattttggatgctaccagatggtaacacctactcttgtcatacgagacccagatcttatcaaaaatattgccgttaaagactttgaccactttatggaccacagacaaatgatcccagcaaatgccgaccctctattcggaaagaatctatttgcattaaaaggtcaagtatggcgtgacacgagaccgatccttagtccaaccttcaccagcagcaaaatgcgtgccatgttcgttctgatgtctgaatgtggtgagaacttcataaaatatttccagaacaataacaaagatatcatcgaaatggaaatgaaggatacttttagacgttttacgaacgatgttattgctacaacagcttttggcgttaaaacagattctttaaaggacagagataatgaattcttcactatgggaacgagagcagtagattttggattctggcgaagtcttaagttttttggctactttctgataccgaaaattttagcgtttttcaaagtttcaatatttggcaaagaattaagtgacttctttatagaactgattgataagacagttcgaactagagaagagagaggaattgttcgtcctgacatgatacacttactaatggaggctaaaaaaggagttcaacaaaaagatgagaaagttatagatactggatttgcagtagtagaagaagcggatttaggaaatgctaaaggtgccatagaaatcaccaacgtcgatatagctgcgcacgctatggtcttctttttcgctggttttgatgccgtatcttctttgatgtgctttacaacctacgaattagcagtaaaccctgatatccaaaatagattgagagaagaagtcgaagatacgctgagagaatgtaatggcaagctaacatatgaaggtttattgaaaatgaaatacttggatatggttgtttcagaaaccttacgaaaatggccaattggtgtaatggccgacagaatatgtaccaaaccttacaccatcccagctgcaacacccgaggaaaagccgcttgttcttgaaaagaacacagttcttctctttcccgtatgggcgatacatagagatccagcattctacgaaaacccagagaggttcgacccagaaagattcaacgacgaaaacaagtcaaaaatcaacccttacacgtatcttcccttcggcattggtcctaggaactgtataggatctcgatttgctctattggaagcaaaagtggtgttgttttatctcttgtccaattttatagtcgagccttccgcaagacttacagtaccactgaaaatttctaggaagcagatcaatgtgacagctgagggtggtttctggtttaacttgaagaagttgaagaattaaaacgtacctaccgactaccgaggtgtatatacctattattgttacatgatataaactgagttgcgtgttttaacaattaccaactcatctttgtgcggattactgcgtgtgaacaacaaaaacttcatttactaaaatttttacccgacatcactgcttttgaaataatcgaaggtactgatttctttttggctaggtactagttgttttaaatgcatatatttagtagttctcggacatgtatatgtacctatatgtataatactaattattattaataataagtctactaggtacgcttaatatatttttactttatatgtgctatatgtgtgctaagaatagctattgttgttattacgatgtttgaagttatacttctttaggcgcgattgagattgagggtgaatttatattgatctgcgcgcatgcgcacaccgacagtatggtattagtcgttatacgggctctgattgggtgttgaaatgatctgtcaataataaataattgttcaatatgaaggtaaacaaatgtataatatattagttttattgttgtgaggacagaaacaaaaaagtttataattgtagtgacatttaaatagtttttaaaagcaacaggtacgtaataattgtaaatgtatcataggtacctacctatttgaacctaccaaaatacatagtatgtaatacttttatttacataatttgattaccatcaaaatttctatcaatgttcacctaatatattgttttcttactctatgttttgttgtattttttcaattctaaatcatttcaattcaaaatcaaaataatttaatttaattcaaaaatgtcaaaagtttaatccgtttagttagtcgatcttcgcacataatgacacgttgtctccgtggcgaagcgtttaatgcgaatgaaccccaatacaacgccaataccaaccgcgctgataagttggttcgaatcccaagagaaacttttattttttttatacatttt

SEQ ID NO: 538 - DNA, 2152 bp, Diabrotica virgifera
gttatttcttttttatttttcaattatactctaaaaactaaattgtgtatattactagttaagtagacaaatataaaaatcaaaatatttcactcacactttatggtgcataatatggttcataataaggatagcatatttttaacaaaacaaacgcaaattcttcaaagttggttacagatccgtaactaatacaagataggttgtgcgaacagtctataagaaatctaaacctacctttcatatatcggtccctctttaaaaccttagaataaccttataacaaatatataatacgatataaacaagaaattttaatagatcacattacccaaaactagtatattcgcagctcacaatcataaaaagaaaaatgttattaaagtagaatactccgtttaaaatgtaagtacatacaaaaatatatttatttgaaaacgaaaccatacaatcaacttacttttataaacataaacggccttcttggaccaagtgtttcttggaaactgtgctataaatataatacatttaatgtttatatgtttaatgaaaactgtgacatctaacaaaacagttaaacatttgttctcgtttttctttgaaaacgatatacattaaaaccacttatgtctacataatactgtattcttgttacgtttttttataaccaggaaaaaaatttggtacgtcaactgtcaacgttattggcgaggaaccgcaaagtgggcgacgcctggtggcgaatttgaaaagcatcaactcaaggaaaacattgactttgccattaatttgtgtacatatttgcggtcagtttatgctgtaattaacaataatttcgacttaaaaaaactattgcagtgttcctcagtattcattcctattatactctacgtaatgacctaaattaaccaatgccaaatcacacattttgttaatttaacgtttgtattaaacgtagtattttttaatgtttaagcgactgcaaaattaaataaataaataaaatgtagtatatattctgtacatagaatgtacattgttatgcaaaatatcccgaccacctcgtaatttccagaacacaattattataaaataaattcacctacttagtttccaagtttccagtttttatttaattaaaaattgttatctgttggtgtaaaataaactgtagtgcacctattaattaaattaaaaacaaaattagaaatcctaagatagattaataatttttagaacgctgtgtgattatcgggggccagatttttttatgaaaaaaaggtaaaaacaaatcagtagttagcatcaaattttaatgaatgcatacagatttaaacataattttgagtcgtctttaacttataagatgtcttagttgcaaaacttagtggttactttggcaaaacactcctgtaaatgattttaatttaacgttttagaactgtgaattcaaatgacaaaatgaattgttttcctagagttgtcgtccatctttgaaattttgagcgccctctgttggaatttaattttgcgaatattttccatttttttagagttatgacacttacgaagtcggggtgcgacgtattgaaattatttaaaaaaaataaaaagtcacgtctattttatatatgttatgtctagataagaatttaatatgctgtatacacttttttgataattctactctttatttttaatttattgtttcaaggctgctcgcttttggtggctaattgtattttttagtttttagggatgtactcaatttatttgttttatgtatgtaactatagcacaaatgaacaagagacaaatacaaaccagctaaaaaacgattttctatcgataactttgaattttaccattatttaaatcaaagtaagaattttaagcaataattctaaggggatccccgcacaaaggtaatattagctgaaatagcttgtataataaagattttcttttataaccaataaaaataatgatacattgttttcgagacatctaggatattggttgtaataatttcgacctcacttttgatctgcaaatgtgacagatattaccaaatgcgatgggacaacatccagaattgagcagaccacagccgcttttagaaggatgtccaaggtatgtaaaggtcgcgtct

SEQ ID NO: 539 - DNA, 2115 bp, Diabrotica virgifera
gttatttcttttttatttttcaattatactctaaaaactaaattgtgtatattactagttaagtagacaaatataaaaatcaaaatatttcactcacactttatggtgcataatatggttcataataaggatagcatatttttaacaaaacaaacgcaaattcttcaaagttggttacagatccgtaactaatacaagataggttgtgcgaacagtctataagaaatctaaacctacctttcatatatcggtccctctttaaaaccttagaataaccttataacaaatatataatacgatataaacaagaaattttaatagatcacattacccaaaactagtatattcgcagctcacaatcataaaaagaaaaatgttattaaagtagaatactccgtttaaaatgtaagtacatacaaaaatatatttatttgaaaacgaaaccatacaatcaacttacttttataaacataaacggccttcttggaccaagtgtttcttggaaactgtgctataaatataatacatttaatgtttatatgtttaatgaaaactgtgacatctaacaaaacagttaaacatttgttctcgtttttctttgaaaacgatatacattaaaaccacttatgtctacataatactgtattcttgttacgtttttttataaccaggaaaaaaatttggtacgtcaactgtcaacgttattggcgaggaaccgcaaagtgggcgacgcctggtggcgaatttgaaaagcatcaactcaaggaaaacattgactttgccattaatttgtgtacatatttgcggtcagtttatgctgtaattaacaataatttcgacttaaaaaaactattgcagtgttcctcagtattcattcctattatactctacgtaatgacctaaattaaccaatgccaaatcacacattttgttaatttaacgtttgtattaaacgtagtattttttaatgtttaagcgactgcaaaattaaataaataaataaaatgtagtatatattctgtacatagaatgttccagaacacaattattataaaataaattcacctacttagtttccaagtttccagtttttatttaattaaaaattgttatctgttggtgtaaaataaactgtagtgcacctattaattaaattaaaaacaaaattagaaatcctaagatagattaataatttttagaacgctgtgtgattatcgggggccagatttttttatgaaaaaaaggtaaaaacaaatcagtagttagcatcaaattttaatgaatgcatacagatttaaacataattttgagtcgtctttaacttataagatgtcttagttgcaaaacttagtggttactttggcaaaacactcctgtaaatgattttaatttaacgttttagaactgtgaattcaaatgacaaaatgaattgttttcctagagttgtcgtccatctttgaaattttgagcgccctctgttggaatttaattttgcgaatattttccatttttttagagttatgacacttacgaagtcggggtgcgacgtattgaaattatttaaaaaaaataaaaagtcacgtctattttatatatgttatgtctagataagaatttaatatgctgtatacacttttttgataattctactctttatttttaatttattgtttcaaggctgctcgcttttggtggctaattgtattttttagtttttagggatgtactcaatttatttgttttatgtatgtaactatagcacaaatgaacaagagacaaatacaaaccagctaaaaaacgattttctatcgataactttgaattttaccattatttaaatcaaagtaagaattttaagcaataattctaaggggatccccgcacaaaggtaatattagctgaaatagcttgtataataaagattttcttttataaccaataaaaataatgatacattgttttcgagacatctaggatattggttgtaataatttcgacctcacttttgatctgcaaatgtgacagatattaccaaatgcgatgggacaacatccagaattgagcagaccacagccgcttttagaaggatgtccaaggtatgtaaaggtcgcgtct

SEQ ID NO: 540 - DNA, 2019 bp, Diabrotica virgifera
gttatttcttttttatttttcaattatactctaaaaactaaattgtgtatattactagttaagtagacaaatataaaaatcaaaatatttcactcacactttatggtgcataatatggttcataataaggatagcatatttttaacaaaacaaacgcaaattcttcaaagttggttacagatccgtaactaatacaagataggttgtgcgaacagtctataagaaatctaaacctacctttcatatatcggtccctctttaaaaccttagaataaccttataacaaatatataatacgatataaacaagaaattttaatagatcacattacccaaaactagtatattcgcagctcacaatcataaaaagaaaaatgttattaaagtagaatactccgtttaaaatgtaagtacatacaaaaatatatttatttgaaaacgaaaccatacaatcaacttacttttataaacataaacggccttcttggaccaagtgtttcttggaaactgtgctataaatataatacatttaatgtttatatgtttaatgaaaactgtgacatctaacaaaacagttaaacatttgttctcgtttttctttgaaaacgatatacattaaaaccacttatgtctacataatactgtattcttgttacgtttttttataaccaggaaaaaaatttggtacgtcaactgtcaacgttattggcgaggaaccgcaaagtgggcgacgcctggtggcgaatttgaaaagcatcaactcaaggaaaacattgactttgccattaatttgtgtacatatttgcggtcagtttatgctgtaattaacaataatttcgacttaaaaaaactattgcagtgttcctcagtattcattcctattatactctacgtaatgacctaaattaaccaatgccaaatcacacattttgttaatttaacgtttgtattaaacgtagtattttttaatgtttaagcgactgcaaaattaaataaataaataaaatgtagtatatattctgtacatagaatgtacattgttatgcaaaatatcccgaccacctcgtaatttccagaacacaattattataaaataaattcacctacttagtttccaagtttccagtttttatttaattaaaaattgttatctgttggtgtaaaataaactgtagtgcacctattaattaaattaaaaacaaaattagaaatcctaagatagattaataatttttagaacgctgtgtgattatcgggggccagatttttttatgaaaaaaaggtaaaaacaaatcagtagttagcatcaaattttaatgaatgcatacagatttaaacataattttgagtcgtctttaacttataagatgtcttagttgcaaaacttagtggttactttggcaaaacactcctgtaaatgattttaatttaacgttttagaactgtgaattcaaatgacaaaatgaattgttttcctagagttgtcgtccatctttgaaattttgagcgccctctgttggaatttaattttgcgaatggtcaacgtgttcgacctaaccttacacatttttcttcccaacgtgttcccatgcacaagtttattgcacaagtatactggaacgggtgttgggtaatgctagcacaagtacgttaactgtacaagtggcaagagacttgtgaacattttgtaatttttacttgttaattttttacgcaagtgtaattgagagtgtgtgtgtgaaagacttgtacaaagtttaatacagttgagttttgaccattcgtgtagacatacgatactggatgcttcaactactgatgttcaagtttaaaatggcgcattgtgcatgcatacttgtacatgtgttgtcgacacatacagggtgttagcaaataagtatgaaaaactttaaagggcaattctacatgaaaaaataatgccggtttgctcgacaaacatatgtccgcaaatgattcgcttccgagatacggggtgttgaaatttttcatttaaaactgc

SEQ ID NO: 541 - DNA, 1915 bp, Diabrotica virgifera
agaatagcattatgttgttttacatgccattagagtgaaaacttagtctttttgctagcagttgccgctagggcatctatgccatttcgttcgttgcaattcgggactgcacgctggggtttgttttggttggatcagagagagcagcatatgtgcctcctgatgagagactaataagtttcgaaaccggtagaggtgcttgcagcactctctgattggactggaatatggttcggctgtattttcgttttgcaacgaaattgaaaatggttattcatttttgatttacatgtttactctgattggagtacgaagggaaccattctcgttggaactttaccgcgctgagcagatgggacgtgaattataaattgtaaaattccctcatcttccttagtctcagcatccgtatggcttgcaaattgtagaagcctcggaggtgtaaccagagaaggttcccattgttttcattctggtgggatgtagaatagcattatgttgttttatatgccattagagtgaaaacttagtatttttgctagcagttgccgctagggcatctatgccatttcgttcgttgcaatccgggactgcacgctggggtttgttttggttggatcagggagagcagcatatgtgcctcctgatgagagactaataagtttcgaaaccggtagaggtgcttgcagcactctctgattggactggaatatggttcggctgtattttcgttttgcaacgaaattgaaaatggttattcatttttgatttacaatatattctgtacatagaatgtacattgttatgcaaaatatcccgaccacctcgtaatttccagaacacaattattataaaataaattcacctacttagtttccaagtttccagtttttatttaattaaaaattgttatctgttggtgtaaaataaactgtagtgcacctattaattaaattaaaaacaaaattagaaatcctaagatagattaataatttttagaacgctgtgtgattatcgggggccagatttttttatgaaaaaaaggtaaaaacaaatcagtagttagcatcaaattttaatgaatgcatacagatttaaacataattttgagtcgtctttaacttataagatgtcttagttgcaaaacttagtggttactttggcaaaacactcctgtaaatgattttaatttaacgttttagaactgtgaattcaaatgacaaaatgaattgttttcctagagttgtcgtccatctttgaaattttgagcgccctctgttggaatttaattttgcgaatattttccatttttttagagttatgacacttacgaagtcggggtgcgacgtattgaaattatttaaaaaaaataaaaagtcacgtctattttatatatgttatgtctagataagaatttaatatgctgtatacacttttttgataattctactctttatttttaatttattgtttcaaggctgctcgcttttggtggctaattgtattttttagtttttagggatgtactcaatttatttgttttatgtatgtaactatagcacaaatgaacaagagacaaatacaaaccagctaaaaaacgattttctatcgataactttgaattttaccattatttaaatcaaagtaagaattttaagcaataattctaaggggatccccgcacaaaggtaatattagctgaaatagcttgtataataaagattttcttttataaccaataaaaataatgatacattgttttcgagacatctaggatattggttgtaataatttcgacctcacttttgatctgcaaatgtgacagatattaccaaatgcgatgggacaacatccagaattgagcagaccacagccgcttttagaaggatgtccaaggtatgtaaaggtcgcgtct

SEQ ID NO: 542 - DNA, 1982 bp, Diabrotica virgifera
gttatttcttttttatttttcaattatactctaaaaactaaattgtgtatattactagttaagtagacaaatataaaaatcaaaatatttcactcacactttatggtgcataatatggttcataataaggatagcatatttttaacaaaacaaacgcaaattcttcaaagttggttacagatccgtaactaatacaagataggttgtgcgaacagtctataagaaatctaaacctacctttcatatatcggtccctctttaaaaccttagaataaccttataacaaatatataatacgatataaacaagaaattttaatagatcacattacccaaaactagtatattcgcagctcacaatcataaaaagaaaaatgttattaaagtagaatactccgtttaaaatgtaagtacatacaaaaatatatttatttgaaaacgaaaccatacaatcaacttacttttataaacataaacggccttcttggaccaagtgtttcttggaaactgtgctataaatataatacatttaatgtttatatgtttaatgaaaactgtgacatctaacaaaacagttaaacatttgttctcgtttttctttgaaaacgatatacattaaaaccacttatgtctacataatactgtattcttgttacgtttttttataaccaggaaaaaaatttggtacgtcaactgtcaacgttattggcgaggaaccgcaaagtgggcgacgcctggtggcgaatttgaaaagcatcaactcaaggaaaacattgactttgccattaatttgtgtacatatttgcggtcagtttatgctgtaattaacaataatttcgacttaaaaaaactattgcagtgttcctcagtattcattcctattatactctacgtaatgacctaaattaaccaatgccaaatcacacattttgttaatttaacgtttgtattaaacgtagtattttttaatgtttaagcgactgcaaaattaaataaataaataaaatgtagtatatattctgtacatagaatgttccagaacacaattattataaaataaattcacctacttagtttccaagtttccagtttttatttaattaaaaattgttatctgttggtgtaaaataaactgtagtgcacctattaattaaattaaaaacaaaattagaaatcctaagatagattaataatttttagaacgctgtgtgattatcgggggccagatttttttatgaaaaaaaggtaaaaacaaatcagtagttagcatcaaattttaatgaatgcatacagatttaaacataattttgagtcgtctttaacttataagatgtcttagttgcaaaacttagtggttactttggcaaaacactcctgtaaatgattttaatttaacgttttagaactgtgaattcaaatgacaaaatgaattgttttcctagagttgtcgtccatctttgaaattttgagcgccctctgttggaatttaattttgcgaatggtcaacgtgttcgacctaaccttacacatttttcttcccaacgtgttcccatgcacaagtttattgcacaagtatactggaacgggtgttgggtaatgctagcacaagtacgttaactgtacaagtggcaagagacttgtgaacattttgtaatttttacttgttaattttttacgcaagtgtaattgagagtgtgtgtgtgaaagacttgtacaaagtttaatacagttgagttttgaccattcgtgtagacatacgatactggatgcttcaactactgatgttcaagtttaaaatggcgcattgtgcatgcatacttgtacatgtgttgtcgacacatacagggtgttagcaaataagtatgaaaaactttaaagggcaattctacatgaaaaaataatgccggtttgctcgacaaacatatgtccgcaaatgattcgcttccgagatacggggtgttgaaatttttcatttaaaactgc

SEQ ID NO: 543 - DNA, 4845 bp, Diabrotica virgifera
  SmartBlast Evalue=1E-171; Info=Cytochrome P450 9Z4 n=1 Tax= Tribolium castaneum RepID=D6WWU4_TRICA
cagtgcatccttgaacgttgttggactgttatgtgattggtcacactattaattagtatcaaaaataaacttgtttataaaaatattattgatatgttaaccagtgttatgtggattgaatattaaataacaaggaatcaaaaatgttgcaattagtactagtcttggccgctttggctgtattgttctattattttgccgtcaaacccatgagttactggaaggaaaggggaataaaacagacgaaacctgtatggttgcttggcgatagttggggtactgttataaagaagcacagtttagtggattttgtccaatatatctacgaccaagttccgggtgtaagatattttggatgctaccagatggtaacacctactcttgtcatacgagacccagatcttatcaaaaatattgccgttaaagactttgaccactttatggaccacagacaaatgatcccagcaaatgccgaccctctattcggaaagaatctatttgcattaaaaggtcaagtatggcgtgacacgagaccgatccttagtccaaccttcaccagcagcaaaatgcgtgccatgttcgttctgatgtctgaatgtggtgagaacttcataaaatatttccagaacaataacaaagatatcatcgaaatggaaatgaaggatacttttagacgttttacgaacgatgttattgctacaacagcttttggcgttaaaacagattctttaaaggacagagataatgaattcttcactatgggaacgagagcagtagattttggattctggcgaagtcttaagttttttggctactttctgataccgaaaattttagcgtttttcaaagtttcaatatttggcaaagaattaagtgacttctttatagaactgattgataagacagttcgaactagagaagagagaggaattgttcgtcctgacatgatacacttactaatggaggctaaaaaaggagttcaacaaaaagatgagaaagttatagatactggatttgcagtagtagaagaagcggatttaggaaatgctaaaggtgccatagaaatcaccaacgtcgatatagctgcgcacgctatggtcttctttttcgctggttttgatgccgtatcttctttgatgtgctttacaacctacgaattagcagtaaaccctgatatccaaaatagattgagagaagaagtcgaagatacgctgagagaatgtaatggcaagctaacatatgaaggtttattgaaaatgaaatacttggatatggttgtttcagaaaccttacgaaaatggccaattggtgtaatggccgacagaatatgtaccaaaccttacaccatcccagctgcaacacccgaggaaaagccgcttgttcttgaaaagaacacagttcttctctttcccgtatgggcgatacatagagatccagcattctacgaaaacccagagaggttcgacccagaaagattcaacgacgaaaacaagtcaaaaatcaacccttacacgtatcttcccttcggcattggtcctaggaactgtataggatctcgatttgctctattggaagcaaaagtggtgttgttttatctcttgtccaattttatagtcgagccttccgcaagacttacagtaccactgaaaatttctaggaagcagatcaatgtgacagctgagggtggtttctggtttaacttgaagaagttgaagaattaaaacgtacctaccgactaccgaggtgtatatacctattattgttacatgatataaactgagttgcgtgttttaacaattaccaactcatctttgtgcggattactgcgtgtgaacaacaaaaacttcatttactaaaatttttacccgacatcactgcttttgaaataatcgaaggtactgatttctttttggctaggtactagttgttttaaatgcatatatttagtagttctcggacatgtatatgtacctatatgtataatactaattattattaataataagtctactaggtacgcttaatatatttttactttatatgtgctatatgtgtgctaagaatagctattgttgttattacgatgtttgaagttatacttctttaggcgcgattgagattgagggtgaatttatattgatctgcgcgcatgcgcacaccgacagtatggtattagtcgttatacgggctctgattgggtgttgaaatgatctgtcaataataaataattgttcaatatgaaggtaaacaaatgtataatatattagttttattgttgtgaggacagaaacaaaaaagtttataattgtagtgacatttaaatagtttttaaaagcaacaggtacgtaataattgtaaatgtatcataggtacctacctatttgaacctaccaaagtacatagtatgtaatacttttatttacataatttgattaccatcaaaatttctatcaatgttcacctaatatattgttttcttactatatgtttttttgtattttttcaattctaaatcatttcaattcaaaatcaaaataatttaatttaattcaaaaatttcaaaagcttaatccgtttagttagtcgatcttcgcacataatgacacattgcctccgtggcgaagcatttaaggcgaatgaaccccaatataccaaccgcgctgatagctggttggaatcccaataaaaacttttattttttatttttatacattttatgactgtaagtatatttattatataattttattttcagaaaatacgtatttagttaaaaaaaatttccgacaattaatgttcagaaataatttgtggcattattaatgtgtttgtgtgtgttttattcttttattattttaatttttggcactgttttaataaaaatgtttgagaagtagtaagtataaattagtttaatatttaaataaaatataaataaaaagtatattaatttcgtttaaatcatataatagaagtataagttcttacgtgcgtacaaagtacacacacattcttttttttaatttatttattgccattctatatttatctttatactagtaatagtcggtatgatgttcaagctgtttattgttgagtccatcaatatcctcaatagtgaaaaaagattaaacacttcaataaaataactttataaaattcgtccactggataatagccatttcctaattattaccactgacagtacgtattttatcaataatactacacatcgacgtacgtttcactttatgttttgatttaacttgtttaaaaatgaatcatgacgtatgggcaaagataaaatgaaaaaaatcatcttcctagtctcagcatccgtatggattgcaaattgtagaagcctcggaggtgtaaccagagaaggttcccattgttttcattctggtgggatgtagaatagcattatgttgttttatatgccattagagtgaaaacttagtatttttgctagcagttgccgctagggcatctatgccatttcgttcgttgcaatccgggactgcacgctggggtttgttttggttggatcagggagagcagcatatgtgcctcctgatgagagactaataagtttcgaaaccggtagaggtgcttgcagcactctctgattggactggaatatggttcggctgtattttcgttttgcaacgaaattgaaaatggttattcatttttgatttacaatatattctgtacatagaatgtacattgttatgcaaaatatcccgaccacctcgtaatttccagaacacaattattataaaataaattcacctacttagtttccaagtttccagtttttatttaattaaaaattgttatctgttggtgtaaaataaactgtagtgcacctattaattaaattaaaaacaaaattagaaatcctaagatagattaataatttttagaacgctgtgtgattatcgggggccagatttttttatgaaaaaaaggtaaaaacaaatcagtagttagcatcaaattttaatgaatgcatacagatttaaacataattttgagtcgtctttaacttataagatgtcttagttgcaaaacttagtggttactttggcaaaacactcctgtaaatgattttaatttaacgttttagaactgtgaattcaaatgacaaaatgaattgttttcctagagttgtcgtccatctttgaaattttgagcgccctctgttggaatttaattttgcgaatattttccatttttttagagttatgacacttacgaagtcggggtgcgacgtattgaaattatttaaaaaaaataaaaagtcacgtctattttatatatgttatgtctagataagaatttaatatgctgtatacacttttttgataattctactctttatttttaatttattgtttcaaggctgctcgcttttggtggctaattgtattttttagtttttagggatgtactcaatttatttgttttatgtatgtaactatagcacaaatgaacaagagacaaatacaaaccagctaaaaaacgattttctatcgataactttgaattttaccattatttaaatcaaagtaagaattttaagcaataattctaaggggatccccgcacaaaggtaatattagctgaaatagcttgtataataaagattttcttttataaccaataaaaataatgatacattgttttcgagacatctaggatattggttgtaataatttcgacctcacttttgatctgcaaatgtgacagatattaccaaatgcgatgggacaacatccagaattgagcagaccacagccgcttttagaaggatgtccaaggtatgtaaaggtcgcgtct

SEQ ID NO: 544 - DNA, 1878 bp, Diabrotica virgifera
agaatagcattatgttgttttacatgccattagagtgaaaacttagtctttttgctagcagttgccgctagggcatctatgccatttcgttcgttgcaattcgggactgcacgctggggtttgttttggttggatcagagagagcagcatatgtgcctcctgatgagagactaataagtttcgaaaccggtagaggtgcttgcagcactctctgattggactggaatatggttcggctgtattttcgttttgcaacgaaattgaaaatggttattcatttttgatttacatgtttactctgattggagtacgaagggaaccattctcgttggaactttaccgcgctgagcagatgggacgtgaattataaattgtaaaattccctcatcttccttagtctcagcatccgtatggcttgcaaattgtagaagcctcggaggtgtaaccagagaaggttcccattgttttcattctggtgggatgtagaatagcattatgttgttttatatgccattagagtgaaaacttagtatttttgctagcagttgccgctagggcatctatgccatttcgttcgttgcaatccgggactgcacgctggggtttgttttggttggatcagggagagcagcatatgtgcctcctgatgagagactaataagtttcgaaaccggtagaggtgcttgcagcactctctgattggactggaatatggttcggctgtattttcgttttgcaacgaaattgaaaatggttattcatttttgatttacaatatattctgtacatagaatgttccagaacacaattattataaaataaattcacctacttagtttccaagtttccagtttttatttaattaaaaattgttatctgttggtgtaaaataaactgtagtgcacctattaattaaattaaaaacaaaattagaaatcctaagatagattaataatttttagaacgctgtgtgattatcgggggccagatttttttatgaaaaaaaggtaaaaacaaatcagtagttagcatcaaattttaatgaatgcatacagatttaaacataattttgagtcgtctttaacttataagatgtcttagttgcaaaacttagtggttactttggcaaaacactcctgtaaatgattttaatttaacgttttagaactgtgaattcaaatgacaaaatgaattgttttcctagagttgtcgtccatctttgaaattttgagcgccctctgttggaatttaattttgcgaatattttccatttttttagagttatgacacttacgaagtcggggtgcgacgtattgaaattatttaaaaaaaataaaaagtcacgtctattttatatatgttatgtctagataagaatttaatatgctgtatacacttttttgataattctactctttatttttaatttattgtttcaaggctgctcgcttttggtggctaattgtattttttagtttttagggatgtactcaatttatttgttttatgtatgtaactatagcacaaatgaacaagagacaaatacaaaccagctaaaaaacgattttctatcgataactttgaattttaccattatttaaatcaaagtaagaattttaagcaataattctaaggggatccccgcacaaaggtaatattagctgaaatagcttgtataataaagattttcttttataaccaataaaaataatgatacattgttttcgagacatctaggatattggttgtaataatttcgacctcacttttgatctgcaaatgtgacagatattaccaaatgcgatgggacaacatccagaattgagcagaccacagccgcttttagaaggatgtccaaggtatgtaaaggtcgcgtct

SEQ ID NO: 545 - DNA, 1782 bp, Diabrotica virgifera
agaatagcattatgttgttttacatgccattagagtgaaaacttagtctttttgctagcagttgccgctagggcatctatgccatttcgttcgttgcaattcgggactgcacgctggggtttgttttggttggatcagagagagcagcatatgtgcctcctgatgagagactaataagtttcgaaaccggtagaggtgcttgcagcactctctgattggactggaatatggttcggctgtattttcgttttgcaacgaaattgaaaatggttattcatttttgatttacatgtttactctgattggagtacgaagggaaccattctcgttggaactttaccgcgctgagcagatgggacgtgaattataaattgtaaaattccctcatcttccttagtctcagcatccgtatggcttgcaaattgtagaagcctcggaggtgtaaccagagaaggttcccattgttttcattctggtgggatgtagaatagcattatgttgttttatatgccattagagtgaaaacttagtatttttgctagcagttgccgctagggcatctatgccatttcgttcgttgcaatccgggactgcacgctggggtttgttttggttggatcagggagagcagcatatgtgcctcctgatgagagactaataagtttcgaaaccggtagaggtgcttgcagcactctctgattggactggaatatggttcggctgtattttcgttttgcaacgaaattgaaaatggttattcatttttgatttacaatatattctgtacatagaatgtacattgttatgcaaaatatcccgaccacctcgtaatttccagaacacaattattataaaataaattcacctacttagtttccaagtttccagtttttatttaattaaaaattgttatctgttggtgtaaaataaactgtagtgcacctattaattaaattaaaaacaaaattagaaatcctaagatagattaataatttttagaacgctgtgtgattatcgggggccagatttttttatgaaaaaaaggtaaaaacaaatcagtagttagcatcaaattttaatgaatgcatacagatttaaacataattttgagtcgtctttaacttataagatgtcttagttgcaaaacttagtggttactttggcaaaacactcctgtaaatgattttaatttaacgttttagaactgtgaattcaaatgacaaaatgaattgttttcctagagttgtcgtccatctttgaaattttgagcgccctctgttggaatttaattttgcgaatggtcaacgtgttcgacctaaccttacacatttttcttcccaacgtgttcccatgcacaagtttattgcacaagtatactggaacgggtgttgggtaatgctagcacaagtacgttaactgtacaagtggcaagagacttgtgaacattttgtaatttttacttgttaattttttacgcaagtgtaattgagagtgtgtgtgtgaaagacttgtacaaagtttaatacagttgagttttgaccattcgtgtagacatacgatactggatgcttcaactactgatgttcaagtttaaaatggcgcattgtgcatgcatacttgtacatgtgttgtcgacacatacagggtgttagcaaataagtatgaaaaactttaaagggcaattctacatgaaaaaataatgccggtttgctcgacaaacatatgtccgcaaatgattcgcttccgagatacggggtgttgaaatttttcatttaaaactgc

SEQ ID NO: 546 - DNA, 1818 bp, Diabrotica virgifera
agcgccgcaagcacctccaccggtttcgaaacttattagtctctcatcaggaggcacatatgctgctcatagagactaataagtttcgaaaccggtagaggtgcttgcagcactctccgattggaccggaccatggctcggctgcaccttcgttttgcaacgaaattgaaaatggttattcatttttgatttacatttactctgtgtggagtatgaagggaaccagtctcgttggaactttaccgcgctgagcagatgtgacgtgaattgtaaattgtagaattccctcatcttccttagtctcagcatccgtatggcttgcaaattgtagaagcctcggaggtgtaaccagagaaggttcccattgttttcattctggtgggatgtagaatagcattatgttgttttatatgccattagagtgaaaacttagtatttttgctagcagttgccgctagggcatctatgccatttcgttcgttgcaatccgggactgcacgctggggtttgttttggttggatcagggagagcagcatatgtgcctcctgatgagagactaataagtttcgaaaccggtagaggtgcttgcagcactctctgattggactggaatatggttcggctgtattttcgttttgcaacgaaattgaaaatggttattcatttttgatttacaatatattctgtacatagaatgtacattgttatgcaaaatatcccgaccacctcgtaatttccagaacacaattattataaaataaattcacctacttagtttccaagtttccagtttttatttaattaaaaattgttatctgttggtgtaaaataaactgtagtgcacctattaattaaattaaaaacaaaattagaaatcctaagatagattaataatttttagaacgctgtgtgattatcgggggccagatttttttatgaaaaaaaggtaaaaacaaatcagtagttagcatcaaattttaatgaatgcatacagatttaaacataattttgagtcgtctttaacttataagatgtcttagttgcaaaacttagtggttactttggcaaaacactcctgtaaatgattttaatttaacgttttagaactgtgaattcaaatgacaaaatgaattgttttcctagagttgtcgtccatctttgaaattttgagcgccctctgttggaatttaattttgcgaatattttccatttttttagagttatgacacttacgaagtcggggtgcgacgtattgaaattatttaaaaaaaataaaaagtcacgtctattttatatatgttatgtctagataagaatttaatatgctgtatacacttttttgataattctactctttatttttaatttattgtttcaaggctgctcgcttttggtggctaattgtattttttagtttttagggatgtactcaatttatttgttttatgtatgtaactatagcacaaatgaacaagagacaaatacaaaccagctaaaaaacgattttctatcgataactttgaattttaccattatttaaatcaaagtaagaattttaagcaataattctaaggggatccccgcacaaaggtaatattagctgaaatagcttgtataataaagattttcttttataaccaataaaaataatgatacattgttttcgagacatctaggatattggttgtaataatttcgacctcacttttgatctgcaaatgtgacagatattaccaaatgcgatgggacaacatccagaattgagcagaccacagccgcttttagaaggatgtccaaggtatgtaaaggtcgcgtct

SEQ ID NO: 547 - DNA, 1745 bp, Diabrotica virgifera
agaatagcattatgttgttttacatgccattagagtgaaaacttagtctttttgctagcagttgccgctagggcatctatgccatttcgttcgttgcaattcgggactgcacgctggggtttgttttggttggatcagagagagcagcatatgtgcctcctgatgagagactaataagtttcgaaaccggtagaggtgcttgcagcactctctgattggactggaatatggttcggctgtattttcgttttgcaacgaaattgaaaatggttattcatttttgatttacatgtttactctgattggagtacgaagggaaccattctcgttggaactttaccgcgctgagcagatgggacgtgaattataaattgtaaaattccctcatcttccttagtctcagcatccgtatggcttgcaaattgtagaagcctcggaggtgtaaccagagaaggttcccattgttttcattctggtgggatgtagaatagcattatgttgttttatatgccattagagtgaaaacttagtatttttgctagcagttgccgctagggcatctatgccatttcgttcgttgcaatccgggactgcacgctggggtttgttttggttggatcagggagagcagcatatgtgcctcctgatgagagactaataagtttcgaaaccggtagaggtgcttgcagcactctctgattggactggaatatggttcggctgtattttcgttttgcaacgaaattgaaaatggttattcatttttgatttacaatatattctgtacatagaatgttccagaacacaattattataaaataaattcacctacttagtttccaagtttccagtttttatttaattaaaaattgttatctgttggtgtaaaataaactgtagtgcacctattaattaaattaaaaacaaaattagaaatcctaagatagattaataatttttagaacgctgtgtgattatcgggggccagatttttttatgaaaaaaaggtaaaaacaaatcagtagttagcatcaaattttaatgaatgcatacagatttaaacataattttgagtcgtctttaacttataagatgtcttagttgcaaaacttagtggttactttggcaaaacactcctgtaaatgattttaatttaacgttttagaactgtgaattcaaatgacaaaatgaattgttttcctagagttgtcgtccatctttgaaattttgagcgccctctgttggaatttaattttgcgaatggtcaacgtgttcgacctaaccttacacatttttcttcccaacgtgttcccatgcacaagtttattgcacaagtatactggaacgggtgttgggtaatgctagcacaagtacgttaactgtacaagtggcaagagacttgtgaacattttgtaatttttacttgttaattttttacgcaagtgtaattgagagtgtgtgtgtgaaagacttgtacaaagtttaatacagttgagttttgaccattcgtgtagacatacgatactggatgcttcaactactgatgttcaagtttaaaatggcgcattgtgcatgcatacttgtacatgtgttgtcgacacatacagggtgttagcaaataagtatgaaaaactttaaagggcaattctacatgaaaaaataatgccggtttgctcgacaaacatatgtccgcaaatgattcgcttccgagatacggggtgttgaaatttttcatttaaaactgc

SEQ ID NO: 548 - DNA, 1787 bp, Diabrotica virgifera
tatatattaaaaagagcctgtactgccattaagaaggacaaaaaaatacactttcttcaaataaactttttcatcccatgcctagattttgtgtcacattgaaactactaatttttttttatctctaacaagaaatcgaacaaataactaatatttaaacaaaatttactctgtgtggagtatgaagggaaccagtctcgttggaactttaccgcgctgagcagatgtgacgtgaattgtaaattgtagaattccctcatcttccttagtctcagcatccgtatggcttgcaaattgtagaagcctcggaggtgtaaccagagaaggttcccattgttttcattctggtgggatgtagaatagcattatgttgttttatatgccattagagtgaaaacttagtatttttgctagcagttgccgctagggcatctatgccatttcgttcgttgcaatccgggactgcacgctggggtttgttttggttggatcagggagagcagcatatgtgcctcctgatgagagactaataagtttcgaaaccggtagaggtgcttgcagcactctctgattggactggaatatggttcggctgtattttcgttttgcaacgaaattgaaaatggttattcatttttgatttacaatatattctgtacatagaatgtacattgttatgcaaaatatcccgaccacctcgtaatttccagaacacaattattataaaataaattcacctacttagtttccaagtttccagtttttatttaattaaaaattgttatctgttggtgtaaaataaactgtagtgcacctattaattaaattaaaaacaaaattagaaatcctaagatagattaataatttttagaacgctgtgtgattatcgggggccagatttttttatgaaaaaaaggtaaaaacaaatcagtagttagcatcaaattttaatgaatgcatacagatttaaacataattttgagtcgtctttaacttataagatgtcttagttgcaaaacttagtggttactttggcaaaacactcctgtaaatgattttaatttaacgttttagaactgtgaattcaaatgacaaaatgaattgttttcctagagttgtcgtccatctttgaaattttgagcgccctctgttggaatttaattttgcgaatattttccatttttttagagttatgacacttacgaagtcggggtgcgacgtattgaaattatttaaaaaaaataaaaagtcacgtctattttatatatgttatgtctagataagaatttaatatgctgtatacacttttttgataattctactctttatttttaatttattgtttcaaggctgctcgcttttggtggctaattgtattttttagtttttagggatgtactcaatttatttgttttatgtatgtaactatagcacaaatgaacaagagacaaatacaaaccagctaaaaaacgattttctatcgataactttgaattttaccattatttaaatcaaagtaagaattttaagcaataattctaaggggatccccgcacaaaggtaatattagctgaaatagcttgtataataaagattttcttttataaccaataaaaataatgatacattgttttcgagacatctaggatattggttgtaataatttcgacctcacttttgatctgcaaatgtgacagatattaccaaatgcgatgggacaacatccagaattgagcagaccacagccgcttttagaaggatgtccaaggtatgtaaaggtcgcgtct

SEQ ID NO: 549 - DNA, 1781 bp, Diabrotica virgifera
agcgccgcaagcacctccaccggtttcgaaacttattagtctctcatcaggaggcacatatgctgctcatagagactaataagtttcgaaaccggtagaggtgcttgcagcactctccgattggaccggaccatggctcggctgcaccttcgttttgcaacgaaattgaaaatggttattcatttttgatttacatttactctgtgtggagtatgaagggaaccagtctcgttggaactttaccgcgctgagcagatgtgacgtgaattgtaaattgtagaattccctcatcttccttagtctcagcatccgtatggcttgcaaattgtagaagcctcggaggtgtaaccagagaaggttcccattgttttcattctggtgggatgtagaatagcattatgttgttttatatgccattagagtgaaaacttagtatttttgctagcagttgccgctagggcatctatgccatttcgttcgttgcaatccgggactgcacgctggggtttgttttggttggatcagggagagcagcatatgtgcctcctgatgagagactaataagtttcgaaaccggtagaggtgcttgcagcactctctgattggactggaatatggttcggctgtattttcgttttgcaacgaaattgaaaatggttattcatttttgatttacaatatattctgtacatagaatgttccagaacacaattattataaaataaattcacctacttagtttccaagtttccagtttttatttaattaaaaattgttatctgttggtgtaaaataaactgtagtgcacctattaattaaattaaaaacaaaattagaaatcctaagatagattaataatttttagaacgctgtgtgattatcgggggccagatttttttatgaaaaaaaggtaaaaacaaatcagtagttagcatcaaattttaatgaatgcatacagatttaaacataattttgagtcgtctttaacttataagatgtcttagttgcaaaacttagtggttactttggcaaaacactcctgtaaatgattttaatttaacgttttagaactgtgaattcaaatgacaaaatgaattgttttcctagagttgtcgtccatctttgaaattttgagcgccctctgttggaatttaattttgcgaatattttccatttttttagagttatgacacttacgaagtcggggtgcgacgtattgaaattatttaaaaaaaataaaaagtcacgtctattttatatatgttatgtctagataagaatttaatatgctgtatacacttttttgataattctactctttatttttaatttattgtttcaaggctgctcgcttttggtggctaattgtattttttagtttttagggatgtactcaatttatttgttttatgtatgtaactatagcacaaatgaacaagagacaaatacaaaccagctaaaaaacgattttctatcgataactttgaattttaccattatttaaatcaaagtaagaattttaagcaataattctaaggggatccccgcacaaaggtaatattagctgaaatagcttgtataataaagattttcttttataaccaataaaaataatgatacattgttttcgagacatctaggatattggttgtaataatttcgacctcacttttgatctgcaaatgtgacagatattaccaaatgcgatgggacaacatccagaattgagcagaccacagccgcttttagaaggatgtccaaggtatgtaaaggtcgcgtct

SEQ ID NO: 550 - DNA, 1750 bp, Diabrotica virgifera
tatatattaaaaagagcctgtactgccattaagaaggacaaaaaaatacactttcttcaaataaactttttcatcccatgcctagattttgtgtcacattgaaactactaatttttttttatctctaacaagaaatcgaacaaataactaatatttaaacaaaatttactctgtgtggagtatgaagggaaccagtctcgttggaactttaccgcgctgagcagatgtgacgtgaattgtaaattgtagaattccctcatcttccttagtctcagcatccgtatggcttgcaaattgtagaagcctcggaggtgtaaccagagaaggttcccattgttttcattctggtgggatgtagaatagcattatgttgttttatatgccattagagtgaaaacttagtatttttgctagcagttgccgctagggcatctatgccatttcgttcgttgcaatccgggactgcacgctggggtttgttttggttggatcagggagagcagcatatgtgcctcctgatgagagactaataagtttcgaaaccggtagaggtgcttgcagcactctctgattggactggaatatggttcggctgtattttcgttttgcaacgaaattgaaaatggttattcatttttgatttacaatatattctgtacatagaatgttccagaacacaattattataaaataaattcacctacttagtttccaagtttccagtttttatttaattaaaaattgttatctgttggtgtaaaataaactgtagtgcacctattaattaaattaaaaacaaaattagaaatcctaagatagattaataatttttagaacgctgtgtgattatcgggggccagatttttttatgaaaaaaaggtaaaaacaaatcagtagttagcatcaaattttaatgaatgcatacagatttaaacataattttgagtcgtctttaacttataagatgtcttagttgcaaaacttagtggttactttggcaaaacactcctgtaaatgattttaatttaacgttttagaactgtgaattcaaatgacaaaatgaattgttttcctagagttgtcgtccatctttgaaattttgagcgccctctgttggaatttaattttgcgaatattttccatttttttagagttatgacacttacgaagtcggggtgcgacgtattgaaattatttaaaaaaaataaaaagtcacgtctattttatatatgttatgtctagataagaatttaatatgctgtatacacttttttgataattctactctttatttttaatttattgtttcaaggctgctcgcttttggtggctaattgtattttttagtttttagggatgtactcaatttatttgttttatgtatgtaactatagcacaaatgaacaagagacaaatacaaaccagctaaaaaacgattttctatcgataactttgaattttaccattatttaaatcaaagtaagaattttaagcaataattctaaggggatccccgcacaaaggtaatattagctgaaatagcttgtataataaagattttcttttataaccaataaaaataatgatacattgttttcgagacatctaggatattggttgtaataatttcgacctcacttttgatctgcaaatgtgacagatattaccaaatgcgatgggacaacatccagaattgagcagaccacagccgcttttagaaggatgtccaaggtatgtaaaggtcgcgtct

SEQ ID NO: 551 - DNA, 1685 bp, Diabrotica virgifera
agcgccgcaagcacctccaccggtttcgaaacttattagtctctcatcaggaggcacatatgctgctcatagagactaataagtttcgaaaccggtagaggtgcttgcagcactctccgattggaccggaccatggctcggctgcaccttcgttttgcaacgaaattgaaaatggttattcatttttgatttacatttactctgtgtggagtatgaagggaaccagtctcgttggaactttaccgcgctgagcagatgtgacgtgaattgtaaattgtagaattccctcatcttccttagtctcagcatccgtatggcttgcaaattgtagaagcctcggaggtgtaaccagagaaggttcccattgttttcattctggtgggatgtagaatagcattatgttgttttatatgccattagagtgaaaacttagtatttttgctagcagttgccgctagggcatctatgccatttcgttcgttgcaatccgggactgcacgctggggtttgttttggttggatcagggagagcagcatatgtgcctcctgatgagagactaataagtttcgaaaccggtagaggtgcttgcagcactctctgattggactggaatatggttcggctgtattttcgttttgcaacgaaattgaaaatggttattcatttttgatttacaatatattctgtacatagaatgtacattgttatgcaaaatatcccgaccacctcgtaatttccagaacacaattattataaaataaattcacctacttagtttccaagtttccagtttttatttaattaaaaattgttatctgttggtgtaaaataaactgtagtgcacctattaattaaattaaaaacaaaattagaaatcctaagatagattaataatttttagaacgctgtgtgattatcgggggccagatttttttatgaaaaaaaggtaaaaacaaatcagtagttagcatcaaattttaatgaatgcatacagatttaaacataattttgagtcgtctttaacttataagatgtcttagttgcaaaacttagtggttactttggcaaaacactcctgtaaatgattttaatttaacgttttagaactgtgaattcaaatgacaaaatgaattgttttcctagagttgtcgtccatctttgaaattttgagcgccctctgttggaatttaattttgcgaatggtcaacgtgttcgacctaaccttacacatttttcttcccaacgtgttcccatgcacaagtttattgcacaagtatactggaacgggtgttgggtaatgctagcacaagtacgttaactgtacaagtggcaagagacttgtgaacattttgtaatttttacttgttaattttttacgcaagtgtaattgagagtgtgtgtgtgaaagacttgtacaaagtttaatacagttgagttttgaccattcgtgtagacatacgatactggatgcttcaactactgatgttcaagtttaaaatggcgcattgtgcatgcatacttgtacatgtgttgtcgacacatacagggtgttagcaaataagtatgaaaaactttaaagggcaattctacatgaaaaaataatgccggtttgctcgacaaacatatgtccgcaaatgattcgcttccgagatacggggtgttgaaatttttcatttaaaactgc

SEQ ID NO: 552 - DNA, 1654 bp, Diabrotica virgifera
tatatattaaaaagagcctgtactgccattaagaaggacaaaaaaatacactttcttcaaataaactttttcatcccatgcctagattttgtgtcacattgaaactactaatttttttttatctctaacaagaaatcgaacaaataactaatatttaaacaaaatttactctgtgtggagtatgaagggaaccagtctcgttggaactttaccgcgctgagcagatgtgacgtgaattgtaaattgtagaattccctcatcttccttagtctcagcatccgtatggcttgcaaattgtagaagcctcggaggtgtaaccagagaaggttcccattgttttcattctggtgggatgtagaatagcattatgttgttttatatgccattagagtgaaaacttagtatttttgctagcagttgccgctagggcatctatgccatttcgttcgttgcaatccgggactgcacgctggggtttgttttggttggatcagggagagcagcatatgtgcctcctgatgagagactaataagtttcgaaaccggtagaggtgcttgcagcactctctgattggactggaatatggttcggctgtattttcgttttgcaacgaaattgaaaatggttattcatttttgatttacaatatattctgtacatagaatgtacattgttatgcaaaatatcccgaccacctcgtaatttccagaacacaattattataaaataaattcacctacttagtttccaagtttccagtttttatttaattaaaaattgttatctgttggtgtaaaataaactgtagtgcacctattaattaaattaaaaacaaaattagaaatcctaagatagattaataatttttagaacgctgtgtgattatcgggggccagatttttttatgaaaaaaaggtaaaaacaaatcagtagttagcatcaaattttaatgaatgcatacagatttaaacataattttgagtcgtctttaacttataagatgtcttagttgcaaaacttagtggttactttggcaaaacactcctgtaaatgattttaatttaacgttttagaactgtgaattcaaatgacaaaatgaattgttttcctagagttgtcgtccatctttgaaattttgagcgccctctgttggaatttaattttgcgaatggtcaacgtgttcgacctaaccttacacatttttcttcccaacgtgttcccatgcacaagtttattgcacaagtatactggaacgggtgttgggtaatgctagcacaagtacgttaactgtacaagtggcaagagacttgtgaacattttgtaatttttacttgttaattttttacgcaagtgtaattgagagtgtgtgtgtgaaagacttgtacaaagtttaatacagttgagttttgaccattcgtgtagacatacgatactggatgcttcaactactgatgttcaagtttaaaatggcgcattgtgcatgcatacttgtacatgtgttgtcgacacatacagggtgttagcaaataagtatgaaaaactttaaagggcaattctacatgaaaaaataatgccggtttgctcgacaaacatatgtccgcaaatgattcgcttccgagatacggggtgttgaaatttttcatttaaaactgc

SEQ ID NO: 553 - DNA, 1648 bp, Diabrotica virgifera
agcgccgcaagcacctccaccggtttcgaaacttattagtctctcatcaggaggcacatatgctgctcatagagactaataagtttcgaaaccggtagaggtgcttgcagcactctccgattggaccggaccatggctcggctgcaccttcgttttgcaacgaaattgaaaatggttattcatttttgatttacatttactctgtgtggagtatgaagggaaccagtctcgttggaactttaccgcgctgagcagatgtgacgtgaattgtaaattgtagaattccctcatcttccttagtctcagcatccgtatggcttgcaaattgtagaagcctcggaggtgtaaccagagaaggttcccattgttttcattctggtgggatgtagaatagcattatgttgttttatatgccattagagtgaaaacttagtatttttgctagcagttgccgctagggcatctatgccatttcgttcgttgcaatccgggactgcacgctggggtttgttttggttggatcagggagagcagcatatgtgcctcctgatgagagactaataagtttcgaaaccggtagaggtgcttgcagcactctctgattggactggaatatggttcggctgtattttcgttttgcaacgaaattgaaaatggttattcatttttgatttacaatatattctgtacatagaatgttccagaacacaattattataaaataaattcacctacttagtttccaagtttccagtttttatttaattaaaaattgttatctgttggtgtaaaataaactgtagtgcacctattaattaaattaaaaacaaaattagaaatcctaagatagattaataatttttagaacgctgtgtgattatcgggggccagatttttttatgaaaaaaaggtaaaaacaaatcagtagttagcatcaaattttaatgaatgcatacagatttaaacataattttgagtcgtctttaacttataagatgtcttagttgcaaaacttagtggttactttggcaaaacactcctgtaaatgattttaatttaacgttttagaactgtgaattcaaatgacaaaatgaattgttttcctagagttgtcgtccatctttgaaattttgagcgccctctgttggaatttaattttgcgaatggtcaacgtgttcgacctaaccttacacatttttcttcccaacgtgttcccatgcacaagtttattgcacaagtatactggaacgggtgttgggtaatgctagcacaagtacgttaactgtacaagtggcaagagacttgtgaacattttgtaatttttacttgttaattttttacgcaagtgtaattgagagtgtgtgtgtgaaagacttgtacaaagtttaatacagttgagttttgaccattcgtgtagacatacgatactggatgcttcaactactgatgttcaagtttaaaatggcgcattgtgcatgcatacttgtacatgtgttgtcgacacatacagggtgttagcaaataagtatgaaaaactttaaagggcaattctacatgaaaaaataatgccggtttgctcgacaaacatatgtccgcaaatgattcgcttccgagatacggggtgttgaaatttttcatttaaaactgc

SEQ ID NO: 554 - DNA, 4846 bp, Diabrotica virgifera
  SmartBlast Evalue=1E-171; Info=Cytochrome P450 9Z4 n=1 Tax= Tribolium castaneum RepID=D6WWU4_TRICA
cagtgcatccttgaacgttgttggactgttatgtgattggtcacactattaattagtatcaaaaataaacttgtttataaaaatattattgatatgttaaccagtgttatgtggattgaatattaaataacaaggtattttttatgtaattggtatatcaagtaagacgtaggaatcaaaaatgttgcaattagtactagtcttggccgctttggctgtattgttctattattttgccgtcaaacccatgagttactggaaggaaaggggaataaaacagacgaaacctgtatggttgcttggcgatagttggggtactgttataaagaagcacagtttagtggattttgtccaatatatctacgaccaagttccgggtgtaagatattttggatgctaccagatggtaacacctactcttgtcatacgagacccagatcttatcaaaaatattgccgttaaagactttgaccactttatggaccacagacaaatgatcccagcaaatgccgaccctctattcggaaagaatctatttgcattaaaaggtcaagtatggcgtgacacgagaccgatccttagtccaaccttcaccagcagcaaaatgcgtgccatgttcgttctgatgtctgaatgtggtgagaacttcataaaatatttccagaacaataacaaagatatcatcgaaatggaaatgaaggatacttttagacgttttacgaacgatgttattgctacaacagcttttggcgttaaaacagattctttaaaggacagagataatgaattcttcactatgggaacgagagcagtagattttggattctggcgaagtcttaagttttttggctactttctgataccgaaaattttagcgtttttcaaagtttcaatatttggcaaagaattaagtgacttctttatagaactgattgataagacagttcgaactagagaagagagaggaattgttcgtcctgacatgatacacttactaatggaggctaaaaaaggagttcaacaaaaagatgagaaagttatagatactggatttgcagtagtagaagaagcggatttaggaaatgctaaaggtgccatagaaatcaccaacgtcgatatagctgcgcacgctatggtcttctttttcgctggttttgatgccgtatcttctttgatgtgctttacaacctacgaattagcagtaaaccctgatatccaaaatagattgagagaagaagtcgaagatacgctgagagaatgtaatggcaagctaacatatgaaggtttattgaaaatgaaatacttggatatggttgtttcagaaaccttacgaaaatggccaattggtgtaatggccgacagaatatgtaccaaaccttacaccatcccagctgcaacacccgaggaaaagccgcttgttcttgaaaagaacacagttcttctctttcccgtatgggcgatacatagagatccagcattctacgaaaacccagagaggttcgacccagaaagattcaacgacgaaaacaagtcaaaaatcaacccttacacgtatcttcccttcggcattggtcctaggaactgtataggatctcgatttgctctattggaagcaaaagtggtgttgttttatctcttgtccaattttatagtcgagccttccgcaagacttacagtaccactgaaaatttctaggaagcagatcaatgtgacagctgagggtggtttctggtttaacttgaagaagttgaagaattaaaacgtacctaccgactaccgaggtgtatatacctattattgttacatgatataaactgagttgcgtgttttaacaattaccaactcatctttgtgcggattactgcgtgtgaacaacaaaaacttcatttactaaaatttttacccgacatcactgcttttgaaataatcgaaggtactgatttctttttggctaggtactagttgttttaaatgcatatatttagtagttctcggacatgtatatgtacctatatgtataatactaattattattaataataagtctactaggtacgcttaatatatttttactttatatgtgctatatgtgtgctaagaatagctattgttgttattacgatgtttgaagttatacttctttaggcgcgattgagattgagggtgaatttatattgatctgcgcgcatgcgcacaccgacagtatggtattagtcgttatacgggctctgattgggtgttgaaatgatctgtcaataataaataattgttcaatatgaaggtaaacaaatgtataatatattagttttattgttgtgaggacagaaacaaaaaagtttataattgtagtgacatttaaatagtttttaaaagcaacaggtacgtaataattgtaaatgtatcataggtacctacctatttgaacctaccaaagtacatagtatgtaatacttttatttacataatttgattaccatcaaaatttctatcaatgttcacctaatatattgttttcttactatatgtttttttgtattttttcaattctaaatcatttcaattcaaaatcaaaataatttaatttaattcaaaaatttcaaaagcttaatccgtttagttagtcgatcttcgcacataatgacacattgcctccgtggcgaagcatttaaggcgaatgaaccccaatataccaaccgcgctgatagctggttggaatcccaataaaaacttttattttttatttttatacattttatgactgtaagtatatttattatataattttattttcagaaaatacgtatttagttaaaaaaaatttccgacaattaatgttcagaaataatttgtggcattattaatgtgtttgtgtgtgttttattcttttattattttaatttttggcactgttttaataaaaatgtttgagaagtagtaagtataaattagtttaatatttaaataaaatataaataaaaagtatattaatttcgtttaaatcatataatagaagtataagttcttacgtgcgtacaaagtacacacacattcttttttttaatttatttattgccattctatatttatctttatactagtaatagtcggtatgatgttcaagctgtttattgttgagtccatcaatatcctcaatagtgaaaaaagattaaacacttcaataaaataactttataaaattcgtccactggataatagccatttcctaattattaccactgacagtacgtattttatcaataatactacacatcgacgtacgtttcactttatgttttgatttaacttgtttaaaaatgaatcatgacgtatgggcaaagataaaatgaaaaaaatcatcttcctagtctcagcatccgtatggattgcaaattgtagaagcctcggaggtgtaaccagagaaggttcccattgttttcattctggtgggatgtagaatagcattatgttgttttatatgccattagagtgaaaacttagtatttttgctagcagttgccgctagggcatctatgccatttcgttcgttgcaatccgggactgcacgctggggtttgttttggttggatcagggagagcagcatatgtgcctcctgatgagagactaataagtttcgaaaccggtagaggtgcttgcagcactctctgattggactggaatatggttcggctgtattttcgttttgcaacgaaattgaaaatggttattcatttttgatttacaatatattctgtacatagaatgttccagaacacaattattataaaataaattcacctacttagtttccaagtttccagtttttatttaattaaaaattgttatctgttggtgtaaaataaactgtagtgcacctattaattaaattaaaaacaaaattagaaatcctaagatagattaataatttttagaacgctgtgtgattatcgggggccagatttttttatgaaaaaaaggtaaaaacaaatcagtagttagcatcaaattttaatgaatgcatacagatttaaacataattttgagtcgtctttaacttataagatgtcttagttgcaaaacttagtggttactttggcaaaacactcctgtaaatgattttaatttaacgttttagaactgtgaattcaaatgacaaaatgaattgttttcctagagttgtcgtccatctttgaaattttgagcgccctctgttggaatttaattttgcgaatattttccatttttttagagttatgacacttacgaagtcggggtgcgacgtattgaaattatttaaaaaaaataaaaagtcacgtctattttatatatgttatgtctagataagaatttaatatgctgtatacacttttttgataattctactctttatttttaatttattgtttcaaggctgctcgcttttggtggctaattgtattttttagtttttagggatgtactcaatttatttgttttatgtatgtaactatagcacaaatgaacaagagacaaatacaaaccagctaaaaaacgattttctatcgataactttgaattttaccattatttaaatcaaagtaagaattttaagcaataattctaaggggatccccgcacaaaggtaatattagctgaaatagcttgtataataaagattttcttttataaccaataaaaataatgatacattgttttcgagacatctaggatattggttgtaataatttcgacctcacttttgatctgcaaatgtgacagatattaccaaatgcgatgggacaacatccagaattgagcagaccacagccgcttttagaaggatgtccaaggtatgtaaaggtcgcgtct

SEQ ID NO: 555 - DNA, 1716 bp, Diabrotica virgifera
agaatagcattatgttgttttacatgccattagagtgaaaacttagtctttttgctagcagttgccgctagggcatctatgccatttcgttcgttgcaattcgggactgcacgctggggtttgttttggttggatcagagagagcagcatatgtgcctcctgatgagagactaataagtttcgaaaccggtagaggtgcttgcagcactctctgattggactggaatatggttcggctgtattttcgttttgcaacgaaattgaaaatggttattcatttttgatttacatgtttactctgattggagtacgaagggaaccattctcgttggaactttaccgcgctgagcagatgggacgtgaattataaattgtaaaattccctcatcttccttagtctcagcatccgtatggcttgcaaattgtagaagcctcggaggtgtaaccagagaaggttcccattgttttcattctggtgggatgtagaatagcattatgttgttttatatgccattagagtgaaaacttagtatttttgctagcagttgccgctagggcatctatgccatttcgttcgttgcaatccgggactgcacgctggggtttgttttggttggatcagggagagcagcatatgtgcctcctgatgagagactaataagtttcgaaaccggtagaggtgcttgcagcactctctgattggactggaatatggttcggctgtattttcgttttgcaacgaaattgaaaatggttattcattttttatttactttttatttacttgtagaccccatatatcatactcttcaattagttttggtgctatatagttcaaatcgtcttgagccactgacttgatcgtctgcaaagttgagcgtatttaacatagtgttggtgagtggtacctccattctacatttttgtttccatatttttgaagcactttccacgtatattttatataaagtgggggacagacaacacccttgctttaatccttttggcaggtaaaagggggagaagtgtactttttgatgttatataatctatattatgttatataattatataatcctttttatgttataaatcttgttgttatttgtgtccctgtttttatttttgttattggttgattgtatagtactttgacggcttttattaattctattttaatattcgtgctttccattgattgccacagcttcttccgtggaacactgtcgtaggcttttcgtagttcgacaaacaacctaatatttttatgcgaaccggttaaaccttctaagacgtcgccgcaaaggcatttatcccatgtcaataatattttttttaaatgttgaatatttttttgtttacctaaggattttaactatgttgtttaattgatgggattttgtcgaaagtactagtaagttcttttaacgttattatgtaaatatttttattctggataattcgatttacctgtattatgtaaataacttttagcccatagaaaaagcggtttgtttcatgaataatcaaaaacattttattttggtatttaaggcaacgattgtgaatgatttttttagtgtgtttacgattcttgaaagctatcacataaattgttacaaataaactacatgtgagtccttagttacttattttataagtattgtaaatgttttaatacatataaggtgttgtaaaataaagggtttattaagt

SEQ ID NO: 556 - DNA, 1617 bp, Diabrotica virgifera
tatatattaaaaagagcctgtactgccattaagaaggacaaaaaaatacactttcttcaaataaactttttcatcccatgcctagattttgtgtcacattgaaactactaatttttttttatctctaacaagaaatcgaacaaataactaatatttaaacaaaatttactctgtgtggagtatgaagggaaccagtctcgttggaactttaccgcgctgagcagatgtgacgtgaattgtaaattgtagaattccctcatcttccttagtctcagcatccgtatggcttgcaaattgtagaagcctcggaggtgtaaccagagaaggttcccattgttttcattctggtgggatgtagaatagcattatgttgttttatatgccattagagtgaaaacttagtatttttgctagcagttgccgctagggcatctatgccatttcgttcgttgcaatccgggactgcacgctggggtttgttttggttggatcagggagagcagcatatgtgcctcctgatgagagactaataagtttcgaaaccggtagaggtgcttgcagcactctctgattggactggaatatggttcggctgtattttcgttttgcaacgaaattgaaaatggttattcatttttgatttacaatatattctgtacatagaatgttccagaacacaattattataaaataaattcacctacttagtttccaagtttccagtttttatttaattaaaaattgttatctgttggtgtaaaataaactgtagtgcacctattaattaaattaaaaacaaaattagaaatcctaagatagattaataatttttagaacgctgtgtgattatcgggggccagatttttttatgaaaaaaaggtaaaaacaaatcagtagttagcatcaaattttaatgaatgcatacagatttaaacataattttgagtcgtctttaacttataagatgtcttagttgcaaaacttagtggttactttggcaaaacactcctgtaaatgattttaatttaacgttttagaactgtgaattcaaatgacaaaatgaattgttttcctagagttgtcgtccatctttgaaattttgagcgccctctgttggaatttaattttgcgaatggtcaacgtgttcgacctaaccttacacatttttcttcccaacgtgttcccatgcacaagtttattgcacaagtatactggaacgggtgttgggtaatgctagcacaagtacgttaactgtacaagtggcaagagacttgtgaacattttgtaatttttacttgttaattttttacgcaagtgtaattgagagtgtgtgtgtgaaagacttgtacaaagtttaatacagttgagttttgaccattcgtgtagacatacgatactggatgcttcaactactgatgttcaagtttaaaatggcgcattgtgcatgcatacttgtacatgtgttgtcgacacatacagggtgttagcaaataagtatgaaaaactttaaagggcaattctacatgaaaaaataatgccggtttgctcgacaaacatatgtccgcaaatgattcgcttccgagatacggggtgttgaaatttttcatttaaaactgc

SEQ ID NO: 557 - DNA, 1619 bp, Diabrotica virgifera
agcgccgcaagcacctccaccggtttcgaaacttattagtctctcatcaggaggcacatatgctgctcatagagactaataagtttcgaaaccggtagaggtgcttgcagcactctccgattggaccggaccatggctcggctgcaccttcgttttgcaacgaaattgaaaatggttattcatttttgatttacatttactctgtgtggagtatgaagggaaccagtctcgttggaactttaccgcgctgagcagatgtgacgtgaattgtaaattgtagaattccctcatcttccttagtctcagcatccgtatggcttgcaaattgtagaagcctcggaggtgtaaccagagaaggttcccattgttttcattctggtgggatgtagaatagcattatgttgttttatatgccattagagtgaaaacttagtatttttgctagcagttgccgctagggcatctatgccatttcgttcgttgcaatccgggactgcacgctggggtttgttttggttggatcagggagagcagcatatgtgcctcctgatgagagactaataagtttcgaaaccggtagaggtgcttgcagcactctctgattggactggaatatggttcggctgtattttcgttttgcaacgaaattgaaaatggttattcattttttatttactttttatttacttgtagaccccatatatcatactcttcaattagttttggtgctatatagttcaaatcgtcttgagccactgacttgatcgtctgcaaagttgagcgtatttaacatagtgttggtgagtggtacctccattctacatttttgtttccatatttttgaagcactttccacgtatattttatataaagtgggggacagacaacacccttgctttaatccttttggcaggtaaaagggggagaagtgtactttttgatgttatataatctatattatgttatataattatataatcctttttatgttataaatcttgttgttatttgtgtccctgtttttatttttgttattggttgattgtatagtactttgacggcttttattaattctattttaatattcgtgctttccattgattgccacagcttcttccgtggaacactgtcgtaggcttttcgtagttcgacaaacaacctaatatttttatgcgaaccggttaaaccttctaagacgtcgccgcaaaggcatttatcccatgtcaataatattttttttaaatgttgaatatttttttgtttacctaaggattttaactatgttgtttaattgatgggattttgtcgaaagtactagtaagttcttttaacgttattatgtaaatatttttattctggataattcgatttacctgtattatgtaaataacttttagcccatagaaaaagcggtttgtttcatgaataatcaaaaacattttattttggtatttaaggcaacgattgtgaatgatttttttagtgtgtttacgattcttgaaagctatcacataaattgttacaaataaactacatgtgagtccttagttacttattttataagtattgtaaatgttttaatacatataaggtgttgtaaaataaagggtttattaagt

SEQ ID NO: 558 - DNA, 1588 bp, Diabrotica virgifera
tatatattaaaaagagcctgtactgccattaagaaggacaaaaaaatacactttcttcaaataaactttttcatcccatgcctagattttgtgtcacattgaaactactaatttttttttatctctaacaagaaatcgaacaaataactaatatttaaacaaaatttactctgtgtggagtatgaagggaaccagtctcgttggaactttaccgcgctgagcagatgtgacgtgaattgtaaattgtagaattccctcatcttccttagtctcagcatccgtatggcttgcaaattgtagaagcctcggaggtgtaaccagagaaggttcccattgttttcattctggtgggatgtagaatagcattatgttgttttatatgccattagagtgaaaacttagtatttttgctagcagttgccgctagggcatctatgccatttcgttcgttgcaatccgggactgcacgctggggtttgttttggttggatcagggagagcagcatatgtgcctcctgatgagagactaataagtttcgaaaccggtagaggtgcttgcagcactctctgattggactggaatatggttcggctgtattttcgttttgcaacgaaattgaaaatggttattcattttttatttactttttatttacttgtagaccccatatatcatactcttcaattagttttggtgctatatagttcaaatcgtcttgagccactgacttgatcgtctgcaaagttgagcgtatttaacatagtgttggtgagtggtacctccattctacatttttgtttccatatttttgaagcactttccacgtatattttatataaagtgggggacagacaacacccttgctttaatccttttggcaggtaaaagggggagaagtgtactttttgatgttatataatctatattatgttatataattatataatcctttttatgttataaatcttgttgttatttgtgtccctgtttttatttttgttattggttgattgtatagtactttgacggcttttattaattctattttaatattcgtgctttccattgattgccacagcttcttccgtggaacactgtcgtaggcttttcgtagttcgacaaacaacctaatatttttatgcgaaccggttaaaccttctaagacgtcgccgcaaaggcatttatcccatgtcaataatattttttttaaatgttgaatatttttttgtttacctaaggattttaactatgttgtttaattgatgggattttgtcgaaagtactagtaagttcttttaacgttattatgtaaatatttttattctggataattcgatttacctgtattatgtaaataacttttagcccatagaaaaagcggtttgtttcatgaataatcaaaaacattttattttggtatttaaggcaacgattgtgaatgatttttttagtgtgtttacgattcttgaaagctatcacataaattgttacaaataaactacatgtgagtccttagttacttattttataagtattgtaaatgttttaatacatataaggtgttgtaaaataaagggtttattaagt

SEQ ID NO: 559 - DNA, 1567 bp, Diabrotica virgifera
aatgacataaacttagcagaatatttcgttcccattttactcacaaataaattacaaacaatgacgtataatacctagactcacccaatgctgtcctaatttgattacttccggtaagtactatagttctgacgaatagaaacttatttgtttattttcacgagattacttactgtttaactttttatttttgaagttatacttctttaggcgcgattgatattgagggtgaatttatattgatctgcgcgcatgcgcacaccgacagtatggtattagtcgttatacgggctctgattgggtgttgaaatgatctgtcaataataaataattgttcaatatgaaggtaaacaaatgtataatatattagttttattgttgtgaggacagaaacaaaaaagtttataattgtagtgacatttaaatagtttttaaaagcaacaggtacgtaataattgtaaatgtatcataggtacctacctatttgaacctaccaaagtacatagtatgtaatacttttatttacataatttgattaccatcaaaatttctatcaatgttcacctaatatattgttttcttactatatgtttttttgtattttttcaattctaaatcatttcaattcaaaatcaaaataatttaatttaattcaaaaatttcaaaagcttaatccgtttagttagtcgatcttcgcacataatgacacattgcctccgtggcgaagcatttaaggcgaatgaaccccaatataccaaccgcgctgatagctggttggaatcccaataaaaacttttattttttatttttatacattttatgactgtaagtatatttattatataattttattttcagaaaatacgtatttagttaaaaaaaatttccgacaattaatgttcagaaataatttgtggcattattaatgtgtttgtgtgtgttttattcttttattattttaatttttggcactgttttaataaaaatgtttgagaagtagtaagtataaattagtttaatatttaaataaaatataaataaaaagtatattaatttcgtttaaatcatataatagaagtataagttcttacgtgcgtacaaagtacacacacattcttttttttaatttatttattgccattctatatttatctttatactagtaatagtcggtatgatgttcaagctgtttattgttgagtccatcaatatcctcaatagtgaaaaaagattaaacacttcaataaaataactttataaaattcgtccactggataatagccatttcctaattattaccactgacagtacgtattttatcaataatactacacatcgacgtacgtttcactttatgttttgatttaacttgtttaaaaatgaatcatgacgtatgggcaaagataaaatgaaaaaaatcatcttcctagtctcagcatccgtatggattgcaaattgtagaagcctcggaggtgttaccagagaaggttcccattgttttcagtctggtaggatgtggaacaacatttttggatgttgttttatgtgctattagattgaaaacttt

SEQ ID NO: 560 - DNA, 1152 bp, Diabrotica virgifera
aatgacataaacttagcagaatatttcgttcccattttactcacaaataaattacaaacaatgacgtataatacctagactcacccaatgctgtcctaatttgattacttccggtaagtactatagttctgacgaatagaaacttatttgtttattttcacgagattacttactgtttaactttttatttttgaagttatacttctttaggcgcgattgatattgagggtgaatttatattgatctgcgcgcatgcgcacaccgacagtatggtattagtcgttatacgggctctgattgggtgttgaaatgatctgtcaataataaataattgttcaatatgaaggtaaacaaatgtataatatattagttttattgttgtgaggacagaaacaaaaaagtttataattgtagtgacatttaaatagtttttaaaagcaacaggtacgtaataattgtaaatgtatcataggtacctacctatttgaacctaccaaagtacatagtatgtaatacttttatttacataatttgattaccatcaaaatttctatcaatgttcacctaatatattgttttcttactatatgtttttttgtattttttcaattctaaatcatttcaattcaaaatcaaaataatttaatttaattcaaaaatttcaaaagcttaatccgtttagttagtcgatcttcgcacataatgacacattgcctccgtggcgaagcatttaaggcgaatgaaccccaatataccaaccgcgctgatagctggttcgaatcccaataaaaacttttattttttttattttttttatacattttatgattgtaagtatatttattatataattttattttcagaaaatacgtatttagttaaaaaattttccgacaattaatgttcagaaatcatttgtggcatttttaatgtgtttgtgtgtgttttattcttttattattttaatttttggcactgttttaataaaaatgtttgagaagtagtaagtataaattagtttaatatttaaataaaatataaataaaaagtatattaatttcgtttaaatcatataatagaagtataacttcttacgtgcgtacaaagtacacacacattctttttttttagttcaatgctgaacatacgtct

SEQ ID NO: 561 - DNA, 825 bp, Diabrotica virgifera
aatgacataaacttagcagaatatttcgttcccattttactcacaaataaattacaaacaatgacgtataatacctagactcacccaatgctgtcctaatttgattacttccggtaagtactatagttctgacgaatagaaacttatttgtttattttcacgagattacttactgtttaactttttatttttgaagttatacttctttaggcgcgattgatattgagggtgaatttatattgatctgcgcgcatgcgcacaccgacagtatggtattagtcgttatacgggctctgattgggtgttgaaatgatctgtcaataataaataattgttcaatatgaaggtaaacaaatgtataatatattagttttattgttgtgaggacagaaacaaaaaagtttataattgtagtgacatttaaatagtttttaaaagcaacaggtacgtaataattgtaaatgtatcataggtacctacctatttgaacctaccaaaatacatagtatgtaatacttttatttacataatttgattaccatcaaaatttctatcaatgttcacctaatatattgttttcttactctatgttttgttgtattttttcaattctaaatcatttcaattcaaaatcaaaataatttaatttaattcaaaaatgtcaaaagtttaatccgtttagttagtcgatcttcgcacataatgacacgttgtctccgtggcgaagcgtttaatgcgaatgaaccccaatacaacgccaataccaaccgcgctgataagttggttcgaatcccaagagaaacttttattttttttatacatttt

SEQ ID NO: 562 - DNA, 534 bp, Diabrotica virgifera
agaatagcattatgttgttttacatgccattagagtgaaaacttagtctttttgctagcagttgccgctagggcatctatgccatttcgttcgttgcaattcgggactgcacgctggggtttgttttggttggatcagagagagcagcatatgtgcctcctgatgagagactaataagtttcgaaaccggtagaggtgcttgcagcactctctgattggactggaatatggttcggctgtattttcgttttgcaacgaaattgaaaatggttattcatttttgatttacatgtttactctgattggagtacgaagggaaccattctcgttggaactttaccgcgctgagcagatgggacgtgaattataaattgtaaaattccctcatcttccttagtctcagcatccgtatggcttgcaaattgtagaagcctcggaggtgttaccagagaaggttcccattgttttcagtctggtaggatgtggaacaacatttttggatgttgttttatgtgctattagattgaaaacttt

SEQ ID NO: 563 - DNA, 437 bp, Diabrotica virgifera
agcgccgcaagcacctccaccggtttcgaaacttattagtctctcatcaggaggcacatatgctgctcatagagactaataagtttcgaaaccggtagaggtgcttgcagcactctccgattggaccggaccatggctcggctgcaccttcgttttgcaacgaaattgaaaatggttattcatttttgatttacatttactctgtgtggagtatgaagggaaccagtctcgttggaactttaccgcgctgagcagatgtgacgtgaattgtaaattgtagaattccctcatcttccttagtctcagcatccgtatggcttgcaaattgtagaagcctcggaggtgttaccagagaaggttcccattgttttcagtctggtaggatgtggaacaacatttttggatgttgttttatgtgctattagattgaaaacttt

SEQ ID NO: 564 - DNA, 406 bp, Diabrotica virgifera
tatatattaaaaagagcctgtactgccattaagaaggacaaaaaaatacactttcttcaaataaactttttcatcccatgcctagattttgtgtcacattgaaactactaatttttttttatctctaacaagaaatcgaacaaataactaatatttaaacaaaatttactctgtgtggagtatgaagggaaccagtctcgttggaactttaccgcgctgagcagatgtgacgtgaattgtaaattgtagaattccctcatcttccttagtctcagcatccgtatggcttgcaaattgtagaagcctcggaggtgttaccagagaaggttcccattgttttcagtctggtaggatgtggaacaacatttttggatgttgttttatgtgctattagattgaaaacttt

SEQ ID NO: 565 - DNA, 4808 bp, Diabrotica virgifera
  SmartBlast Evalue=1E-171; Info=Cytochrome P450 9Z4 n=1 Tax= Tribolium castaneum RepID=D6WWU4_TRICA
cagtgcatccttgaacgttgttggactgttatgtgattggtcacactattaattagtatcaaaaataaacttgtttataaaaatattattgatatgttaaccagtgttatgtggattgaatattaaataacaaggaatcaaaaatgttgcaattagtactagtcttggccgctttggctgtattgttctattattttgccgtcaaacccatgagttactggaaggaaaggggaataaaacagacgaaacctgtatggttgcttggcgatagttggggtactgttataaagaagcacagtttagtggattttgtccaatatatctacgaccaagttccgggtgtaagatattttggatgctaccagatggtaacacctactcttgtcatacgagacccagatcttatcaaaaatattgccgttaaagactttgaccactttatggaccacagacaaatgatcccagcaaatgccgaccctctattcggaaagaatctatttgcattaaaaggtcaagtatggcgtgacacgagaccgatccttagtccaaccttcaccagcagcaaaatgcgtgccatgttcgttctgatgtctgaatgtggtgagaacttcataaaatatttccagaacaataacaaagatatcatcgaaatggaaatgaaggatacttttagacgttttacgaacgatgttattgctacaacagcttttggcgttaaaacagattctttaaaggacagagataatgaattcttcactatgggaacgagagcagtagattttggattctggcgaagtcttaagttttttggctactttctgataccgaaaattttagcgtttttcaaagtttcaatatttggcaaagaattaagtgacttctttatagaactgattgataagacagttcgaactagagaagagagaggaattgttcgtcctgacatgatacacttactaatggaggctaaaaaaggagttcaacaaaaagatgagaaagttatagatactggatttgcagtagtagaagaagcggatttaggaaatgctaaaggtgccatagaaatcaccaacgtcgatatagctgcgcacgctatggtcttctttttcgctggttttgatgccgtatcttctttgatgtgctttacaacctacgaattagcagtaaaccctgatatccaaaatagattgagagaagaagtcgaagatacgctgagagaatgtaatggcaagctaacatatgaaggtttattgaaaatgaaatacttggatatggttgtttcagaaaccttacgaaaatggccaattggtgtaatggccgacagaatatgtaccaaaccttacaccatcccagctgcaacacccgaggaaaagccgcttgttcttgaaaagaacacagttcttctctttcccgtatgggcgatacatagagatccagcattctacgaaaacccagagaggttcgacccagaaagattcaacgacgaaaacaagtcaaaaatcaacccttacacgtatcttcccttcggcattggtcctaggaactgtataggatctcgatttgctctattggaagcaaaagtggtgttgttttatctcttgtccaattttatagtcgagccttccgcaagacttacagtaccactgaaaatttctaggaagcagatcaatgtgacagctgagggtggtttctggtttaacttgaagaagttgaagaattaaaacgtacctaccgactaccgaggtgtatatacctattattgttacatgatataaactgagttgcgtgttttaacaattaccaactcatctttgtgcggattactgcgtgtgaacaacaaaaacttcatttactaaaatttttacccgacatcactgcttttgaaataatcgaaggtactgatttctttttggctaggtactagttgttttaaatgcatatatttagtagttctcggacatgtatatgtacctatatgtataatactaattattattaataataagtctactaggtacgcttaatatatttttactttatatgtgctatatgtgtgctaagaatagctattgttgttattacgatgtttgaagttatacttctttaggcgcgattgagattgagggtgaatttatattgatctgcgcgcatgcgcacaccgacagtatggtattagtcgttatacgggctctgattgggtgttgaaatgatctgtcaataataaataattgttcaatatgaaggtaaacaaatgtataatatattagttttattgttgtgaggacagaaacaaaaaagtttataattgtagtgacatttaaatagtttttaaaagcaacaggtacgtaataattgtaaatgtatcataggtacctacctatttgaacctaccaaagtacatagtatgtaatacttttatttacataatttgattaccatcaaaatttctatcaatgttcacctaatatattgttttcttactatatgtttttttgtattttttcaattctaaatcatttcaattcaaaatcaaaataatttaatttaattcaaaaatttcaaaagcttaatccgtttagttagtcgatcttcgcacataatgacacattgcctccgtggcgaagcatttaaggcgaatgaaccccaatataccaaccgcgctgatagctggttggaatcccaataaaaacttttattttttatttttatacattttatgactgtaagtatatttattatataattttattttcagaaaatacgtatttagttaaaaaaaatttccgacaattaatgttcagaaataatttgtggcattattaatgtgtttgtgtgtgttttattcttttattattttaatttttggcactgttttaataaaaatgtttgagaagtagtaagtataaattagtttaatatttaaataaaatataaataaaaagtatattaatttcgtttaaatcatataatagaagtataagttcttacgtgcgtacaaagtacacacacattcttttttttaatttatttattgccattctatatttatctttatactagtaatagtcggtatgatgttcaagctgtttattgttgagtccatcaatatcctcaatagtgaaaaaagattaaacacttcaataaaataactttataaaattcgtccactggataatagccatttcctaattattaccactgacagtacgtattttatcaataatactacacatcgacgtacgtttcactttatgttttgatttaacttgtttaaaaatgaatcatgacgtatgggcaaagataaaatgaaaaaaatcatcttcctagtctcagcatccgtatggattgcaaattgtagaagcctcggaggtgtaaccagagaaggttcccattgttttcattctggtgggatgtagaatagcattatgttgttttatatgccattagagtgaaaacttagtatttttgctagcagttgccgctagggcatctatgccatttcgttcgttgcaatccgggactgcacgctggggtttgttttggttggatcagggagagcagcatatgtgcctcctgatgagagactaataagtttcgaaaccggtagaggtgcttgcagcactctctgattggactggaatatggttcggctgtattttcgttttgcaacgaaattgaaaatggttattcatttttgatttacaatatattctgtacatagaatgttccagaacacaattattataaaataaattcacctacttagtttccaagtttccagtttttatttaattaaaaattgttatctgttggtgtaaaataaactgtagtgcacctattaattaaattaaaaacaaaattagaaatcctaagatagattaataatttttagaacgctgtgtgattatcgggggccagatttttttatgaaaaaaaggtaaaaacaaatcagtagttagcatcaaattttaatgaatgcatacagatttaaacataattttgagtcgtctttaacttataagatgtcttagttgcaaaacttagtggttactttggcaaaacactcctgtaaatgattttaatttaacgttttagaactgtgaattcaaatgacaaaatgaattgttttcctagagttgtcgtccatctttgaaattttgagcgccctctgttggaatttaattttgcgaatattttccatttttttagagttatgacacttacgaagtcggggtgcgacgtattgaaattatttaaaaaaaataaaaagtcacgtctattttatatatgttatgtctagataagaatttaatatgctgtatacacttttttgataattctactctttatttttaatttattgtttcaaggctgctcgcttttggtggctaattgtattttttagtttttagggatgtactcaatttatttgttttatgtatgtaactatagcacaaatgaacaagagacaaatacaaaccagctaaaaaacgattttctatcgataactttgaattttaccattatttaaatcaaagtaagaattttaagcaataattctaaggggatccccgcacaaaggtaatattagctgaaatagcttgtataataaagattttcttttataaccaataaaaataatgatacattgttttcgagacatctaggatattggttgtaataatttcgacctcacttttgatctgcaaatgtgacagatattaccaaatgcgatgggacaacatccagaattgagcagaccacagccgcttttagaaggatgtccaaggtatgtaaaggtcgcgtct

SEQ ID NO: 566 - DNA, 4750 bp, Diabrotica virgifera
  SmartBlast Evalue=1E-171; Info=Cytochrome P450 9Z4 n=1 Tax= Tribolium castaneum RepID=D6WWU4_TRICA
cagtgcatccttgaacgttgttggactgttatgtgattggtcacactattaattagtatcaaaaataaacttgtttataaaaatattattgatatgttaaccagtgttatgtggattgaatattaaataacaaggtattttttatgtaattggtatatcaagtaagacgtaggaatcaaaaatgttgcaattagtactagtcttggccgctttggctgtattgttctattattttgccgtcaaacccatgagttactggaaggaaaggggaataaaacagacgaaacctgtatggttgcttggcgatagttggggtactgttataaagaagcacagtttagtggattttgtccaatatatctacgaccaagttccgggtgtaagatattttggatgctaccagatggtaacacctactcttgtcatacgagacccagatcttatcaaaaatattgccgttaaagactttgaccactttatggaccacagacaaatgatcccagcaaatgccgaccctctattcggaaagaatctatttgcattaaaaggtcaagtatggcgtgacacgagaccgatccttagtccaaccttcaccagcagcaaaatgcgtgccatgttcgttctgatgtctgaatgtggtgagaacttcataaaatatttccagaacaataacaaagatatcatcgaaatggaaatgaaggatacttttagacgttttacgaacgatgttattgctacaacagcttttggcgttaaaacagattctttaaaggacagagataatgaattcttcactatgggaacgagagcagtagattttggattctggcgaagtcttaagttttttggctactttctgataccgaaaattttagcgtttttcaaagtttcaatatttggcaaagaattaagtgacttctttatagaactgattgataagacagttcgaactagagaagagagaggaattgttcgtcctgacatgatacacttactaatggaggctaaaaaaggagttcaacaaaaagatgagaaagttatagatactggatttgcagtagtagaagaagcggatttaggaaatgctaaaggtgccatagaaatcaccaacgtcgatatagctgcgcacgctatggtcttctttttcgctggttttgatgccgtatcttctttgatgtgctttacaacctacgaattagcagtaaaccctgatatccaaaatagattgagagaagaagtcgaagatacgctgagagaatgtaatggcaagctaacatatgaaggtttattgaaaatgaaatacttggatatggttgtttcagaaaccttacgaaaatggccaattggtgtaatggccgacagaatatgtaccaaaccttacaccatcccagctgcaacacccgaggaaaagccgcttgttcttgaaaagaacacagttcttctctttcccgtatgggcgatacatagagatccagcattctacgaaaacccagagaggttcgacccagaaagattcaacgacgaaaacaagtcaaaaatcaacccttacacgtatcttcccttcggcattggtcctaggaactgtataggatctcgatttgctctattggaagcaaaagtggtgttgttttatctcttgtccaattttatagtcgagccttccgcaagacttacagtaccactgaaaatttctaggaagcagatcaatgtgacagctgagggtggtttctggtttaacttgaagaagttgaagaattaaaacgtacctaccgactaccgaggtgtatatacctattattgttacatgatataaactgagttgcgtgttttaacaattaccaactcatctttgtgcggattactgcgtgtgaacaacaaaaacttcatttactaaaatttttacccgacatcactgcttttgaaataatcgaaggtactgatttctttttggctaggtactagttgttttaaatgcatatatttagtagttctcggacatgtatatgtacctatatgtataatactaattattattaataataagtctactaggtacgcttaatatatttttactttatatgtgctatatgtgtgctaagaatagctattgttgttattacgatgtttgaagttatacttctttaggcgcgattgagattgagggtgaatttatattgatctgcgcgcatgcgcacaccgacagtatggtattagtcgttatacgggctctgattgggtgttgaaatgatctgtcaataataaataattgttcaatatgaaggtaaacaaatgtataatatattagttttattgttgtgaggacagaaacaaaaaagtttataattgtagtgacatttaaatagtttttaaaagcaacaggtacgtaataattgtaaatgtatcataggtacctacctatttgaacctaccaaagtacatagtatgtaatacttttatttacataatttgattaccatcaaaatttctatcaatgttcacctaatatattgttttcttactatatgtttttttgtattttttcaattctaaatcatttcaattcaaaatcaaaataatttaatttaattcaaaaatttcaaaagcttaatccgtttagttagtcgatcttcgcacataatgacacattgcctccgtggcgaagcatttaaggcgaatgaaccccaatataccaaccgcgctgatagctggttggaatcccaataaaaacttttattttttatttttatacattttatgactgtaagtatatttattatataattttattttcagaaaatacgtatttagttaaaaaaaatttccgacaattaatgttcagaaataatttgtggcattattaatgtgtttgtgtgtgttttattcttttattattttaatttttggcactgttttaataaaaatgtttgagaagtagtaagtataaattagtttaatatttaaataaaatataaataaaaagtatattaatttcgtttaaatcatataatagaagtataagttcttacgtgcgtacaaagtacacacacattcttttttttaatttatttattgccattctatatttatctttatactagtaatagtcggtatgatgttcaagctgtttattgttgagtccatcaatatcctcaatagtgaaaaaagattaaacacttcaataaaataactttataaaattcgtccactggataatagccatttcctaattattaccactgacagtacgtattttatcaataatactacacatcgacgtacgtttcactttatgttttgatttaacttgtttaaaaatgaatcatgacgtatgggcaaagataaaatgaaaaaaatcatcttcctagtctcagcatccgtatggattgcaaattgtagaagcctcggaggtgtaaccagagaaggttcccattgttttcattctggtgggatgtagaatagcattatgttgttttatatgccattagagtgaaaacttagtatttttgctagcagttgccgctagggcatctatgccatttcgttcgttgcaatccgggactgcacgctggggtttgttttggttggatcagggagagcagcatatgtgcctcctgatgagagactaataagtttcgaaaccggtagaggtgcttgcagcactctctgattggactggaatatggttcggctgtattttcgttttgcaacgaaattgaaaatggttattcatttttgatttacaatatattctgtacatagaatgtacattgttatgcaaaatatcccgaccacctcgtaatttccagaacacaattattataaaataaattcacctacttagtttccaagtttccagtttttatttaattaaaaattgttatctgttggtgtaaaataaactgtagtgcacctattaattaaattaaaaacaaaattagaaatcctaagatagattaataatttttagaacgctgtgtgattatcgggggccagatttttttatgaaaaaaaggtaaaaacaaatcagtagttagcatcaaattttaatgaatgcatacagatttaaacataattttgagtcgtctttaacttataagatgtcttagttgcaaaacttagtggttactttggcaaaacactcctgtaaatgattttaatttaacgttttagaactgtgaattcaaatgacaaaatgaattgttttcctagagttgtcgtccatctttgaaattttgagcgccctctgttggaatttaattttgcgaatggtcaacgtgttcgacctaaccttacacatttttcttcccaacgtgttcccatgcacaagtttattgcacaagtatactggaacgggtgttgggtaatgctagcacaagtacgttaactgtacaagtggcaagagacttgtgaacattttgtaatttttacttgttaattttttacgcaagtgtaattgagagtgtgtgtgtgaaagacttgtacaaagtttaatacagttgagttttgaccattcgtgtagacatacgatactggatgcttcaactactgatgttcaagtttaaaatggcgcattgtgcatgcatacttgtacatgtgttgtcgacacatacagggtgttagcaaataagtatgaaaaactttaaagggcaattctacatgaaaaaataatgccggtttgctcgacaaacatatgtccgcaaatgattcgcttccgagatacggggtgttgaaatttttcatttaaaactgc

SEQ ID NO: 567 - DNA, 4712 bp, Diabrotica virgifera
  SmartBlast Evalue=1E-171; Info=Cytochrome P450 9Z4 n=1 Tax= Tribolium castaneum RepID=D6WWU4_TRICA
cagtgcatccttgaacgttgttggactgttatgtgattggtcacactattaattagtatcaaaaataaacttgtttataaaaatattattgatatgttaaccagtgttatgtggattgaatattaaataacaaggaatcaaaaatgttgcaattagtactagtcttggccgctttggctgtattgttctattattttgccgtcaaacccatgagttactggaaggaaaggggaataaaacagacgaaacctgtatggttgcttggcgatagttggggtactgttataaagaagcacagtttagtggattttgtccaatatatctacgaccaagttccgggtgtaagatattttggatgctaccagatggtaacacctactcttgtcatacgagacccagatcttatcaaaaatattgccgttaaagactttgaccactttatggaccacagacaaatgatcccagcaaatgccgaccctctattcggaaagaatctatttgcattaaaaggtcaagtatggcgtgacacgagaccgatccttagtccaaccttcaccagcagcaaaatgcgtgccatgttcgttctgatgtctgaatgtggtgagaacttcataaaatatttccagaacaataacaaagatatcatcgaaatggaaatgaaggatacttttagacgttttacgaacgatgttattgctacaacagcttttggcgttaaaacagattctttaaaggacagagataatgaattcttcactatgggaacgagagcagtagattttggattctggcgaagtcttaagttttttggctactttctgataccgaaaattttagcgtttttcaaagtttcaatatttggcaaagaattaagtgacttctttatagaactgattgataagacagttcgaactagagaagagagaggaattgttcgtcctgacatgatacacttactaatggaggctaaaaaaggagttcaacaaaaagatgagaaagttatagatactggatttgcagtagtagaagaagcggatttaggaaatgctaaaggtgccatagaaatcaccaacgtcgatatagctgcgcacgctatggtcttctttttcgctggttttgatgccgtatcttctttgatgtgctttacaacctacgaattagcagtaaaccctgatatccaaaatagattgagagaagaagtcgaagatacgctgagagaatgtaatggcaagctaacatatgaaggtttattgaaaatgaaatacttggatatggttgtttcagaaaccttacgaaaatggccaattggtgtaatggccgacagaatatgtaccaaaccttacaccatcccagctgcaacacccgaggaaaagccgcttgttcttgaaaagaacacagttcttctctttcccgtatgggcgatacatagagatccagcattctacgaaaacccagagaggttcgacccagaaagattcaacgacgaaaacaagtcaaaaatcaacccttacacgtatcttcccttcggcattggtcctaggaactgtataggatctcgatttgctctattggaagcaaaagtggtgttgttttatctcttgtccaattttatagtcgagccttccgcaagacttacagtaccactgaaaatttctaggaagcagatcaatgtgacagctgagggtggtttctggtttaacttgaagaagttgaagaattaaaacgtacctaccgactaccgaggtgtatatacctattattgttacatgatataaactgagttgcgtgttttaacaattaccaactcatctttgtgcggattactgcgtgtgaacaacaaaaacttcatttactaaaatttttacccgacatcactgcttttgaaataatcgaaggtactgatttctttttggctaggtactagttgttttaaatgcatatatttagtagttctcggacatgtatatgtacctatatgtataatactaattattattaataataagtctactaggtacgcttaatatatttttactttatatgtgctatatgtgtgctaagaatagctattgttgttattacgatgtttgaagttatacttctttaggcgcgattgagattgagggtgaatttatattgatctgcgcgcatgcgcacaccgacagtatggtattagtcgttatacgggctctgattgggtgttgaaatgatctgtcaataataaataattgttcaatatgaaggtaaacaaatgtataatatattagttttattgttgtgaggacagaaacaaaaaagtttataattgtagtgacatttaaatagtttttaaaagcaacaggtacgtaataattgtaaatgtatcataggtacctacctatttgaacctaccaaagtacatagtatgtaatacttttatttacataatttgattaccatcaaaatttctatcaatgttcacctaatatattgttttcttactatatgtttttttgtattttttcaattctaaatcatttcaattcaaaatcaaaataatttaatttaattcaaaaatttcaaaagcttaatccgtttagttagtcgatcttcgcacataatgacacattgcctccgtggcgaagcatttaaggcgaatgaaccccaatataccaaccgcgctgatagctggttggaatcccaataaaaacttttattttttatttttatacattttatgactgtaagtatatttattatataattttattttcagaaaatacgtatttagttaaaaaaaatttccgacaattaatgttcagaaataatttgtggcattattaatgtgtttgtgtgtgttttattcttttattattttaatttttggcactgttttaataaaaatgtttgagaagtagtaagtataaattagtttaatatttaaataaaatataaataaaaagtatattaatttcgtttaaatcatataatagaagtataagttcttacgtgcgtacaaagtacacacacattcttttttttaatttatttattgccattctatatttatctttatactagtaatagtcggtatgatgttcaagctgtttattgttgagtccatcaatatcctcaatagtgaaaaaagattaaacacttcaataaaataactttataaaattcgtccactggataatagccatttcctaattattaccactgacagtacgtattttatcaataatactacacatcgacgtacgtttcactttatgttttgatttaacttgtttaaaaatgaatcatgacgtatgggcaaagataaaatgaaaaaaatcatcttcctagtctcagcatccgtatggattgcaaattgtagaagcctcggaggtgtaaccagagaaggttcccattgttttcattctggtgggatgtagaatagcattatgttgttttatatgccattagagtgaaaacttagtatttttgctagcagttgccgctagggcatctatgccatttcgttcgttgcaatccgggactgcacgctggggtttgttttggttggatcagggagagcagcatatgtgcctcctgatgagagactaataagtttcgaaaccggtagaggtgcttgcagcactctctgattggactggaatatggttcggctgtattttcgttttgcaacgaaattgaaaatggttattcatttttgatttacaatatattctgtacatagaatgtacattgttatgcaaaatatcccgaccacctcgtaatttccagaacacaattattataaaataaattcacctacttagtttccaagtttccagtttttatttaattaaaaattgttatctgttggtgtaaaataaactgtagtgcacctattaattaaattaaaaacaaaattagaaatcctaagatagattaataatttttagaacgctgtgtgattatcgggggccagatttttttatgaaaaaaaggtaaaaacaaatcagtagttagcatcaaattttaatgaatgcatacagatttaaacataattttgagtcgtctttaacttataagatgtcttagttgcaaaacttagtggttactttggcaaaacactcctgtaaatgattttaatttaacgttttagaactgtgaattcaaatgacaaaatgaattgttttcctagagttgtcgtccatctttgaaattttgagcgccctctgttggaatttaattttgcgaatggtcaacgtgttcgacctaaccttacacatttttcttcccaacgtgttcccatgcacaagtttattgcacaagtatactggaacgggtgttgggtaatgctagcacaagtacgttaactgtacaagtggcaagagacttgtgaacattttgtaatttttacttgttaattttttacgcaagtgtaattgagagtgtgtgtgtgaaagacttgtacaaagtttaatacagttgagttttgaccattcgtgtagacatacgatactggatgcttcaactactgatgttcaagtttaaaatggcgcattgtgcatgcatacttgtacatgtgttgtcgacacatacagggtgttagcaaataagtatgaaaaactttaaagggcaattctacatgaaaaaataatgccggtttgctcgacaaacatatgtccgcaaatgattcgcttccgagatacggggtgttgaaatttttcatttaaaactgc

SEQ ID NO: 568 - DNA, 4713 bp, Diabrotica virgifera
  SmartBlast Evalue=1E-171; Info=Cytochrome P450 9Z4 n=1 Tax= Tribolium castaneum RepID=D6WWU4_TRICA
cagtgcatccttgaacgttgttggactgttatgtgattggtcacactattaattagtatcaaaaataaacttgtttataaaaatattattgatatgttaaccagtgttatgtggattgaatattaaataacaaggtattttttatgtaattggtatatcaagtaagacgtaggaatcaaaaatgttgcaattagtactagtcttggccgctttggctgtattgttctattattttgccgtcaaacccatgagttactggaaggaaaggggaataaaacagacgaaacctgtatggttgcttggcgatagttggggtactgttataaagaagcacagtttagtggattttgtccaatatatctacgaccaagttccgggtgtaagatattttggatgctaccagatggtaacacctactcttgtcatacgagacccagatcttatcaaaaatattgccgttaaagactttgaccactttatggaccacagacaaatgatcccagcaaatgccgaccctctattcggaaagaatctatttgcattaaaaggtcaagtatggcgtgacacgagaccgatccttagtccaaccttcaccagcagcaaaatgcgtgccatgttcgttctgatgtctgaatgtggtgagaacttcataaaatatttccagaacaataacaaagatatcatcgaaatggaaatgaaggatacttttagacgttttacgaacgatgttattgctacaacagcttttggcgttaaaacagattctttaaaggacagagataatgaattcttcactatgggaacgagagcagtagattttggattctggcgaagtcttaagttttttggctactttctgataccgaaaattttagcgtttttcaaagtttcaatatttggcaaagaattaagtgacttctttatagaactgattgataagacagttcgaactagagaagagagaggaattgttcgtcctgacatgatacacttactaatggaggctaaaaaaggagttcaacaaaaagatgagaaagttatagatactggatttgcagtagtagaagaagcggatttaggaaatgctaaaggtgccatagaaatcaccaacgtcgatatagctgcgcacgctatggtcttctttttcgctggttttgatgccgtatcttctttgatgtgctttacaacctacgaattagcagtaaaccctgatatccaaaatagattgagagaagaagtcgaagatacgctgagagaatgtaatggcaagctaacatatgaaggtttattgaaaatgaaatacttggatatggttgtttcagaaaccttacgaaaatggccaattggtgtaatggccgacagaatatgtaccaaaccttacaccatcccagctgcaacacccgaggaaaagccgcttgttcttgaaaagaacacagttcttctctttcccgtatgggcgatacatagagatccagcattctacgaaaacccagagaggttcgacccagaaagattcaacgacgaaaacaagtcaaaaatcaacccttacacgtatcttcccttcggcattggtcctaggaactgtataggatctcgatttgctctattggaagcaaaagtggtgttgttttatctcttgtccaattttatagtcgagccttccgcaagacttacagtaccactgaaaatttctaggaagcagatcaatgtgacagctgagggtggtttctggtttaacttgaagaagttgaagaattaaaacgtacctaccgactaccgaggtgtatatacctattattgttacatgatataaactgagttgcgtgttttaacaattaccaactcatctttgtgcggattactgcgtgtgaacaacaaaaacttcatttactaaaatttttacccgacatcactgcttttgaaataatcgaaggtactgatttctttttggctaggtactagttgttttaaatgcatatatttagtagttctcggacatgtatatgtacctatatgtataatactaattattattaataataagtctactaggtacgcttaatatatttttactttatatgtgctatatgtgtgctaagaatagctattgttgttattacgatgtttgaagttatacttctttaggcgcgattgagattgagggtgaatttatattgatctgcgcgcatgcgcacaccgacagtatggtattagtcgttatacgggctctgattgggtgttgaaatgatctgtcaataataaataattgttcaatatgaaggtaaacaaatgtataatatattagttttattgttgtgaggacagaaacaaaaaagtttataattgtagtgacatttaaatagtttttaaaagcaacaggtacgtaataattgtaaatgtatcataggtacctacctatttgaacctaccaaagtacatagtatgtaatacttttatttacataatttgattaccatcaaaatttctatcaatgttcacctaatatattgttttcttactatatgtttttttgtattttttcaattctaaatcatttcaattcaaaatcaaaataatttaatttaattcaaaaatttcaaaagcttaatccgtttagttagtcgatcttcgcacataatgacacattgcctccgtggcgaagcatttaaggcgaatgaaccccaatataccaaccgcgctgatagctggttggaatcccaataaaaacttttattttttatttttatacattttatgactgtaagtatatttattatataattttattttcagaaaatacgtatttagttaaaaaaaatttccgacaattaatgttcagaaataatttgtggcattattaatgtgtttgtgtgtgttttattcttttattattttaatttttggcactgttttaataaaaatgtttgagaagtagtaagtataaattagtttaatatttaaataaaatataaataaaaagtatattaatttcgtttaaatcatataatagaagtataagttcttacgtgcgtacaaagtacacacacattcttttttttaatttatttattgccattctatatttatctttatactagtaatagtcggtatgatgttcaagctgtttattgttgagtccatcaatatcctcaatagtgaaaaaagattaaacacttcaataaaataactttataaaattcgtccactggataatagccatttcctaattattaccactgacagtacgtattttatcaataatactacacatcgacgtacgtttcactttatgttttgatttaacttgtttaaaaatgaatcatgacgtatgggcaaagataaaatgaaaaaaatcatcttcctagtctcagcatccgtatggattgcaaattgtagaagcctcggaggtgtaaccagagaaggttcccattgttttcattctggtgggatgtagaatagcattatgttgttttatatgccattagagtgaaaacttagtatttttgctagcagttgccgctagggcatctatgccatttcgttcgttgcaatccgggactgcacgctggggtttgttttggttggatcagggagagcagcatatgtgcctcctgatgagagactaataagtttcgaaaccggtagaggtgcttgcagcactctctgattggactggaatatggttcggctgtattttcgttttgcaacgaaattgaaaatggttattcatttttgatttacaatatattctgtacatagaatgttccagaacacaattattataaaataaattcacctacttagtttccaagtttccagtttttatttaattaaaaattgttatctgttggtgtaaaataaactgtagtgcacctattaattaaattaaaaacaaaattagaaatcctaagatagattaataatttttagaacgctgtgtgattatcgggggccagatttttttatgaaaaaaaggtaaaaacaaatcagtagttagcatcaaattttaatgaatgcatacagatttaaacataattttgagtcgtctttaacttataagatgtcttagttgcaaaacttagtggttactttggcaaaacactcctgtaaatgattttaatttaacgttttagaactgtgaattcaaatgacaaaatgaattgttttcctagagttgtcgtccatctttgaaattttgagcgccctctgttggaatttaattttgcgaatggtcaacgtgttcgacctaaccttacacatttttcttcccaacgtgttcccatgcacaagtttattgcacaagtatactggaacgggtgttgggtaatgctagcacaagtacgttaactgtacaagtggcaagagacttgtgaacattttgtaatttttacttgttaattttttacgcaagtgtaattgagagtgtgtgtgtgaaagacttgtacaaagtttaatacagttgagttttgaccattcgtgtagacatacgatactggatgcttcaactactgatgttcaagtttaaaatggcgcattgtgcatgcatacttgtacatgtgttgtcgacacatacagggtgttagcaaataagtatgaaaaactttaaagggcaattctacatgaaaaaataatgccggtttgctcgacaaacatatgtccgcaaatgattcgcttccgagatacggggtgttgaaatttttcatttaaaactgc

SEQ ID NO: 569 - DNA, 4883 bp, Diabrotica virgifera
  SmartBlast Evalue=1E-171; Info=Cytochrome P450 9Z4 n=1 Tax= Tribolium castaneum RepID=D6WWU4_TRICA
cagtgcatccttgaacgttgttggactgttatgtgattggtcacactattaattagtatcaaaaataaacttgtttataaaaatattattgatatgttaaccagtgttatgtggattgaatattaaataacaaggtattttttatgtaattggtatatcaagtaagacgtaggaatcaaaaatgttgcaattagtactagtcttggccgctttggctgtattgttctattattttgccgtcaaacccatgagttactggaaggaaaggggaataaaacagacgaaacctgtatggttgcttggcgatagttggggtactgttataaagaagcacagtttagtggattttgtccaatatatctacgaccaagttccgggtgtaagatattttggatgctaccagatggtaacacctactcttgtcatacgagacccagatcttatcaaaaatattgccgttaaagactttgaccactttatggaccacagacaaatgatcccagcaaatgccgaccctctattcggaaagaatctatttgcattaaaaggtcaagtatggcgtgacacgagaccgatccttagtccaaccttcaccagcagcaaaatgcgtgccatgttcgttctgatgtctgaatgtggtgagaacttcataaaatatttccagaacaataacaaagatatcatcgaaatggaaatgaaggatacttttagacgttttacgaacgatgttattgctacaacagcttttggcgttaaaacagattctttaaaggacagagataatgaattcttcactatgggaacgagagcagtagattttggattctggcgaagtcttaagttttttggctactttctgataccgaaaattttagcgtttttcaaagtttcaatatttggcaaagaattaagtgacttctttatagaactgattgataagacagttcgaactagagaagagagaggaattgttcgtcctgacatgatacacttactaatggaggctaaaaaaggagttcaacaaaaagatgagaaagttatagatactggatttgcagtagtagaagaagcggatttaggaaatgctaaaggtgccatagaaatcaccaacgtcgatatagctgcgcacgctatggtcttctttttcgctggttttgatgccgtatcttctttgatgtgctttacaacctacgaattagcagtaaaccctgatatccaaaatagattgagagaagaagtcgaagatacgctgagagaatgtaatggcaagctaacatatgaaggtttattgaaaatgaaatacttggatatggttgtttcagaaaccttacgaaaatggccaattggtgtaatggccgacagaatatgtaccaaaccttacaccatcccagctgcaacacccgaggaaaagccgcttgttcttgaaaagaacacagttcttctctttcccgtatgggcgatacatagagatccagcattctacgaaaacccagagaggttcgacccagaaagattcaacgacgaaaacaagtcaaaaatcaacccttacacgtatcttcccttcggcattggtcctaggaactgtataggatctcgatttgctctattggaagcaaaagtggtgttgttttatctcttgtccaattttatagtcgagccttccgcaagacttacagtaccactgaaaatttctaggaagcagatcaatgtgacagctgagggtggtttctggtttaacttgaagaagttgaagaattaaaacgtacctaccgactaccgaggtgtatatacctattattgttacatgatataaactgagttgcgtgttttaacaattaccaactcatctttgtgcggattactgcgtgtgaacaacaaaaacttcatttactaaaatttttacccgacatcactgcttttgaaataatcgaaggtactgatttctttttggctaggtactagttgttttaaatgcatatatttagtagttctcggacatgtatatgtacctatatgtataatactaattattattaataataagtctactaggtacgcttaatatatttttactttatatgtgctatatgtgtgctaagaatagctattgttgttattacgatgtttgaagttatacttctttaggcgcgattgagattgagggtgaatttatattgatctgcgcgcatgcgcacaccgacagtatggtattagtcgttatacgggctctgattgggtgttgaaatgatctgtcaataataaataattgttcaatatgaaggtaaacaaatgtataatatattagttttattgttgtgaggacagaaacaaaaaagtttataattgtagtgacatttaaatagtttttaaaagcaacaggtacgtaataattgtaaatgtatcataggtacctacctatttgaacctaccaaagtacatagtatgtaatacttttatttacataatttgattaccatcaaaatttctatcaatgttcacctaatatattgttttcttactatatgtttttttgtattttttcaattctaaatcatttcaattcaaaatcaaaataatttaatttaattcaaaaatttcaaaagcttaatccgtttagttagtcgatcttcgcacataatgacacattgcctccgtggcgaagcatttaaggcgaatgaaccccaatataccaaccgcgctgatagctggttggaatcccaataaaaacttttattttttatttttatacattttatgactgtaagtatatttattatataattttattttcagaaaatacgtatttagttaaaaaaaatttccgacaattaatgttcagaaataatttgtggcattattaatgtgtttgtgtgtgttttattcttttattattttaatttttggcactgttttaataaaaatgtttgagaagtagtaagtataaattagtttaatatttaaataaaatataaataaaaagtatattaatttcgtttaaatcatataatagaagtataagttcttacgtgcgtacaaagtacacacacattcttttttttaatttatttattgccattctatatttatctttatactagtaatagtcggtatgatgttcaagctgtttattgttgagtccatcaatatcctcaatagtgaaaaaagattaaacacttcaataaaataactttataaaattcgtccactggataatagccatttcctaattattaccactgacagtacgtattttatcaataatactacacatcgacgtacgtttcactttatgttttgatttaacttgtttaaaaatgaatcatgacgtatgggcaaagataaaatggaaaaactatatcaagcataggcgaatgctgggtctattatacgccattctggaaattattgaaaaaaatcttaaactgactcaatttgaagtacaatacaggaagaaaatatccatatgagttaggtatttgaaactcttgtttattcggtttttacttcaatgttgttaacggttcttacgataatatcaatggcttctttcatttcttcttcggtgattattagaggtggtgaaaatcgtatgatatcttcgtgggtatgtttcgcaattaaaccgttttcttttaacttcaaacagacgtcccaggcatgtatacaatttctattaatatcgatagcgttcaataatcctttgcctctgacatccatcacaataggatttccattgttcagctttttccttaattccaccctgaaaatttcccctaatttaaaagcgttttcagctaaattttcatcttcgagaacttctagggctgttatagctacttttgacgctaagggattaccaccgaaggtagaaccatgggttcctggttcaatgactagcataatatcatcattagctaaacaggccgacactggataaaccccacctcccagcgcctttccaaggaccagaatatcgggcttaacattttcgtaatctacagccagtctttttccagttcttcctaaacctgtttggatttcatcggcaatccaaaggacgttgtatttggtgcacaactctctaacgcctttgaggtatccttcatctggaactttgataccagcttcaccttgaatgggttccaccatgtaagcacagactaagggatcttggagggatttctctaaagctttcaaatcgttgtaaggtacacagctgaatcccggtacaaatggtccatagtcctcaaagcataaaggatctgtcgatgaggaacatgcagctaatgatcgcccccaaaaattatccgcagcaaaaataatctttgcttgattcttggggatcttctttttcctgtagccccatttcctagctagtttacaagccgtatctcctgcctcaacacctgtattcataggcatcagtttgtcgtatccaaacagcttggtgattgcttcagcatattgtcccaactggtctgaaaagaaggctctggaggtgtggtgcaaaacagcactttgttcgtgcagcgcctttaatattttgggatgacaatgtccaaaattattggctgagtagccgcttaagaagtcgaaatattttttaccttctacgtcccaaacaaacacaccttgtcccttggtcaaagctactggtagtgggtgatagttatgagccgcatattttgcttccttgtcaaaaacttcctgtgaactgagtgaccttttttcgagtagttttatacaccgttcgagattttttgatagtctcgtagctcttctagacgagggtaacattgtttatcaaatataatgaaccaagctattacacaatttgcagccaactaagaagtcttgaagtaggtatttaccgtacgaatacc

SEQ ID NO: 570 - DNA, 4675 bp, Diabrotica virgifera
  SmartBlast Evalue=1E-171; Info=Cytochrome P450 9Z4 n=1 Tax= Tribolium castaneum RepID=D6WWU4_TRICA
cagtgcatccttgaacgttgttggactgttatgtgattggtcacactattaattagtatcaaaaataaacttgtttataaaaatattattgatatgttaaccagtgttatgtggattgaatattaaataacaaggaatcaaaaatgttgcaattagtactagtcttggccgctttggctgtattgttctattattttgccgtcaaacccatgagttactggaaggaaaggggaataaaacagacgaaacctgtatggttgcttggcgatagttggggtactgttataaagaagcacagtttagtggattttgtccaatatatctacgaccaagttccgggtgtaagatattttggatgctaccagatggtaacacctactcttgtcatacgagacccagatcttatcaaaaatattgccgttaaagactttgaccactttatggaccacagacaaatgatcccagcaaatgccgaccctctattcggaaagaatctatttgcattaaaaggtcaagtatggcgtgacacgagaccgatccttagtccaaccttcaccagcagcaaaatgcgtgccatgttcgttctgatgtctgaatgtggtgagaacttcataaaatatttccagaacaataacaaagatatcatcgaaatggaaatgaaggatacttttagacgttttacgaacgatgttattgctacaacagcttttggcgttaaaacagattctttaaaggacagagataatgaattcttcactatgggaacgagagcagtagattttggattctggcgaagtcttaagttttttggctactttctgataccgaaaattttagcgtttttcaaagtttcaatatttggcaaagaattaagtgacttctttatagaactgattgataagacagttcgaactagagaagagagaggaattgttcgtcctgacatgatacacttactaatggaggctaaaaaaggagttcaacaaaaagatgagaaagttatagatactggatttgcagtagtagaagaagcggatttaggaaatgctaaaggtgccatagaaatcaccaacgtcgatatagctgcgcacgctatggtcttctttttcgctggttttgatgccgtatcttctttgatgtgctttacaacctacgaattagcagtaaaccctgatatccaaaatagattgagagaagaagtcgaagatacgctgagagaatgtaatggcaagctaacatatgaaggtttattgaaaatgaaatacttggatatggttgtttcagaaaccttacgaaaatggccaattggtgtaatggccgacagaatatgtaccaaaccttacaccatcccagctgcaacacccgaggaaaagccgcttgttcttgaaaagaacacagttcttctctttcccgtatgggcgatacatagagatccagcattctacgaaaacccagagaggttcgacccagaaagattcaacgacgaaaacaagtcaaaaatcaacccttacacgtatcttcccttcggcattggtcctaggaactgtataggatctcgatttgctctattggaagcaaaagtggtgttgttttatctcttgtccaattttatagtcgagccttccgcaagacttacagtaccactgaaaatttctaggaagcagatcaatgtgacagctgagggtggtttctggtttaacttgaagaagttgaagaattaaaacgtacctaccgactaccgaggtgtatatacctattattgttacatgatataaactgagttgcgtgttttaacaattaccaactcatctttgtgcggattactgcgtgtgaacaacaaaaacttcatttactaaaatttttacccgacatcactgcttttgaaataatcgaaggtactgatttctttttggctaggtactagttgttttaaatgcatatatttagtagttctcggacatgtatatgtacctatatgtataatactaattattattaataataagtctactaggtacgcttaatatatttttactttatatgtgctatatgtgtgctaagaatagctattgttgttattacgatgtttgaagttatacttctttaggcgcgattgagattgagggtgaatttatattgatctgcgcgcatgcgcacaccgacagtatggtattagtcgttatacgggctctgattgggtgttgaaatgatctgtcaataataaataattgttcaatatgaaggtaaacaaatgtataatatattagttttattgttgtgaggacagaaacaaaaaagtttataattgtagtgacatttaaatagtttttaaaagcaacaggtacgtaataattgtaaatgtatcataggtacctacctatttgaacctaccaaagtacatagtatgtaatacttttatttacataatttgattaccatcaaaatttctatcaatgttcacctaatatattgttttcttactatatgtttttttgtattttttcaattctaaatcatttcaattcaaaatcaaaataatttaatttaattcaaaaatttcaaaagcttaatccgtttagttagtcgatcttcgcacataatgacacattgcctccgtggcgaagcatttaaggcgaatgaaccccaatataccaaccgcgctgatagctggttggaatcccaataaaaacttttattttttatttttatacattttatgactgtaagtatatttattatataattttattttcagaaaatacgtatttagttaaaaaaaatttccgacaattaatgttcagaaataatttgtggcattattaatgtgtttgtgtgtgttttattcttttattattttaatttttggcactgttttaataaaaatgtttgagaagtagtaagtataaattagtttaatatttaaataaaatataaataaaaagtatattaatttcgtttaaatcatataatagaagtataagttcttacgtgcgtacaaagtacacacacattcttttttttaatttatttattgccattctatatttatctttatactagtaatagtcggtatgatgttcaagctgtttattgttgagtccatcaatatcctcaatagtgaaaaaagattaaacacttcaataaaataactttataaaattcgtccactggataatagccatttcctaattattaccactgacagtacgtattttatcaataatactacacatcgacgtacgtttcactttatgttttgatttaacttgtttaaaaatgaatcatgacgtatgggcaaagataaaatgaaaaaaatcatcttcctagtctcagcatccgtatggattgcaaattgtagaagcctcggaggtgtaaccagagaaggttcccattgttttcattctggtgggatgtagaatagcattatgttgttttatatgccattagagtgaaaacttagtatttttgctagcagttgccgctagggcatctatgccatttcgttcgttgcaatccgggactgcacgctggggtttgttttggttggatcagggagagcagcatatgtgcctcctgatgagagactaataagtttcgaaaccggtagaggtgcttgcagcactctctgattggactggaatatggttcggctgtattttcgttttgcaacgaaattgaaaatggttattcatttttgatttacaatatattctgtacatagaatgttccagaacacaattattataaaataaattcacctacttagtttccaagtttccagtttttatttaattaaaaattgttatctgttggtgtaaaataaactgtagtgcacctattaattaaattaaaaacaaaattagaaatcctaagatagattaataatttttagaacgctgtgtgattatcgggggccagatttttttatgaaaaaaaggtaaaaacaaatcagtagttagcatcaaattttaatgaatgcatacagatttaaacataattttgagtcgtctttaacttataagatgtcttagttgcaaaacttagtggttactttggcaaaacactcctgtaaatgattttaatttaacgttttagaactgtgaattcaaatgacaaaatgaattgttttcctagagttgtcgtccatctttgaaattttgagcgccctctgttggaatttaattttgcgaatggtcaacgtgttcgacctaaccttacacatttttcttcccaacgtgttcccatgcacaagtttattgcacaagtatactggaacgggtgttgggtaatgctagcacaagtacgttaactgtacaagtggcaagagacttgtgaacattttgtaatttttacttgttaattttttacgcaagtgtaattgagagtgtgtgtgtgaaagacttgtacaaagtttaatacagttgagttttgaccattcgtgtagacatacgatactggatgcttcaactactgatgttcaagtttaaaatggcgcattgtgcatgcatacttgtacatgtgttgtcgacacatacagggtgttagcaaataagtatgaaaaactttaaagggcaattctacatgaaaaaataatgccggtttgctcgacaaacatatgtccgcaaatgattcgcttccgagatacggggtgttgaaatttttcatttaaaactgc

SEQ ID NO: 571 - DNA, 2779 bp, Diabrotica virgifera
  SmartBlast Evalue=1E-131; Info=Cytochrome b oxidase n=1 Tax= Priasilpha obscura RepID=B6D8Y1_9CUCU
gctatagatttagaatctttatatgtaattattttacaaataatacttgtttttaaatgatttaattttaataattatttctagtttaattttaattgtgtgtgtattggttagtattgcttttttaactttacttgaacgtaaagtattaggttatattcaaattcgtaaagggcctaataaagttggatttttgggtttaattcaaccttttagtgatgcaattaaattatttactaaagaacaaatttatccttttatatctaattttaatttatattatttttctccaattttaaatttatttttagctttatttttatgaatttgtataccttttattactataaatgtaacttttaatttaacattattattttttttatcagtttctagtttaagggtttatacaattatattggctggttgatcttctaattctaattatgctttattaggaaggttacgttctattgctcaaacaatttcttatgaagtaagattagctttaattttattatcttttttatttttaattatatctttgaatatattagattttattaaatatcaagaatatatttgatttttttatttattttttccattatgtttaatatgaattgtttctggattagcagaaacaaatcgtactccttttgattttgctgaaggtgaatcagagttagtttcaggttttaatgttgaatatagaagtggaggatttgcaataatttttttagctgaatatggaaatattttatttataagaataatatgtgtttttatatttttgggggctaatttaataagattaatatttttttttaagttaggattaattagatttttgtggttgtgagttcgtgggacattaccccgttatcgttatgataaattaatatatttagcatgaaaaggttatttacctatttcattaaattatttaatatttttttttagattgagtttatttttttttatctcaataatttagttaattaattttagtataagttaatagaaaattttatttcttttttatattttcaaaatatatacttatacaagttcattaactaattaaaaataattgaatctcatcattttcttattaatggatttattaaataatataaaaaatatacaatagttaaaatttgtccagttaaaatatatgggtcttcgactggtcgtgctccaattcatgttaataaaattacaatggatagtaatcttcaaaataatattttattgattggataaaattgagttcttaaatatttttttttattaataaagggtaaaatatataaaatagcaattgatattattaatgcaattactcctcctaatttatttggaattgagcgtaaaattgcatatgcaaataaaaaatatcattctggttgaatatgaactggtgtaactaaaggatttgcaggggtgaaattatcagggtctcctaataaatatgggtcttttaaagttaatgttgttaataataataataaaattaagaatccaaggatatctttaaaagtaaaataaggatgaaatggaattttatcaatatttctttttgttcccaaaggatttcttgatcctgtttgatgtaaaaataaaagatgaataattataaatgcaaaaataataaaaggtaaaataaaatgaaatgtaaagaatcgagttaaagttgcattatctactgcaaatcctcctcaaattcattggactaatatatttcctaaatatggaatagctgatattaagttagtaattactgttgctcctcaaaatgatatttgacctcatggtaatacatatcctagaaatgctgttgctattgtaagaaaaaaaattgttactccaattattcaagtttcaattatattataagatctataatatattcctcgaccaatatggatgtataaacaaataaaaaaaaatgatgctccatttgcatgtaatgttcgtagtaatcaaccataatttacatctcggcaaatatgagcaactctattaaatgctaattctacatttgggcagtaatgtatagctaaaaataggcctgtaataatttgaattcctaaacatagtcctaataatgatccaaaatttcatattgaagaaatattagagggggttggtaaaataattaatgaattattaataatttttaatagaggattaatttttcgtaaaggtattttcattaaaatttttgtcgtaatgggccatataaaaattttgtaattttcactactgcaattaaagtgataaataaataaataattattattattatgattaaattatttggaaaattaaaatatttaattaaagataatttattattaataatattaaattggttattcatttctataatttttataaaagaattaaaataaaaataatctaaaataaatcttaatatagaaataataataaaaattctaattattattaaagttatattaaaattaaatttaaatttttcatttgaagcaattctggttatataaataaaaagaattaatattcctcctactataattaaaaataaaatataagaaaatcagtaattataatttattaatcctgtaataactgatgtgaaaattgtttgtattaataatattaaaccacaagttaaagggtgatttaataatataaatataattgaacatataattattataataattaaagttagaatatcagatattagtttatataaaatattaattttggagattaatgaaataagttt

SEQ ID NO: 572 - DNA, 1175 bp, Diabrotica virgifera
  SmartBlast Evalue=1E-144; Info=Ubiquitin C variant (Fragment) n= 5 Tax=Eukaryota RepID=Q59EM9_HUMAN
caagacattgactggtaaaactatcacattagaagttgaaccatctgatactattgagaatgtgaaagccaagatccaagataaggaaggtatcccaccagaccagcaaagattgatatttgcaggaaacagctagaagatggtagaaccttgtctgactataacatccagaaagagtccactcttcacttggtacttgattgagaggaggtatgcagatcttcgtcaagacactaactggaaagactatcactttggaagtagaaccatctgataccattgaaaatgtgaaagccaagatccaagataaggaaggtatcccaccagatcagcaaagattgatctttgcaggtaaacaattggaagatggaagaaccttatctgattataacatccagaaagagtccactcttcatttggtacttagattgagaggaggtatgcagatcttcgtcaagacactaactggaaagaccatcactttggaagttgaaccatctgataccattgagaatgtcaaagctaaaatccaagataaggaaggtatcccaccagaccagcaaagattgatctttgcaggaaaacagctagaagatggtagaaccttgtctgactataacatccagaaagagtccactcttcacttggtactgagattgagaggaggtatgcagattttcgtcaagacattgactggtaaaaccatcacattagaagttgaaccatctgacactattgagaatgtaaaagcaaagatccaagacaaagaaggtatccccccagatcaacaacgtttaatatttgctggtaaacaattagaagatggaagaaccttgtcagattataacatccaaaaggaatctactctccacttggtactaaggttgagaggaggcaattaaaatacaaaacttttgtttatttctgacagtggtttttaaaaggctgattttttatttacacattgcttaaatattattaaaccaaaggaataaataaaatctttgtagtatttttgtgttttatttattatattcacaccattaaaataatacataatgtaacaatcgatctgtaatactaaatattttgaaaattttgtctttaaatcccaacaaaatgggatgaaacaatgtaacactattatttaatcaaatttatattgtacttttcaa

SEQ ID NO: 573 - DNA, 947 bp, Diabrotica virgifera
  SmartBlast Evalue=1E-100; Info=Ubiquitin C variant (Fragment) n= 5 Tax=Eukaryota RepID=Q59EM9_HUMAN
caagacattgactggtaaaactatcacattagaagttgaaccatctgatactattgagaatgtgaaagccaagatccaagataaggaaggtatcccaccagaccagcaaagattgatatttgcaggaaacagctagaagatggtagaaccttgtctgactataacatccagaaagagtccactcttcacttggtacttgattgagaggaggtatgcagatcttcgtcaagacactaactggaaagactatcactttggaagtagaaccatctgataccattgaaaatgtgaaagccaagatccaagataaggaaggtatcccaccagatcagcaaagattgatctttgcaggaaaacagctagaagatggtagaactttgtctgattataacatccagaaagagtccactcttcacttggtactgagattgagaggaggtatgcagattttcgtcaagacattgactggtaaaaccatcacattagaagttgaaccatctgacactattgagaatgtaaaagcaaagatccaagacaaagaaggtatccccccagatcaacaacgtttaatatttgctggtaaacaattagaagatggaagaaccttgtcagattataacatccaaaaggaatctactctccacttggtactaaggttgagaggaggcaattaaaatacaaaacttttgtttatttctgacagtggtttttaaaaggctgattttttatttacacattgcttaaatattattaaaccaaaggaataaataaaatctttgtagtatttttgtgttttatttattatattcacaccattaaaataatacataatgtaacaatcgatctgtaatactaaatattttgaaaattttgtctttaaatcccaacaaaatgggatgaaacaatgtaacactattatttaatcaaatttatattgtacttttcaa

SEQ ID NO: 574 - DNA, 947 bp, Diabrotica virgifera
  SmartBlast Evalue=1E-100; Info=Ubiquitin C variant (Fragment) n= 5 Tax=Eukaryota RepID=Q59EM9_HUMAN
caagacattgactggtaaaactatcacattagaagttgaaccatctgatactattgagaatgtgaaagccaagatccaagataaggaaggtatcccaccagaccagcaaagattgatatttgcaggaaacagctagaagatggtagaaccttgtctgactataacatccagaaagagtccactcttcacttggtacttgattgagaggaggtatgcagatcttcgtcaagacactaactggaaagactatcactttggaagtagaaccatctgataccattgaaaatgtgaaagccaagatccaagataaggaaggtatcccaccagatcagcaaagattgatctttgcaggtaaacaattggaagatggaagaaccttatctgactataacatccagaaagagtccactcttcacttggtactgagattgagaggaggtatgcagattttcgtcaagacattgactggtaaaaccatcacattagaagttgaaccatctgacactattgagaatgtaaaagcaaagatccaagacaaagaaggtatccccccagatcaacaacgtttaatatttgctggtaaacaattagaagatggaagaaccttgtcagattataacatccaaaaggaatctactctccacttggtactaaggttgagaggaggcaattaaaatacaaaacttttgtttatttctgacagtggtttttaaaaggctgattttttatttacacattgcttaaatattattaaaccaaaggaataaataaaatctttgtagtatttttgtgttttatttattatattcacaccattaaaataatacataatgtaacaatcgatctgtaatactaaatattttgaaaattttgtctttaaatcccaacaaaatgggatgaaacaatgtaacactattatttaatcaaatttatattgtacttttcaa

SEQ ID NO: 575 - DNA, 1860 bp, Diabrotica virgifera
  SmartBlast Evalue=1E-86; Info=Endonuclease-reverse transcriptase n=1 Tax=Bombyx mori RepID=D5LB38_BOMMO
aaaatatttattagttctctcaggattcgaaaaaatgaatgcgtttaaagattattggttcgaaattttgcgcctacgcacttttaacaactaaagatttattacaactaaaacaatagaaatgtatttgacagtcttgtagttattaaggtatcaaagttattatccataatacctgtgatgcgttcaacgttaatgcccgactaaataatttttataggcaaaaaatttgaaggatttttgagttaattagtaatatctagatattactagtttcaaataagtagatttttctacaaccactattccaaatgcatttttctgcacaattttatgttaacaaacttaatattttatcacagaataactgacagtagtgtgcagaaaagtgacgtttctgtgccggaaagttcttttctgcataacggtgaccatatgtacttatttaagtaggacagtacttatttttaaatattgtcctaatgtactttaaaacctttctaaggacacgcgaatgtacttatttttttctaagaaatgaatatttttatcttttactacttttaaacaaatttctttgtatatttttcttttgtatacatacatggtttccaatatttccattcttttgttgactcttctcccgacttcgttgtttgttacaggctcggtctatgctatgttcaggtacctttacccacagttcaaatgcttccaactttttagtagtcgacgcgttagttgaccatgcttctatcccgtaaagcagagtcgagaaaatataacaccttgccagcctaactctcaagtcttaattatttcagttctcttgcacaaactacctttcttattttattaaagttggttcttgccttctctatttgaactttgaattctttggagtaatcgtttgtgtgattaattattgtgccaagatagttgtagtcttcaacttgttctaaagttttacctttaattgtcaggctttaatcattattttgggtttttgatatcctcataaatttagttttcttgatgtttactgataatccatattgttctccatactcaactatcttgttcattagattttggaggtcttggaggttgtctgctattatgatagtgtcgtccgcatatctaatgttgttaattggcgttccatttaggtacctttattcctgctgtttctccctcaagaacttttttcataatttcttcagagtatgcatttaatagtagtagtgacaatacacacccctctcgcattactcttttaaattcgaactcttctgatgtgtgttcgttaatgcgtatgtgtacctgctgtttataatatagattttttataattcaaaggtcattgtattgtaataattgttttgctttgaggacgtccattagctctttgtggcggtctttatcgaaaggcttgttgtaatctatgaaacagacgtacattcctggttcacgtccaagcatctctggattagtacgttgaatgcaaagagagcctctacgaatccaaattggttttcttcaatatccatatcaagtgtttggtaaatgcgtttatgaatgatctttaaaaacattttaagtgtgtgagacatcaggcttatggtgcggtggtcggtgcattctctagcatttttcttttttgggagacaaataaatgttgaggtcaaccattcattgggtatgtcacccgacagataaatttcattaaagagctttaagaggacatctatgtactcattttctattattttaaggatatcaataggcagttgatctggccccgggctttttccgttgctggtgtttttagtgcatacaatatttcttcctttgtaattt

SEQ ID NO: 576 - DNA, 1876 bp, Diabrotica virgifera
  SmartBlast Evalue=6E-75; Info=Endonuclease-reverse transcriptase n=1 Tax=Bombyx mori RepID=D5LB38_BOMMO
aaaatatttattagttctctcaggattcgaaaaaatgaatgcgtttaaagattattggttcgaaattttgcgcctacgcacttttaacaactaaagatttattacaactaaaacaatagaaatgtatttgacagtcttgtagttattaaggtatcaaagttattatccataatacctgtgatgcgttcaacgttaatgcccgactaaataatttttataggcaaaaaatttgaaggatttttgagttaattagtaatatctagatattactagtttcaaataagtagatttttctacaaccactattccaaatgcatttttctgcacaattttatgttaacaaacttaatattttatcacagaataactgacagtagtgtgcagaaaagtgacgtttctgtgccggaaagttcttttctgcataacggtgaccatatgtacttatttaagtaggacagtacttatttttaaatattgtcctaatgtactttaaaacctttctaaggacacgcgaatgtacttatttttttctaagaaatgaatatttttatcttttactacttttaaacaaatttctttgtatatttttcttttgtatacatacatggtttccaatatttccattcttttgttgactcttctcccgacttcgttgtttgttacaggctcggtctatgctatgttcaggtacctttacccacagttcaaatgcttccaactttttagtagtcgacgcgttagttgaccatgcttctatcccgtaaagcagagtcgagaaaatataacaccttgccagcctaactctcaagtcttaattatttcagttctcttgcacaaactacctttcttattttattaaagttggttcttgccttctctatttgaactttgaattctttggagtaatcgtttgtgtgattaattattgtgccaagatagttgtagtcttcaacttgttctaaagttttacctttaattgtcaggctttaatcattattttgggtttttgatatcctcataaatttagttttcttgatgtttactgataatccatattgttctccatactcaactatcttgttcattagattttggaggtcttggaggttgtctgctattatgatagtgtcgtccgcatatctaatgttgttaattggcgttccatttaggtacctttattcctgctgtttctccctcaagaacttttttcataatttcttcagagtatgcatttaatagtagtagtgacaatacacacccctctcgcattactcttttaaattcgaactcttctgatgtgtgttcgttaatgcgtatgtgtacctgctgtttataatatagattttttataattcaaaggtcattgtattgtaataattgttttgctttgaggacgtccattagctctttgtggcggtctttatcgaaaggcttgttgtaatctatgaaacagacgtacattcctggttcacgtccaagcatctctggattagtacgttgaatgcaaagagagcctctacgaatccaaattggttttcttcaatatccatatcaagtgtttggtaaatgcgtttatgaatgatctttaaaaacattttaagtgtgtgagacatcaggcttatggtgcggtggtcggtgcattctctagcatttttcttttttgggagacaaataaatgttgaggtcaaccattcattgggtatgtcacccgacagataaattgattaaagagctttaagaggacatcaaagttcctaacccatgttagacagaagtgcagcgcggggcggaaaatagtagtccaaacgaaacgtttgttgtagacgcacaagacttccaccacttttgcaataagccctcacagcaaatgcgcgtc

SEQ ID NO: 577 - DNA, 791 bp, Diabrotica virgifera
tttttatgttaatctttttttatttttttgcaaaaggtcataacatcttctaataatttaggcagcagcacatgtagcaatttcacccaaaagttttccagtgttagcatagaaggcgggtacttgatcgtggatgcactttttgcctgctgtatgaagggctttaccggcatcaatgacgggttggatatcacctttcacagcatcgggaatctgaaggtcaactttgagaatatccatggcgacctgaaaaacgcagagcaaaccagctgcattatctccttcacaattgtcaatttcttcggcggcgtctcttgcttgcttatggatttcagttagatctttgagcaaaggtgcgccagtgttaaccaaagcgacgacgctatcttttacgcatttgccggcaccttcgacgagagcgacgcggatattgacgagatcagcttcgtgttgttcgacacaggaaaccaatttctttccagcatcattactttgttcagcaactttatctataacaactttaagtgcttgagcgattttagtaagcacggtccttgtaacatctagcactttagtaaggcggtcgtcatacttgtcagggaaagtgtcgatgaaattgggaccttcagtaaaaaccttttccattatgtcttcaagcttgtgcacgacctttttgatgatgtcgacaacacctccgtcagctgattgggttggtaaagcagctgctgaagccaaaatgatggcgcagaagaagaggacgatttttgccattttggttcgattgttcgtct

SEQ ID NO: 578 - DNA, 788 bp, Diabrotica virgifera
tttttatgttaatctttttttatttttttgcaaaaggtcataacatcttctaataatttaggcagcagcacatgtagcaatttcacccaaaagttttccagtgttagcatagaaggcgggtacttgatcgtggatgcactttttgcctgctgtatgaagggctttaccggcatcaatgacgggttggatatcacctttcacagcatcgggaatctgaaggtcaactttgagaatatccatggcgacctgaaaaacgcagagcaaaccagctgcattatctccttcacaattgtcaatttcttcggcggcgtctcttgcttgcttatggatttcagttagatctttgagcaaaggtgcgccagtgttaaccaaagcgacgacgctatcttttacgcatttgccggcaccttcgacgagagcgacgcggatattgacgagatcagcttcgtgttgttcgacacaggaaaccaatttctttccagcatcattactttgttcagcaactttatctataacaactttaagtgcttgagcgattttagtaagcacggtccttgtaacatctagcactttagtaaggcggtcgtcatacttgtcagggaaagtgtcgatgaaattgggaccttcagtaaaaaccttttccattatgtcttcaagcttgtgcacgacctttttgatgatgtcgacaacacctccgtcagctgattgggttggtaaagcagctgctgaagccaaaatgatggcgcagaagaagaggacgatttttgccattttggttcgatgtcgct

SEQ ID NO: 579 - DNA, 1251 bp, Diabrotica virgifera
gagtgaattttgacaaactttcggtcataacttgccaaaacgagtcaattgatatatcacatgtactatttctgcgactataatgtgccatttccggttacaactttttaagcagaagtacatatttgttctcgtcttgcaaaggcgtgtcgactaatatattgcttgtactatttcggcgtcctaaaacagtacttcccattgcaagtctggaaccagaagtcctaggttaaatttcttatctttactaccatatttgggtcatacactctcattcaacaactcaatttgtcattcgatctgttctaataacggaggaattgtatttaccgagggatagacaaacattgttaattcaaggttttctcattttaatgttgacccctatttgcagaccagtgttgccaatcgcatttctctagattatccgatgatcgctcgaaaaatatccgatttgtcacgaaaaggtacgctaggtcaaaaattattctgttattaaaatcaatgttgccaatgttattcttttagtccccttaacaaccatcaaataacaaaatccgttggacgccaatcagttgattgtaatcaattatcattatgataattaacataattgattgattaattaattattaattatcaattaacgtaacaattattaacataattgattaattaatcaattaatctcataattgtaatcaattaggttttcagcaacccaatcaaagttgacattgacagtaattaaatatttgataatgatcagtttattccatttctcattagcgttcgaacaaccggccctttaatctactggattctctatttcacagtttaaaaattttcgtttatagatgaaaatctcgtatcctagctgattattacctaaaattgtaattcatgtatgtaaatactatttactcactattattatattattcgtattttgtattatcgtaagtgttaaattctaaataaataaataaatctaaatatttcattatttggatcgttatattaatttattataattatttaagtaaaaagaaacacttttaaatattattttattaaaacgtattaactatctaaaactaggtactggaaaaataaataataaataaatcaatacaaaataaactacagctacattaatagcataagcgcaaaatttctggtcaatgcttttaaaatgcattatttttatcgagtcctgagttacttaagcactgcactacataaaatgaa

SEQ ID NO: 580 - DNA, 556 bp, Diabrotica virgifera
  SmartBlast Evalue=2E-44; Info=Endonuclease-reverse transcriptase n=1 Tax=Bombyx mori RepID=D5LB38_BOMMO
gcctgctgtttatacttaatatagatttgttataattcaaaagtcattgtattgtaattgttttgctttgaggacgtccattagctctttgtggcggactttatcgaaaagcctttaatctatgaaacagacgtacatatcctggttcacatccaagcatctctggattagtacgttgaatgcaaagagagcttcacgggtacctacgcctctacggaatccaaattgggtttcttcaatatccatatcaagtgtttggtaaatgcgtttatgaatgatctttaaaaacattttaagtgtgtgagacatcaggcttatggtgcggtggtcggtgcattctctagcatttttcttttttgggagacaaataaatgttgaggtcaaccattcattgggtatgtcacccgacagataaatttcattaaagagctttaagaggacatctatgtactcattttctattattttaaggatatcaataggcagttgatctggccccgggctttttccgttgctggtgtttttagtgcatacaatatttcttcctttgtaattt

SEQ ID NO: 581 - DNA, 572 bp, Diabrotica virgifera
  SmartBlast Evalue=2E-32; Info=Endonuclease-reverse transcriptase n=1 Tax=Bombyx mori RepID=D5LB38_BOMMO
gcctgctgtttatacttaatatagatttgttataattcaaaagtcattgtattgtaattgttttgctttgaggacgtccattagctctttgtggcggactttatcgaaaagcctttaatctatgaaacagacgtacatatcctggttcacatccaagcatctctggattagtacgttgaatgcaaagagagcttcacgggtacctacgcctctacggaatccaaattgggtttcttcaatatccatatcaagtgtttggtaaatgcgtttatgaatgatctttaaaaacattttaagtgtgtgagacatcaggcttatggtgcggtggtcggtgcattctctagcatttttcttttttgggagacaaataaatgttgaggtcaaccattcattgggtatgtcacccgacagataaattgattaaagagctttaagaggacatcaaagttcctaacccatgttagacagaagtgcagcgcggggcggaaaatagtagtccaaacgaaacgtttgttgtagacgcacaagacttccaccacttttgcaataagccctcacagcaaatgcgcgtc

SEQ ID NO: 582 - DNA, 1805 bp, Diabrotica virgifera
tttacatccaagcatctctggattagtagtgtaaatccaaagtgggttccttcaatatccatatcaagtgtttggcaaatgcgtttatgaatgatctttaaaaacattttaagtgtgtgagacatttttacacaaaacgtgtaacctacttagaaaactggagtacaaattttcatgaatttaaactattgaaaagcatagatctaaagcgggttccacactctcggcgaagttacttcgccaaagttgaccgaagttcaaagtaccctctctacacactcgttctacttcgcgagggagtgcgataccgacaaagagcggtgcaataccgacaaagatccctttgaccagaccgacagagaatggaagtagaacgaagtgaggcaaagttatacaaggtggccgtctacactctcgtacttgttgaacctcgatcgacttcggcgagaatgtggagctcgcataagaagtgaaataacatggaacgatatttgttattctctcgaagattttaaattgtatatcaaggcaaccatgttaaacgaagatcaactctttgacgaactggaaattttgaaagacgtggctacaattaaaaaaattgctgagtggaacagagaagaaaaaatagtcagcatcgatggcttaaagtttttaagtgtgtagatcaattcaaactgaaaaacttaaaaatattatgcgaagttattttttgtcttccgggtactagtgcggctatcgagcgtttattgtctgtaataaataatcattattggacgtcggaaaagtcacaaatgtccatatccactctcaaggcagcgatgctggtgtacgcaaattttgatgagccttgtatgaaatgtttcatttacttcagtcgaagccggaccttcttaaattaattttaagttcagaaaaatatgaatgatgcaaaaaaccggaagaagatgaggctattccaggtccctcatctaaaagctcttaattacaggcttgtaactttttcaaagttaatgtaatgtgttatgtttagtttaattgataaaaatttttatgtttagctacatagtttatttatttttaatgccaaaaagttatatttctccaataacaagataactacattttgcgtttttaatacatttttgttttttgtacttttttttctttaaaaagatatggtcaccgtaatagtaccattacattcctcaaaaaaatcataaatataattaggtaagtataacatgttttgatgaaatggttttgtttaagatagtagatttgatagaactttacaaaaaagaactagatttaactacatctcatgtccgagaaatctggaaacgtttacttaagcactgcactacataaaatgaaaataaaactaaatcgtgcgggaattagctttcataagtttaaagactaaaaactaaaaactcataaatatcatcggacggcagacggtttttgaaatttgaattggattagtatgccttaagtggacgcacttgtgcatttaaattctaaacaaaaaaatgggcacatgtcccttttgtcaaaagatgaaaagtatcggatgtcactaacattcatccagtatagggtatttataaaaatttgggtggaaccaaacaaaattaatgtgttgttagtgttgggaatatatggatgagaaagttttagtcgatggtagatacactgaaaaatatccgcaaatatccgatttatttaaagatacgaagaagatacgacaactctcaaaaaggtacgcaaatcggataattatccgccgattggcaacactg

SEQ ID NO: 583 - DNA, 2510 bp, Diabrotica virgifera
  SmartBlast Evalue=0; Info=Endonuclease-reverse transcriptase n= 1 Tax=Bombyx mori RepID=D5LB38_BOMMO
agcgaactccaaaaaacattacatctcacagcatctagagacataacagtgatcatgggtgatttaacgcaaaaattggagaaggaaaatgctaccctaatgtatgacccatatgggcttggcgaacgaaacgacagaggggatcgcctaatagaattttgccaggagcataatgttagtagtcgcaaatacattctttaaattacctaagcgacgcctttatacatggaaatcccagctgacaaagacaacaaaatcgtcagaaatcaaattgactacatcctaataaagcacagatatcgaaactcaattcaggcagtaaaggcatatccaggagcagacgtatcttctgatcacagtcttcttattgctaggtttcaacttcaactaaaaaagacgcaaaaaagccgcaacaacaataaacttaacatacagaaactaaagtcagaagaaacaaaagaaaatctgaaacacgaaatcaacacaaatctagacagaaacccaggaaataattgcaacgtagaacagcagtggcaattcttcaaaacctctatattagaaccaagtaagaaagtacttactacaaccaaatgtaagaaagaagaatggatgacggaggaaattctagagttgatgaatgaaagaagaaaaacaaaaccattaataagacccgctataaacagcttcaaaaccaaataagaagaaaaattagggaggctaaagaaacctacttctctgaaaaatgtaaagaaatagaagaacttcaaaacacatatgcaacttcaacctacataaaaaagtcaaagaactagccggaataggaaatagaagaacctcaaatatattgctcgacaaaaacggaaatattataatggagacagaacgaaaactacgacgatggaaagagtacatcgaggaactatttcatgaccagagagaagctagtacatccgtagatagccaaaccggagatgtaggcccagagataaccaaatcagaggttagtcaggcaataaactctatgaaaaccaataaatctgctggtccagatgaattacctagcgagctgataaagttggtcaacgagaaaaacctggacataatagtagaactgttcaacgctatctatactacgggaatcatccctagagaaatgttgacatcagcatttgtgtgtttgccaaagaaagtgaatgccaaagaatgcagtgactaccgaaccataagcttaatgtcacataccttgaaaattctgctgaaaattatccacgccagaatacactctaaactggagctggatattagtgacactcaatatgggttccgcaatggtatgggtaccagagaggcattattctccttcaacgtgctgacacagagatgtttggatgttaaccgtcctctttacgtctgttttatagactacaataaagcgtttgataaagtaaaacatgatcgactcatggaaattctaaaaaataaaaacctagatgaaagagatttaagactaataacacacctctattacaatcagcgagcaatagtaagaattgaaaaagaaacatctgaagaaatggaaataaagagaggagtcaggcaaggctgcatactatcacctctattatttaacgcttattctgaagaggtaatgcgagaaactctggaagatgaaacagtcggcataagagtaaatggagtcttagttaacaacatcagatatgcagatgatacagtaataatagccgatagtttacaagacctgcaaagactcatgagtaaaatagtaaggtgtagtagggagtacggactctctctcaatatcaaaaagacgaagtttatgaaaattagtaaaaacaaccataatactaacgaaatcttgatagtagagggccagcagatcgaaagagtaaaaaagtacacttacctaggaacacttataacagaaaataatgactacactgcagaaatcaaagtcagaatcgaaaaagcacgttctaattttataaaaatgaaaaaggtcctatgtagcaaagatttaacattagctcttaaagtacgcctaacaaaatgttacgtctacagtgtactatactatggagtggaatcatggacgttaaatgtagagacaatgagacgacttaacgcctttgaaatgtggacctatagaagaattatgagggtttcctgggtagatagagttacgaacaatgaaagtactgagaagaataggtaaagaaaaggaagttgaacttacaattaaagaaagaaagctacagtatctcggacatgtgatgcggggcgagaagtatggcatcctacgactcataatgcagggaaagatagatggcagaagaagcatcggaagaagacgaatttcatggttgaagaacctgagagagtggtttggatgcagctcgaaacaactatttagagctactgcctcaaaaattaaaatagctatgatgattgccaacctccgtagcggagatggcacctgaagaagaagaata

SEQ ID NO: 584 - DNA, 2364 bp, Diabrotica virgifera
  SmartBlast Evalue=8E-59; Info=Reverse transcriptase n=1 Tax= Anopheles gambiae RepID=Q76IN5_ANOGA
ctcagaaaatcattctaaaaccatggtataactcaacatctacaatgagtagaagccacctgacaaccataataaggatgacaatgatagagtgcttaacagcataacacgaattcaatattaatgtggcaaataatcattgattttggaacttcaacaacaacaaatgactaataatctatggcgggagttaaaaataagttttctttgcaggtctatatagctaggcacctctattacaatcagcgagcaatatgtagtaagaattgaaaaagaaacatccgaagaaatggaaataaagagaggagtcaggcaaggctgcatactatcacctctattatttaatgcttattctgaaaaggtaattcgagaaactttggaagatgaaacagtcggcataagagtaaatggagtcttagttaacaatatcagatatgcagatgatacagtaataatagccgatagtttacaagacctggaaaggctcatgagtaaaatagtaaggtgtagtagggagtacggactctctctcaatatcaaaaagacgaagtttatgaaaattagtaaaaacaaccataatacaaacgaaattttaatagtagagggccagcagatcgaaagagtaaaaaagtatacttacctaggaacacttataacagaaaataataactacactgcagaaatcaaagtcagaataggaaaaagcatgttctaattttatgaaaataaaaaaggtcctatgtagcaaatatttaacattagctcttaaagtacgcccaacaaaatgttatgtatacagtgtactatactgtggagtggaatcatggacgttaaatctagagacttaacgcctttgaaatgtggacctatagaaaaattatgagggtttcctgggtagatagagttacaaacaatgaagtactgagaagaataggtaaagaaaaggaagttgaacttacaattaaagaaagaaagctacagtatctcggacatgtgatgcggggcgagaagtatggcatcctgcgactcataatgcaaggaaagatagatggcagaagaagcatcggaagaagacgaatttcatggctgaagaacctaagagaatggtttggatgcagctcaaaacaactataataataataataataataataataataatacgaacacacctcacaaaggcacaaaaacaccaccctaaaagtgcagtagaacgaacgacattaccccggtatttaggaggaagaggacttatggatataggtgagcaattagataaacaaattgctaatttaagaacttattttcagatgcaggctgagacatctactctacatcgcgctatctgcgcagtagatgacacaacaccgatcaaactgagggaaccagaaatgcgcataaaccaccttactaaggacgaaaaagtgcgcacctggatgggtaaacctctgcacgggcgacatcccaatgaggtcagccaagattatgtcgacaatatagcgtcgaactactggttgacatcaggaaagatgttccctgaaacggagggttcattactggccattcaggatcaggttataccaaccagaaattacctgaaatatatcatcaaagaccctcaggttcaaaacgacagatgccgatatggatgtcaagcccaagaaaccatccaacatcttacagggggctgccaggcatttgctgcaactgaatacaaggaacggcatgacgcagtgggaaaaatccttcatcaagagatagctatcaagctgggacttctccaaacggaccatctcccatattatcaatacgtccctgagagtatgcttgaggatggcaactacaagctatactgggaccgcactgtgctcacagaccaaacagtggcacataatagaccagatctcgtactagttaataaattaacaagacaaacaacactaattgatgtggcgatacctaacaacaataatctacgtagtaaatttactgaaaagatcgccaaatacagagatctagaaattcaaatacgaaggcaatggagaatgcaaagtacccagacgataccgattattatttctactactggagtcattccgaagaccctcctcgaaagcataaaaaagctgggtctgaatgaacatctttataagaccatgcagaaagctgtactactcgcgacggccagatgcgtacgaaaatttctgggagatacacctgcattccaagtcacctagggctcgataacacggaaagagtcccaccagagctcaatccttttgataccgtaggtatctgggatgagtcaattttccccttagagggagtgtgagccgtatggctaaatctggataataataataa

SEQ ID NO: 585 - DNA, 2364 bp, Diabrotica virgifera
  SmartBlast Evalue=3E-58; Info=Reverse transcriptase n=1 Tax= Anopheles gambiae RepID=Q76IN5_ANOGA
ctcagaaaatcattctaaaaccatggtataactcaacatctacaatgagtagaagccacctgacaaccataataaggatgacaatgatagagtgcttaacagcataacacgaattcaatattaatgtggcaaataatcattgattttggaacttcaacaacaacaaatgactaataatctatggcgggagttaaaaataagttttctttgcaggtctatatagctaggcacctctattacaatcagcgagcaatatgtagtaagaattgaaaaagaaacatccgaagaaatggaaataaagagaggagtcaggcaaggctgcatactatcacctctattatttaatgcttattctgaaaaggtaattcgagaaactttggaagatgaaacagtcggcataagagtaaatggagtcttagttaacaatatcagatatgcagatgatacagtaataatagccgatagtttacaagacctggaaaggctcatgagtaaaatagtaaggtgtagtagggagtacggactctctctcaatatcaaaaagacgaagtttatgaaaattagtaaaaacaaccataatacaaacgaaattttaatagtagagggccagcagatcgaaagagtaaaaaagtatacttacctaggaacacttataacagaaaataataactacactgcagaaatcaaagtcagaataggaaaaagcatgttctaattttatgaaaataaaaaaggtcctatgtagcaaatatttaacattagctcttaaagtacgcccaacaaaatgttatgtatacagtgtactatactgtggagtggaatcatggacgttaaatctagagacttaacgcctttgaaatgtggacctatagaaaaattatgagggtttcctgggtagatagagttacaaacaatgaagtactgagaagaataggtaaagaaaaggaagttgaacttacaattaaagaaagaaagctacagtatctcggacatgtgatgcggggcgagaagtatggcatcctgcgactcataatgcaaggaaagatagatggcagaagaagcatcggaagaagacgaatttcatggctgaagaacctaagagaatggtttggatgcagctcaaaacaactataataataataataataataataataataatacgaacacacctcacaaaggcacaaaaacaccaccctaaaagtgcagtagaacgaacgacattaccccggtatttaggaggaagaggacttatggatataggtgagcaattagataaacaaattgctaatttaagaacttattttcagatgcaggctgagacatctactctacatcgcgctatctgcgcagtagatgacacaacaccgatcaaactgagggaaccagaaatgcgcataaaccacctcactaaagacgaaaaagtgcgcgcctggatgggtaaacctctgcacgggcgacatcccaatgaggtcagccaagattatgtcgacaatatagcgtcgaactactggttgacatcaggaaagatgttccctgaaacggagggttcattactggccattcaggatcaggttataccaaccagaaattacctgaaatatatcatcaaagaccctcaggttcaaaacgacagatgccgatatggatgtcaagcccaagaaaccatccaacatcttacagggggctgccaggcatttgctgcaactgaatacaaggaacggcatgacgcagtgggaaaaatccttcatcaagagatagctatcaagctgggacttctccaaacggaccatctcccatattatcaatacgtccctgagagtatgcttgaggatggcaactacaagctatactgggaccgcactgtgctcacagaccaaacagtggcacataatagaccagatctcgtactagttaataaattaacaagacaaacaacactaattgatgtggcgatacctaacaacaataatctacgtagtaaatttactgaaaagatcgccaaatacagagatctagaaattcaaatacgaaggcaatggagaatgcaaagtacccagacgataccgattattatttctactactggagtcattccgaagaccctcctcgaaagcataaaaaagctgggtctgaatgaacatctttataagaccatgcagaaagctgtactactcgcgacggccagatgcgtacgaaaatttctgggagatacacctgcattccaagtcacctagggctcgataacacggaaagagtcccaccagagctcaatccttttgataccgtaggtatctgggatgagtcaattttccccttagagggagtgtgagccgtatggctaaatctggataataataataa

SEQ ID NO: 586 - DNA, 2364 bp, Diabrotica virgifera
  SmartBlast Evalue=1E-58; Info=Reverse transcriptase n=1 Tax= Anopheles gambiae RepID=Q76IN5_ANOGA
ctcagaaaatcattctaaaaccatggtataactcaacatctacaatgagtagaagccacctgacaaccataataaggatgacaatgatagagtgcttaacagcataacacgaattcaatattaatgtggcaaataatcattgattttggaacttcaacaacaacaaatgactaataatctatggcgggagttaaaaataagttttctttgcaggtctatatagctaggcacctctattacaatcagcgagcaatatgtagtaagaattgaaaaagaaacatccgaagaaatggaaataaagagaggagtcaggcaaggctgcatactatcacctctattatttaatgcttattctgaaaaggtaattcgagaaactttggaagatgaaacagtcggcataagagtaaatggagtcttagttaacaatatcagatatgcagatgatacagtaataatagccgatagtttacaagacctggaaaggctcatgagtaaaatagtaaggtgtagtagggagtacggactctctctcaatatcaaaaagacgaagtttatgaaaattagtaaaaacaaccataatacaaacgaaattttaatagtagagggccagcagatcgaaagagtaaaaaagtatacttacctaggaacacttataacagaaaataataactacactgcagaaatcaaagtcagaataggaaaaagcatgttctaattttatgaaaataaaaaaggtcctatgtagcaaatatttaacattagctcttaaagtacgcccaacaaaatgttatgtatacagtgtactatactgtggagtggaatcatggacgttaaatctagagacttaacgcctttgaaatgtggacctatagaaaaattatgagggtttcctgggtagatagagttacaaacaatgaagtactgagaagaataggtaaagaaaaggaagttgaacttacaattaaagaaagaaagctacagtatctcggacatgtgatgcggggcgagaagtatggcatcctgcgactcataatgcaaggaaagatagatggcagaagaagcatcggaagaagacgaatttcatggctgaagaacctaagagaatggtttggatgcagctcaaaacaactataataataataataataataataataataatacgaacacacctcacaaaggcacaaaaacaccaccctaaaagtgcagtagaacgaacgacattaccccggtatttaggaggaagaggacttatggatataggtgagcaattagataaacaaattgctaatttaagaacttattttcagatgcaggctgagacatctactctacatcgcgctatctgcgcagtagatgacacaacaccgatcaaactgagggaaccagaaatgcgcataaaccacctcactaaagacgaaaaactgcgcacctggatgggtaaacctctacacgggcgacatcccaatgaggtcagccaagattatgtcgacaatatagcgtcgaactactggttgacatcaggaaagatgttccctgaaacggagggttcattactggccattcaggatcaggttataccaaccagaaattacctgaaatatatcatcaaagaccctcaggttcaaaacgacagatgccgatatggatgtcaagcccaagaaaccatccaacatcttacagggggctgccaggcatttgctgcaactgaatacaaggaacggcatgacgcagtgggaaaaatccttcatcaagagatagctatcaagctgggacttctccaaacggaccatctcccatattatcaatacgtccctgagagtatgcttgaggatggcaactacaagctatactgggaccgcactgtgctcacagaccaaacagtggcacataatagaccagatctcgtactagttaataaattaacaagacaaacaacactaattgatgtggcgatacctaacaacaataatctacgtagtaaatttactgaaaagatcgccaaatacagagatctagaaattcaaatacgaaggcaatggagaatgcaaagtacccagacgataccgattattatttctactactggagtcattccgaagaccctcctcgaaagcataaaaaagctgggtctgaatgaacatctttataagaccatgcagaaagctgtactactcgcgacggccagatgcgtacgaaaatttctgggagatacacctgcattccaagtcacctagggctcgataacacggaaagagtcccaccagagctcaatccttttgataccgtaggtatctgggatgagtcaattttccccttagagggagtgtgagccgtatggctaaatctggataataataataa

SEQ ID NO: 587 - DNA, 2162 bp, Diabrotica virgifera
  SmartBlast Evalue=8E-60; Info=Reverse transcriptase n=1 Tax= Anopheles gambiae RepID=Q76IN5_ANOGA
ctcagaaaatcattctaaaaccatggtataactcaacatctacaatgagtagaagccacctgacaaccataataaggatgacaatgatagagtgcttaacagcataacacgaattcaatattaatgtggcaaataatcattgattttggaacttcaacaacaacaaatgactaataatctatggcgggagttaaaaataagttttctttgcaggtctatatagctaggcacctctattacaatcagcgagcaatatgtagtaagaattgaaaaagaaacatccgaagaaatggaaataaagagaggagtcaggcaaggctgcatactatcacctctattatttaatgcttattctgaaaaggtaattcgagaaactttggaagatgaaacagtcggcataagagtaaatggagtcttagttaacaatatcagatatgcagatgatacagtaataatagccgatagtttacaagacctggaaaggctcatgagtaaaatagtaaggtgtagtagggagtacggactctctctcaatatcaaaaagacgaagtttatgaaaattagtaaaaacaaccataatacaaacgaaattttaatagtagagggccagcagatcgaaagagtaaaaaagtatacttacctaggaacacttataacagaaaataataactacactgcagaaatcaaagtcagaataggaaaaagcatgttctaattttatgaaaataaaaaaggtcctatgtagcaaatatttaacattagctcttaaagtacgcccaacaaaatgttatgtatacagtgtactatactgtggagtggaatcatggacgttaaatctagagacttaacgcctttgaaatgtggacctatagaaaaattatgagggtttcctgggtagatagagttacaaacaatgaagtactgagaagaataggtaaagaaaaggaagttgaacttacaattaaagaaagaaagctacagtatctcggacatgtgatgcggggcgagaagtatggcatcctgcgactcataatgcaaggaaagatagatggcagaagaagcatcggaagaagacgaatttcatggctgaagaacctaagagaatggtttggatgcagctcaaaacaactataataataataataataataataataataatacgaacacacctcacaaaggcacaaaaacaccaccctaaaagtgcagtagaacgaacgacattaccccggtatttaggaggaagaggacttatggatataggtgagcaattagataaacaaattgctaatttaagaacttattttcagatgcaggctgagacatctactctacatcgcgctatctgcgcagtagatgacacaacaccgatcaaactgagggaaccagaaatgcgcataaaccaccttactaaggacgaaaaagtgcgcacctggatgggtaaacctctgcacgggcgacatcccaatgaggtcagccaagattatgtcgacaatatagcgtcgaactactggttgacatcaggaaagatgttccctgaaacggagggttcattactggccattcaggatcaggttataccaaccagaaattacctgaaatatatcatcaaagaccctcaggttcaaaacgacagatgccgatatggatgtcaagcccaagaaaccatccaacatcttacagggggctgccaggcatttgctgcaactgaatacaaggaacggcatgacgcagtgggaaaaatccttcatcaagagatagctatcaagctgggacttctccaaacggaccatctcccatattatcaatacgtccctgagagtatgcttgaggatggcaactacaagctatactgggaccgcactgtgctcacagaccaaacagtggcacataatagaccagatctcgtactagttaataaattaacaagacaaacaacactaattgatgtggcgatacctaacaacaataatctacgtagtaaatttactgaaaagatcgccaagtacagagatctggaaattcaaatacgaagacaatggagaatgcaaagtacccagacgatacctattattatgtctactactggagtcattccgaagaacctcctcgaaagcataaaaaggctgggtctaaatgaacatatttacaagatcatgcag

SEQ ID NO: 588 - DNA, 2162 bp, Diabrotica virgifera
  SmartBlast Evalue=3E-59; Info=Reverse transcriptase n=1 Tax= Anopheles gambiae RepID=Q76IN5_ANOGA
ctcagaaaatcattctaaaaccatggtataactcaacatctacaatgagtagaagccacctgacaaccataataaggatgacaatgatagagtgcttaacagcataacacgaattcaatattaatgtggcaaataatcattgattttggaacttcaacaacaacaaatgactaataatctatggcgggagttaaaaataagttttctttgcaggtctatatagctaggcacctctattacaatcagcgagcaatatgtagtaagaattgaaaaagaaacatccgaagaaatggaaataaagagaggagtcaggcaaggctgcatactatcacctctattatttaatgcttattctgaaaaggtaattcgagaaactttggaagatgaaacagtcggcataagagtaaatggagtcttagttaacaatatcagatatgcagatgatacagtaataatagccgatagtttacaagacctggaaaggctcatgagtaaaatagtaaggtgtagtagggagtacggactctctctcaatatcaaaaagacgaagtttatgaaaattagtaaaaacaaccataatacaaacgaaattttaatagtagagggccagcagatcgaaagagtaaaaaagtatacttacctaggaacacttataacagaaaataataactacactgcagaaatcaaagtcagaataggaaaaagcatgttctaattttatgaaaataaaaaaggtcctatgtagcaaatatttaacattagctcttaaagtacgcccaacaaaatgttatgtatacagtgtactatactgtggagtggaatcatggacgttaaatctagagacttaacgcctttgaaatgtggacctatagaaaaattatgagggtttcctgggtagatagagttacaaacaatgaagtactgagaagaataggtaaagaaaaggaagttgaacttacaattaaagaaagaaagctacagtatctcggacatgtgatgcggggcgagaagtatggcatcctgcgactcataatgcaaggaaagatagatggcagaagaagcatcggaagaagacgaatttcatggctgaagaacctaagagaatggtttggatgcagctcaaaacaactataataataataataataataataataataatacgaacacacctcacaaaggcacaaaaacaccaccctaaaagtgcagtagaacgaacgacattaccccggtatttaggaggaagaggacttatggatataggtgagcaattagataaacaaattgctaatttaagaacttattttcagatgcaggctgagacatctactctacatcgcgctatctgcgcagtagatgacacaacaccgatcaaactgagggaaccagaaatgcgcataaaccacctcactaaagacgaaaaagtgcgcgcctggatgggtaaacctctgcacgggcgacatcccaatgaggtcagccaagattatgtcgacaatatagcgtcgaactactggttgacatcaggaaagatgttccctgaaacggagggttcattactggccattcaggatcaggttataccaaccagaaattacctgaaatatatcatcaaagaccctcaggttcaaaacgacagatgccgatatggatgtcaagcccaagaaaccatccaacatcttacagggggctgccaggcatttgctgcaactgaatacaaggaacggcatgacgcagtgggaaaaatccttcatcaagagatagctatcaagctgggacttctccaaacggaccatctcccatattatcaatacgtccctgagagtatgcttgaggatggcaactacaagctatactgggaccgcactgtgctcacagaccaaacagtggcacataatagaccagatctcgtactagttaataaattaacaagacaaacaacactaattgatgtggcgatacctaacaacaataatctacgtagtaaatttactgaaaagatcgccaagtacagagatctggaaattcaaatacgaagacaatggagaatgcaaagtacccagacgatacctattattatgtctactactggagtcattccgaagaacctcctcgaaagcataaaaaggctgggtctaaatgaacatatttacaagatcatgcag

SEQ ID NO: 589 - DNA, 2162 bp, Diabrotica virgifera
  SmartBlast Evalue=1E-59; Info=Reverse transcriptase n=1 Tax= Anopheles gambiae RepID=Q76IN5_ANOGA
ctcagaaaatcattctaaaaccatggtataactcaacatctacaatgagtagaagccacctgacaaccataataaggatgacaatgatagagtgcttaacagcataacacgaattcaatattaatgtggcaaataatcattgattttggaacttcaacaacaacaaatgactaataatctatggcgggagttaaaaataagttttctttgcaggtctatatagctaggcacctctattacaatcagcgagcaatatgtagtaagaattgaaaaagaaacatccgaagaaatggaaataaagagaggagtcaggcaaggctgcatactatcacctctattatttaatgcttattctgaaaaggtaattcgagaaactttggaagatgaaacagtcggcataagagtaaatggagtcttagttaacaatatcagatatgcagatgatacagtaataatagccgatagtttacaagacctggaaaggctcatgagtaaaatagtaaggtgtagtagggagtacggactctctctcaatatcaaaaagacgaagtttatgaaaattagtaaaaacaaccataatacaaacgaaattttaatagtagagggccagcagatcgaaagagtaaaaaagtatacttacctaggaacacttataacagaaaataataactacactgcagaaatcaaagtcagaataggaaaaagcatgttctaattttatgaaaataaaaaaggtcctatgtagcaaatatttaacattagctcttaaagtacgcccaacaaaatgttatgtatacagtgtactatactgtggagtggaatcatggacgttaaatctagagacttaacgcctttgaaatgtggacctatagaaaaattatgagggtttcctgggtagatagagttacaaacaatgaagtactgagaagaataggtaaagaaaaggaagttgaacttacaattaaagaaagaaagctacagtatctcggacatgtgatgcggggcgagaagtatggcatcctgcgactcataatgcaaggaaagatagatggcagaagaagcatcggaagaagacgaatttcatggctgaagaacctaagagaatggtttggatgcagctcaaaacaactataataataataataataataataataataatacgaacacacctcacaaaggcacaaaaacaccaccctaaaagtgcagtagaacgaacgacattaccccggtatttaggaggaagaggacttatggatataggtgagcaattagataaacaaattgctaatttaagaacttattttcagatgcaggctgagacatctactctacatcgcgctatctgcgcagtagatgacacaacaccgatcaaactgagggaaccagaaatgcgcataaaccacctcactaaagacgaaaaactgcgcacctggatgggtaaacctctacacgggcgacatcccaatgaggtcagccaagattatgtcgacaatatagcgtcgaactactggttgacatcaggaaagatgttccctgaaacggagggttcattactggccattcaggatcaggttataccaaccagaaattacctgaaatatatcatcaaagaccctcaggttcaaaacgacagatgccgatatggatgtcaagcccaagaaaccatccaacatcttacagggggctgccaggcatttgctgcaactgaatacaaggaacggcatgacgcagtgggaaaaatccttcatcaagagatagctatcaagctgggacttctccaaacggaccatctcccatattatcaatacgtccctgagagtatgcttgaggatggcaactacaagctatactgggaccgcactgtgctcacagaccaaacagtggcacataatagaccagatctcgtactagttaataaattaacaagacaaacaacactaattgatgtggcgatacctaacaacaataatctacgtagtaaatttactgaaaagatcgccaagtacagagatctggaaattcaaatacgaagacaatggagaatgcaaagtacccagacgatacctattattatgtctactactggagtcattccgaagaacctcctcgaaagcataaaaaggctgggtctaaatgaacatatttacaagatcatgcag

SEQ ID NO: 590 - DNA, 2162 bp, Diabrotica virgifera
  SmartBlast Evalue=1E-143; Info=Endonuclease-reverse transcriptase n=1 Tax=Bombyx mori RepID=D5LB38_BOMMO
agcgaactccaaaaaacattacatctcacagcatctagagacataacagtgatcatgggtgatttaacgcaaaaattggagaaggaaaatgctaccctaatgtatgacccatatgggcttggcgaacgaaacgacagaggggatcgcctaatagaattttgccaggagcataatgttagtagtcgcaaatacattctttaaattacctaagcgacgcctttatacatggaaatcccagctgacaaagacaacaaaatcgtcagaaatcaaattgactacatcctaataaagcacagatatcgaaactcaattcaggcagtaaaggcatatccaggagcagacgtatcttctgatcacagtcttcttattgctaggtttcaacttcaactaaaaaagacgcaaaaaagccgcaacaacaataaacttaacatacagaaactaaagtcagaagaaacaaaagaaaatctgaaacacgaaatcaacacaaatctagacagaaacccaggaaataattgcaacgtagaacagcagtggcaattcttcaaaacctctatattagaaccaagtaagaaagtacttactacaaccaaatgtaagaaagaagaatggatgacggaggaaattctagagttgatgaatgaaagaagaaaaacaaaaccattaataagacccgctataaacagcttcaaaaccaaataagaagaaaaattagggaggctaaagaaacctacttctctgaaaaatgtaaagaaatagaagaacttcaaaacacatatgcaacttcaacctacataaaaaagtcaaagaactagccggaataggaaatagaagaacctcaaatatattgctcgacaaaaacggaaatattataatggagacagaacgaaaactacgacgatggaaagagtacatcgaggaactatttcatgaccagagagaagctagtacatccgtagatagccaaaccggagatgtaggcccagagataaccaaatcagaggttagtcaggcaataaactctatgaaaaccaataaatctgctggtccagatgaattacctagcgagctgataaagttggtcaacgagaaaaacctggacataatagtagaactgttcaacgctatctatactacgggaatcatccctagagaaatgttgacatcagcatttgtgtgtttgccaaagaaagtgaatgccaaagaatgcagtgactaccgaaccataagcttaatgtcacataccttgaaaattctgctgaaaattatccacgccagaatacactctaaactggagctggatattagtgacactcaatatgggttccgcaatggtatgggtaccagagaggcattattctccttcaacgtgctgacacagagatgtttggatgttaaccgtcctctttacgtctgttttatagactacaataaagcgtttgataaagtaaaacatgatcgactcatggaaattctaaaaaataaaaacctagatgaaagagatttaagactaataacacacctctattacaatcagcgagcaatagtaagaattgaaaaagaaacatctgaagaaatggaaataaagagaggagtcaggcaaggctgcatactatcacctctattatttaacgcttattctgaagaggtaatgcgagaaactctggaagatgaaacagtcggcataatagtaatgtagtcttagttaacaacatcagatatacagatgatacagtaataatcgccgatagtttacaagacctggaaagactcatgagtaaaatagtaaggtgtagtagggagtacggactctctctcaatatcaaaaagacgaaatttacaaaaatgagtaaaaacagccataatactaacaaaatcttgatagtagaggaccagcagatcgaaagagtaaaaaagtgcacttacctaggaacacttatgacagaaaataatgactacactgcagaaatcaaagttagtatcgaaaaagcacgttctaattttatgaaaatgaaaaggatccatgtggcaaagatttaacattagctctgaaagtacgcctaacaaaatgttgcgtatacagtgaactatactatggagtggaatcatagacgttaaatctagagacaatgagacgacttaacgcctttgaaatgtggacctat

SEQ ID NO: 591 - DNA, 2110 bp, Diabrotica virgifera
  SmartBlast Evalue=2E-57; Info=Endonuclease-reverse transcriptase n=1 Tax=Bombyx mori RepID=D5LB38_BOMMO
ctcagaaaatcattctaaaaccatggtataactcaacatctacaatgagtagaagccacctgacaaccataataaggatgacaatgatagagtgcttaacagcataacacgaattcaatattaatgtggcaaataatcattgattttggaacttcaacaacaacaaatgactaataatctatggcgggagttaaaaataagttttctttgcaggtctatatagctaggcacctctattacaatcagcgagcaatatgtagtaagaattgaaaaagaaacatccgaagaaatggaaataaagagaggagtcaggcaaggctgcatactatcacctctattatttaatgcttattctgaaaaggtaattcgagaaactttggaagatgaaacagtcggcataagagtaaatggagtcttagttaacaatatcagatatgcagatgatacagtaataatagccgatagtttacaagacctggaaaggctcatgagtaaaatagtaaggtgtagtagggagtacggactctctctcaatatcaaaaagacgaagtttatgaaaattagtaaaaacaaccataatacaaacgaaattttaatagtagagggccagcagatcgaaagagtaaaaaagtatacttacctaggaacacttataacagaaaataataactacactgcagaaatcaaagtcagaataggaaaaagcatgttctaattttatgaaaataaaaaaggtcctatgtagcaaatatttaacattagctcttaaagtacgcccaacaaaatgttatgtatacagtgtactatactgtggagtggaatcatggacgttaaatctagagacttaacgcctttgaaatgtggacctatagaaaaattatgagggtttcctgggtagatagagttacaaacaatgaagtactgagaagaataggtaaagaaaaggaagttgaacttacaattaaagaaagaaagctacagtatctcggacatgtgatgcggggcgagaagtatggcatcctgcgactcataatgcaaggaaagatagatggcagaagaagcatcggaagaagacgaatttcatggctgaagaacctaagagaatggtttggatgcagctcaaaacaactataataataataataataataataataataatacgaacacacctcacaaaggcacaaaaacaccaccctaaaagtgcagtagaacgaacgacattaccccggtatttaggaggaagaggacttatggatataggtgagcaattagataaacaaattgctaatttaagaacttattttcagatgcaggctgagacatctactctacatcgcgctatctgcgcagtagatgacacaacaccgatcaaactgagggaaccagaaatgcgcataaaccaccttactaaggacgaaaaagtgcgcacctggatgggtaaacctctgcacgggcgacatcccaatgaggtcagccaagattatgtcgacaatatagcgtcgaactactggttgacatcaggaaagatgttccctgaaacggagggttcattactggccattcaggatcaggttataccaaccagaaattacctgaaatatatcatcaaagaccctcaggttcaaaacgacagatgccgatatggatgtcaagcccaagaaaccatccaacatcttacagggggctgccaggcatttgctgcaactgaatacaaggaacggcatgacgcagtgggaaaaatccttcatcaagagatagctatcaagctgggacttctccaaacggaccatctcccatattatcaatacgtccctgagagtatgcttgaggatggcaactacaagctatactgggaccgcactgtgctcacagaccaaacagtggcacataatagaccagatctcgtactagttaataaattaacaagacaaacaacactaattgatgtggcgatacctaacaacaataatctacgtagtaaattcactgaaaagatctccaagtacagagatctagaaattcaaatacgaaggcaatggagaatgcaaagtacccagacgatacctattgttatgtttactactggagtcattccgaagaacctcct

SEQ ID NO: 592 - DNA, 2110 bp, Diabrotica virgifera
  SmartBlast Evalue=2E-57; Info=Endonuclease-reverse transcriptase n=1 Tax=Bombyx mori RepID=D5LB38_BOMMO
ctcagaaaatcattctaaaaccatggtataactcaacatctacaatgagtagaagccacctgacaaccataataaggatgacaatgatagagtgcttaacagcataacacgaattcaatattaatgtggcaaataatcattgattttggaacttcaacaacaacaaatgactaataatctatggcgggagttaaaaataagttttctttgcaggtctatatagctaggcacctctattacaatcagcgagcaatatgtagtaagaattgaaaaagaaacatccgaagaaatggaaataaagagaggagtcaggcaaggctgcatactatcacctctattatttaatgcttattctgaaaaggtaattcgagaaactttggaagatgaaacagtcggcataagagtaaatggagtcttagttaacaatatcagatatgcagatgatacagtaataatagccgatagtttacaagacctggaaaggctcatgagtaaaatagtaaggtgtagtagggagtacggactctctctcaatatcaaaaagacgaagtttatgaaaattagtaaaaacaaccataatacaaacgaaattttaatagtagagggccagcagatcgaaagagtaaaaaagtatacttacctaggaacacttataacagaaaataataactacactgcagaaatcaaagtcagaataggaaaaagcatgttctaattttatgaaaataaaaaaggtcctatgtagcaaatatttaacattagctcttaaagtacgcccaacaaaatgttatgtatacagtgtactatactgtggagtggaatcatggacgttaaatctagagacttaacgcctttgaaatgtggacctatagaaaaattatgagggtttcctgggtagatagagttacaaacaatgaagtactgagaagaataggtaaagaaaaggaagttgaacttacaattaaagaaagaaagctacagtatctcggacatgtgatgcggggcgagaagtatggcatcctgcgactcataatgcaaggaaagatagatggcagaagaagcatcggaagaagacgaatttcatggctgaagaacctaagagaatggtttggatgcagctcaaaacaactataataataataataataataataataataatacgaacacacctcacaaaggcacaaaaacaccaccctaaaagtgcagtagaacgaacgacattaccccggtatttaggaggaagaggacttatggatataggtgagcaattagataaacaaattgctaatttaagaacttattttcagatgcaggctgagacatctactctacatcgcgctatctgcgcagtagatgacacaacaccgatcaaactgagggaaccagaaatgcgcataaaccacctcactaaagacgaaaaagtgcgcgcctggatgggtaaacctctgcacgggcgacatcccaatgaggtcagccaagattatgtcgacaatatagcgtcgaactactggttgacatcaggaaagatgttccctgaaacggagggttcattactggccattcaggatcaggttataccaaccagaaattacctgaaatatatcatcaaagaccctcaggttcaaaacgacagatgccgatatggatgtcaagcccaagaaaccatccaacatcttacagggggctgccaggcatttgctgcaactgaatacaaggaacggcatgacgcagtgggaaaaatccttcatcaagagatagctatcaagctgggacttctccaaacggaccatctcccatattatcaatacgtccctgagagtatgcttgaggatggcaactacaagctatactgggaccgcactgtgctcacagaccaaacagtggcacataatagaccagatctcgtactagttaataaattaacaagacaaacaacactaattgatgtggcgatacctaacaacaataatctacgtagtaaattcactgaaaagatctccaagtacagagatctagaaattcaaatacgaaggcaatggagaatgcaaagtacccagacgatacctattgttatgtttactactggagtcattccgaagaacctcct

SEQ ID NO: 593 - DNA, 3659 bp, Diabrotica virgifera
  SmartBlast Evalue=0; Info=Endonuclease-reverse transcriptase n= 1 Tax=Bombyx mori RepID=D5LB38_BOMMO
agcgaactccaaaaaacattacatctcacagcatctagagacataacagtgatcatgggtgatttaacgcaaaaattggagaaggaaaatgctaccctaatgtatgacccatatgggcttggcgaacgaaacgacagaggggatcgcctaatagaattttgccaggagcataatgttagtagtcgcaaatacattctttaaattacctaagcgacgcctttatacatggaaatcccagctgacaaagacaacaaaatcgtcagaaatcaaattgactacatcctaataaagcacagatatcgaaactcaattcaggcagtaaaggcatatccaggagcagacgtatcttctgatcacagtcttcttattgctaggtttcaacttcaactaaaaaagacgcaaaaaagccgcaacaacaataaacttaacatacagaaactaaagtcagaagaaacaaaagaaaatctgaaacacgaaatcaacacaaatctagacagaaacccaggaaataattgcaacgtagaacagcagtggcaattcttcaaaacctctatattagaaccaagtaagaaagtacttactacaaccaaatgtaagaaagaagaatggatgacggaggaaattctagagttgatgaatgaaagaagaaaaacaaaaccattaataagacccgctataaacagcttcaaaaccaaataagaagaaaaattagggaggctaaagaaacctacttctctgaaaaatgtaaagaaatagaagaacttcaaaacacatatgcaacttcaacctacataaaaaagtcaaagaactagccggaataggaaatagaagaacctcaaatatattgctcgacaaaaacggaaatattataatggagacagaacgaaaactacgacgatggaaagagtacatcgaggaactatttcatgaccagagagaagctagtacatccgtagatagccaaaccggagatgtaggcccagagataaccaaatcagaggttagtcaggcaataaactctatgaaaaccaataaatctgctggtccagatgaattacctagcgagctgataaagttggtcaacgagaaaaacctggacataatagtagaactgttcaacgctatctatactacgggaatcatccctagagaaatgttgacatcagcatttgtgtgtttgccaaagaaagtgaatgccaaagaatgcagtgactaccgaaccataagcttaatgtcacataccttgaaaattctgctgaaaattatccacgccagaatacactctaaactggagctggatattagtgacactcaatatgggttccgcaatggtatgggtaccagagaggcattattctccttcaacgtgctgacacagagatgtttggatgttaaccgtcctctttacgtctgttttatagactacaataaagcgtttgataaagtaaaacatgatcgactcatggaaattctaaaaaataaaaacctagatgaaagagatttaagactaataacacacctctattacaatcagcgagcaatagtaagaattgaaaaagaaacatctgaagaaatggaaataaagagaggagtcaggcaaggctgcatactatcacctctattatttaacgcttattctgaagaggtaatgcgagaaactctggaagatgaaacagtcggcataagagtaaatggagtcttagttaacaacatcagatatgcagatgatacagtaataatagccgatagtttacaagacctgcaaagactcatgagtaaaatagtaaggtgtagtagggagtacggactctctctcaatatcaaaaagacgaagtttatgaaaattagtaaaaacaaccataatactaacgaaatcttgatagtagagggccagcagatcgaaagagtaaaaaagtacacttacctaggaacacttataacagaaaataatgactacactgcagaaatcaaagtcagaatcgaaaaagcacgttctaattttataaaaatgaaaaaggtcctatgtagcaaagatttaacattagctcttaaagtacgcctaacaaaatgttacgtctacagtgtactatactatggagtggaatcatggacgttaaatgtagagacaatgagacgacttaacgcctttgaaatgtggacctatagaagaattatgagggtttcctgggtagatagagttacgaacaatgaaagtactgagaagaataggtaaagaaaaggaagttgaacttacaattaaagaaagaaagctacagtatctcggacatgtgatgcggggcgagaagtatggcatcctgcgactcataatgcaaggaaagatagatggcagaagaagcatcggaagaagacgaatttcatggctgaagaacctaagagaatggtttggatgcagctcaaaacaactataataataataataataataataataataatacgaacacacctcacaaaggcacaaaaacaccaccctaaaagtgcagtagaacgaacgacattaccccggtatttaggaggaagaggacttatggatataggtgagcaattagataaacaaattgctaatttaagaacttattttcagatgcaggctgagacatctactctacatcgcgctatctgcgcagtagatgacacaacaccgatcaaactgagggaaccagaaatgcgcataaaccaccttactaaggacgaaaaagtgcgcacctggatgggtaaacctctgcacgggcgacatcccaatgaggtcagccaagattatgtcgacaatatagcgtcgaactactggttgacatcaggaaagatgttccctgaaacggagggttcattactggccattcaggatcaggttataccaaccagaaattacctgaaatatatcatcaaagaccctcaggttcaaaacgacagatgccgatatggatgtcaagcccaagaaaccatccaacatcttacagggggctgccaggcatttgctgcaactgaatacaaggaacggcatgacgcagtgggaaaaatccttcatcaagagatagctatcaagctgggacttctccaaacggaccatctcccatattatcaatacgtccctgagagtatgcttgaggatggcaactacaagctatactgggaccgcactgtgctcacagaccaaacagtggcacataatagaccagatctcgtactagttaataaattaacaagacaaacaacactaattgatgtggcgatacctaacaacaataatctacgtagtaaatttactgaaaagatcgccaaatacagagatctagaaattcaaatacgaaggcaatggagaatgcaaagtacccagacgataccgattattatttctactactggagtcattccgaagaccctcctcgaaagcataaaaaagctgggtctgaatgaacatctttataagaccatgcagaaagctgtactactcgcgacggccagatgcgtacgaaaatttctgggagatacacctgcattccaagtcacctagggctcgataacacggaaagagtcccaccagagctcaatccttttgataccgtaggtatctgggatgagtcaattttccccttagagggagtgtgagccgtatggctaaatctggataataataataa

SEQ ID NO: 594 - DNA, 2110 bp, Diabrotica virgifera
  SmartBlast Evalue=2E-57; Info=Endonuclease-reverse transcriptase n=1 Tax=Bombyx mori RepID=D5LB38_BOMMO
ctcagaaaatcattctaaaaccatggtataactcaacatctacaatgagtagaagccacctgacaaccataataaggatgacaatgatagagtgcttaacagcataacacgaattcaatattaatgtggcaaataatcattgattttggaacttcaacaacaacaaatgactaataatctatggcgggagttaaaaataagttttctttgcaggtctatatagctaggcacctctattacaatcagcgagcaatatgtagtaagaattgaaaaagaaacatccgaagaaatggaaataaagagaggagtcaggcaaggctgcatactatcacctctattatttaatgcttattctgaaaaggtaattcgagaaactttggaagatgaaacagtcggcataagagtaaatggagtcttagttaacaatatcagatatgcagatgatacagtaataatagccgatagtttacaagacctggaaaggctcatgagtaaaatagtaaggtgtagtagggagtacggactctctctcaatatcaaaaagacgaagtttatgaaaattagtaaaaacaaccataatacaaacgaaattttaatagtagagggccagcagatcgaaagagtaaaaaagtatacttacctaggaacacttataacagaaaataataactacactgcagaaatcaaagtcagaataggaaaaagcatgttctaattttatgaaaataaaaaaggtcctatgtagcaaatatttaacattagctcttaaagtacgcccaacaaaatgttatgtatacagtgtactatactgtggagtggaatcatggacgttaaatctagagacttaacgcctttgaaatgtggacctatagaaaaattatgagggtttcctgggtagatagagttacaaacaatgaagtactgagaagaataggtaaagaaaaggaagttgaacttacaattaaagaaagaaagctacagtatctcggacatgtgatgcggggcgagaagtatggcatcctgcgactcataatgcaaggaaagatagatggcagaagaagcatcggaagaagacgaatttcatggctgaagaacctaagagaatggtttggatgcagctcaaaacaactataataataataataataataataataataatacgaacacacctcacaaaggcacaaaaacaccaccctaaaagtgcagtagaacgaacgacattaccccggtatttaggaggaagaggacttatggatataggtgagcaattagataaacaaattgctaatttaagaacttattttcagatgcaggctgagacatctactctacatcgcgctatctgcgcagtagatgacacaacaccgatcaaactgagggaaccagaaatgcgcataaaccacctcactaaagacgaaaaactgcgcacctggatgggtaaacctctacacgggcgacatcccaatgaggtcagccaagattatgtcgacaatatagcgtcgaactactggttgacatcaggaaagatgttccctgaaacggagggttcattactggccattcaggatcaggttataccaaccagaaattacctgaaatatatcatcaaagaccctcaggttcaaaacgacagatgccgatatggatgtcaagcccaagaaaccatccaacatcttacagggggctgccaggcatttgctgcaactgaatacaaggaacggcatgacgcagtgggaaaaatccttcatcaagagatagctatcaagctgggacttctccaaacggaccatctcccatattatcaatacgtccctgagagtatgcttgaggatggcaactacaagctatactgggaccgcactgtgctcacagaccaaacagtggcacataatagaccagatctcgtactagttaataaattaacaagacaaacaacactaattgatgtggcgatacctaacaacaataatctacgtagtaaattcactgaaaagatctccaagtacagagatctagaaattcaaatacgaaggcaatggagaatgcaaagtacccagacgatacctattgttatgtttactactggagtcattccgaagaacctcct

SEQ ID NO: 595 - DNA, 1673 bp, Diabrotica virgifera
  SmartBlast Evalue=7E-72; Info=Reverse transcriptase n=1 Tax= Anopheles gambiae RepID=Q76IN5_ANOGA
aaaagaaatattttatgagactaggtacattccagaaagcagactagtagaaacgaataaatagtgttttttaatcaatactgtttttcaatattgattttctaccacacttttatttctatcacaaaaattgtcaattgtaagataaacaattatccgttatcctcggtcagcagacttgttttcttgaaacgacactttgcatacaatattggtatttaaatatcccgctctgtcattcttaatcatttgaccaatacgaacacagacatcacgtgggcagctctaaccaataaaatcttggaattcatagcggctattaacgcttcgttaaaacagctgcttcgcttcacagcttaatagtagaaatttgtttaaggcactaaacacctacgcatgttccgcgcttagctattcatttggcattgttaagtggacaaaaacggacatagaaaatcttcagcgaaaagtacgaacacacctcacaaaggcacaaaaacaccaccctaaaagtgcagtagaacgaacgacattaccccggtatttaggaggaagaggacttatggatataggtgagcaattagataaacaaattgctaatttaagaacttattttcagatgcaggctgagacatctactctacatcgcgctatctgcgcagtagatgacacaacaccgatcaaactgagggaaccagaaatgcgcataaaccaccttactaaggacgaaaaagtgcgcacctggatgggtaaacctctgcacgggcgacatcccaatgaggtcagccaagattatgtcgacaatatagcgtcgaactactggttgacatcaggaaagatgttccctgaaacggagggttcattactggccattcaggatcaggttataccaaccagaaattacctgaaatatatcatcaaagaccctcaggttcaaaacgacagatgccgatatggatgtcaagcccaagaaaccatccaacatcttacagggggctgccaggcatttgctgcaactgaatacaaggaacggcatgacgcagtgggaaaaatccttcatcaagagatagctatcaagctgggacttctccaaacggaccatctcccatattatcaatacgtccctgagagtatgcttgaggatggcaactacaagctatactgggaccgcactgtgctcacagaccaaacagtggcacataatagaccagatctcgtactagttaataaattaacaagacaaacaacactaattgatgtggcgatacctaacaacaataatctacgtagtaaatttactgaaaagatcgccaaatacagagatctagaaattcaaatacgaaggcaatggagaatgcaaagtacccagacgataccgattattatttctactactggagtcattccgaagaccctcctcgaaagcataaaaaagctgggtctgaatgaacatctttataagaccatgcagaaagctgtactactcgcgacggccagatgcgtacgaaaatttctgggagatacacctgcattccaagtcacctagggctcgataacacggaaagagtcccaccagagctcaatccttttgataccgtaggtatctgggatgagtcaattttccccttagagggagtgtgagccgtatggctaaatctggataataataataa

SEQ ID NO: 596 - DNA, 1673 bp, Diabrotica virgifera
  SmartBlast Evalue=3E-71; Info=Reverse transcriptase n=1 Tax= Anopheles gambiae RepID=Q76IN5_ANOGA
aaaagaaatattttatgagactaggtacattccagaaagcagactagtagaaacgaataaatagtgttttttaatcaatactgtttttcaatattgattttctaccacacttttatttctatcacaaaaattgtcaattgtaagataaacaattatccgttatcctcggtcagcagacttgttttcttgaaacgacactttgcatacaatattggtatttaaatatcccgctctgtcattcttaatcatttgaccaatacgaacacagacatcacgtgggcagctctaaccaataaaatcttggaattcatagcggctattaacgcttcgttaaaacagctgcttcgcttcacagcttaatagtagaaatttgtttaaggcactaaacacctacgcatgttccgcgcttagctattcatttggcattgttaagtggacaaaaacggacatagaaaatcttcagcgaaaagtacgaacacacctcacaaaggcacaaaaacaccaccctaaaagtgcagtagaacgaacgacattaccccggtatttaggaggaagaggacttatggatataggtgagcaattagataaacaaattgctaatttaagaacttattttcagatgcaggctgagacatctactctacatcgcgctatctgcgcagtagatgacacaacaccgatcaaactgagggaaccagaaatgcgcataaaccacctcactaaagacgaaaaagtgcgcgcctggatgggtaaacctctgcacgggcgacatcccaatgaggtcagccaagattatgtcgacaatatagcgtcgaactactggttgacatcaggaaagatgttccctgaaacggagggttcattactggccattcaggatcaggttataccaaccagaaattacctgaaatatatcatcaaagaccctcaggttcaaaacgacagatgccgatatggatgtcaagcccaagaaaccatccaacatcttacagggggctgccaggcatttgctgcaactgaatacaaggaacggcatgacgcagtgggaaaaatccttcatcaagagatagctatcaagctgggacttctccaaacggaccatctcccatattatcaatacgtccctgagagtatgcttgaggatggcaactacaagctatactgggaccgcactgtgctcacagaccaaacagtggcacataatagaccagatctcgtactagttaataaattaacaagacaaacaacactaattgatgtggcgatacctaacaacaataatctacgtagtaaatttactgaaaagatcgccaaatacagagatctagaaattcaaatacgaaggcaatggagaatgcaaagtacccagacgataccgattattatttctactactggagtcattccgaagaccctcctcgaaagcataaaaaagctgggtctgaatgaacatctttataagaccatgcagaaagctgtactactcgcgacggccagatgcgtacgaaaatttctgggagatacacctgcattccaagtcacctagggctcgataacacggaaagagtcccaccagagctcaatccttttgataccgtaggtatctgggatgagtcaattttccccttagagggagtgtgagccgtatggctaaatctggataataataataa

SEQ ID NO: 597 - DNA, 1673 bp, Diabrotica virgifera
  SmartBlast Evalue=9E-72; Info=Reverse transcriptase n=1 Tax= Anopheles gambiae RepID=Q76IN5_ANOGA
aaaagaaatattttatgagactaggtacattccagaaagcagactagtagaaacgaataaatagtgttttttaatcaatactgtttttcaatattgattttctaccacacttttatttctatcacaaaaattgtcaattgtaagataaacaattatccgttatcctcggtcagcagacttgttttcttgaaacgacactttgcatacaatattggtatttaaatatcccgctctgtcattcttaatcatttgaccaatacgaacacagacatcacgtgggcagctctaaccaataaaatcttggaattcatagcggctattaacgcttcgttaaaacagctgcttcgcttcacagcttaatagtagaaatttgtttaaggcactaaacacctacgcatgttccgcgcttagctattcatttggcattgttaagtggacaaaaacggacatagaaaatcttcagcgaaaagtacgaacacacctcacaaaggcacaaaaacaccaccctaaaagtgcagtagaacgaacgacattaccccggtatttaggaggaagaggacttatggatataggtgagcaattagataaacaaattgctaatttaagaacttattttcagatgcaggctgagacatctactctacatcgcgctatctgcgcagtagatgacacaacaccgatcaaactgagggaaccagaaatgcgcataaaccacctcactaaagacgaaaaactgcgcacctggatgggtaaacctctacacgggcgacatcccaatgaggtcagccaagattatgtcgacaatatagcgtcgaactactggttgacatcaggaaagatgttccctgaaacggagggttcattactggccattcaggatcaggttataccaaccagaaattacctgaaatatatcatcaaagaccctcaggttcaaaacgacagatgccgatatggatgtcaagcccaagaaaccatccaacatcttacagggggctgccaggcatttgctgcaactgaatacaaggaacggcatgacgcagtgggaaaaatccttcatcaagagatagctatcaagctgggacttctccaaacggaccatctcccatattatcaatacgtccctgagagtatgcttgaggatggcaactacaagctatactgggaccgcactgtgctcacagaccaaacagtggcacataatagaccagatctcgtactagttaataaattaacaagacaaacaacactaattgatgtggcgatacctaacaacaataatctacgtagtaaatttactgaaaagatcgccaaatacagagatctagaaattcaaatacgaaggcaatggagaatgcaaagtacccagacgataccgattattatttctactactggagtcattccgaagaccctcctcgaaagcataaaaaagctgggtctgaatgaacatctttataagaccatgcagaaagctgtactactcgcgacggccagatgcgtacgaaaatttctgggagatacacctgcattccaagtcacctagggctcgataacacggaaagagtcccaccagagctcaatccttttgataccgtaggtatctgggatgagtcaattttccccttagagggagtgtgagccgtatggctaaatctggataataataataa

SEQ ID NO: 598 - DNA, 1471 bp, Diabrotica virgifera
  SmartBlast Evalue=7E-73; Info=Reverse transcriptase n=1 Tax= Anopheles gambiae RepID=Q76IN5_ANOGA
aaaagaaatattttatgagactaggtacattccagaaagcagactagtagaaacgaataaatagtgttttttaatcaatactgtttttcaatattgattttctaccacacttttatttctatcacaaaaattgtcaattgtaagataaacaattatccgttatcctcggtcagcagacttgttttcttgaaacgacactttgcatacaatattggtatttaaatatcccgctctgtcattcttaatcatttgaccaatacgaacacagacatcacgtgggcagctctaaccaataaaatcttggaattcatagcggctattaacgcttcgttaaaacagctgcttcgcttcacagcttaatagtagaaatttgtttaaggcactaaacacctacgcatgttccgcgcttagctattcatttggcattgttaagtggacaaaaacggacatagaaaatcttcagcgaaaagtacgaacacacctcacaaaggcacaaaaacaccaccctaaaagtgcagtagaacgaacgacattaccccggtatttaggaggaagaggacttatggatataggtgagcaattagataaacaaattgctaatttaagaacttattttcagatgcaggctgagacatctactctacatcgcgctatctgcgcagtagatgacacaacaccgatcaaactgagggaaccagaaatgcgcataaaccaccttactaaggacgaaaaagtgcgcacctggatgggtaaacctctgcacgggcgacatcccaatgaggtcagccaagattatgtcgacaatatagcgtcgaactactggttgacatcaggaaagatgttccctgaaacggagggttcattactggccattcaggatcaggttataccaaccagaaattacctgaaatatatcatcaaagaccctcaggttcaaaacgacagatgccgatatggatgtcaagcccaagaaaccatccaacatcttacagggggctgccaggcatttgctgcaactgaatacaaggaacggcatgacgcagtgggaaaaatccttcatcaagagatagctatcaagctgggacttctccaaacggaccatctcccatattatcaatacgtccctgagagtatgcttgaggatggcaactacaagctatactgggaccgcactgtgctcacagaccaaacagtggcacataatagaccagatctcgtactagttaataaattaacaagacaaacaacactaattgatgtggcgatacctaacaacaataatctacgtagtaaatttactgaaaagatcgccaagtacagagatctggaaattcaaatacgaagacaatggagaatgcaaagtacccagacgatacctattattatgtctactactggagtcattccgaagaacctcctcgaaagcataaaaaggctgggtctaaatgaacatatttacaagatcatgcag

SEQ ID NO: 599 - DNA, 1471 bp, Diabrotica virgifera
  SmartBlast Evalue=3E-72; Info=Reverse transcriptase n=1 Tax= Anopheles gambiae RepID=Q76IN5_ANOGA
aaaagaaatattttatgagactaggtacattccagaaagcagactagtagaaacgaataaatagtgttttttaatcaatactgtttttcaatattgattttctaccacacttttatttctatcacaaaaattgtcaattgtaagataaacaattatccgttatcctcggtcagcagacttgttttcttgaaacgacactttgcatacaatattggtatttaaatatcccgctctgtcattcttaatcatttgaccaatacgaacacagacatcacgtgggcagctctaaccaataaaatcttggaattcatagcggctattaacgcttcgttaaaacagctgcttcgcttcacagcttaatagtagaaatttgtttaaggcactaaacacctacgcatgttccgcgcttagctattcatttggcattgttaagtggacaaaaacggacatagaaaatcttcagcgaaaagtacgaacacacctcacaaaggcacaaaaacaccaccctaaaagtgcagtagaacgaacgacattaccccggtatttaggaggaagaggacttatggatataggtgagcaattagataaacaaattgctaatttaagaacttattttcagatgcaggctgagacatctactctacatcgcgctatctgcgcagtagatgacacaacaccgatcaaactgagggaaccagaaatgcgcataaaccacctcactaaagacgaaaaagtgcgcgcctggatgggtaaacctctgcacgggcgacatcccaatgaggtcagccaagattatgtcgacaatatagcgtcgaactactggttgacatcaggaaagatgttccctgaaacggagggttcattactggccattcaggatcaggttataccaaccagaaattacctgaaatatatcatcaaagaccctcaggttcaaaacgacagatgccgatatggatgtcaagcccaagaaaccatccaacatcttacagggggctgccaggcatttgctgcaactgaatacaaggaacggcatgacgcagtgggaaaaatccttcatcaagagatagctatcaagctgggacttctccaaacggaccatctcccatattatcaatacgtccctgagagtatgcttgaggatggcaactacaagctatactgggaccgcactgtgctcacagaccaaacagtggcacataatagaccagatctcgtactagttaataaattaacaagacaaacaacactaattgatgtggcgatacctaacaacaataatctacgtagtaaatttactgaaaagatcgccaagtacagagatctggaaattcaaatacgaagacaatggagaatgcaaagtacccagacgatacctattattatgtctactactggagtcattccgaagaacctcctcgaaagcataaaaaggctgggtctaaatgaacatatttacaagatcatgcag

SEQ ID NO: 600 - DNA, 1471 bp, Diabrotica virgifera
  SmartBlast Evalue=9E-73; Info=Reverse transcriptase n=1 Tax= Anopheles gambiae RepID=Q76IN5_ANOGA
aaaagaaatattttatgagactaggtacattccagaaagcagactagtagaaacgaataaatagtgttttttaatcaatactgtttttcaatattgattttctaccacacttttatttctatcacaaaaattgtcaattgtaagataaacaattatccgttatcctcggtcagcagacttgttttcttgaaacgacactttgcatacaatattggtatttaaatatcccgctctgtcattcttaatcatttgaccaatacgaacacagacatcacgtgggcagctctaaccaataaaatcttggaattcatagcggctattaacgcttcgttaaaacagctgcttcgcttcacagcttaatagtagaaatttgtttaaggcactaaacacctacgcatgttccgcgcttagctattcatttggcattgttaagtggacaaaaacggacatagaaaatcttcagcgaaaagtacgaacacacctcacaaaggcacaaaaacaccaccctaaaagtgcagtagaacgaacgacattaccccggtatttaggaggaagaggacttatggatataggtgagcaattagataaacaaattgctaatttaagaacttattttcagatgcaggctgagacatctactctacatcgcgctatctgcgcagtagatgacacaacaccgatcaaactgagggaaccagaaatgcgcataaaccacctcactaaagacgaaaaactgcgcacctggatgggtaaacctctacacgggcgacatcccaatgaggtcagccaagattatgtcgacaatatagcgtcgaactactggttgacatcaggaaagatgttccctgaaacggagggttcattactggccattcaggatcaggttataccaaccagaaattacctgaaatatatcatcaaagaccctcaggttcaaaacgacagatgccgatatggatgtcaagcccaagaaaccatccaacatcttacagggggctgccaggcatttgctgcaactgaatacaaggaacggcatgacgcagtgggaaaaatccttcatcaagagatagctatcaagctgggacttctccaaacggaccatctcccatattatcaatacgtccctgagagtatgcttgaggatggcaactacaagctatactgggaccgcactgtgctcacagaccaaacagtggcacataatagaccagatctcgtactagttaataaattaacaagacaaacaacactaattgatgtggcgatacctaacaacaataatctacgtagtaaatttactgaaaagatcgccaagtacagagatctggaaattcaaatacgaagacaatggagaatgcaaagtacccagacgatacctattattatgtctactactggagtcattccgaagaacctcctcgaaagcataaaaaggctgggtctaaatgaacatatttacaagatcatgcag

SEQ ID NO: 601 - DNA, 1419 bp, Diabrotica virgifera
  SmartBlast Evalue=1E-69; Info=Reverse transcriptase n=1 Tax= Anopheles gambiae RepID=Q76IN5_ANOGA
aaaagaaatattttatgagactaggtacattccagaaagcagactagtagaaacgaataaatagtgttttttaatcaatactgtttttcaatattgattttctaccacacttttatttctatcacaaaaattgtcaattgtaagataaacaattatccgttatcctcggtcagcagacttgttttcttgaaacgacactttgcatacaatattggtatttaaatatcccgctctgtcattcttaatcatttgaccaatacgaacacagacatcacgtgggcagctctaaccaataaaatcttggaattcatagcggctattaacgcttcgttaaaacagctgcttcgcttcacagcttaatagtagaaatttgtttaaggcactaaacacctacgcatgttccgcgcttagctattcatttggcattgttaagtggacaaaaacggacatagaaaatcttcagcgaaaagtacgaacacacctcacaaaggcacaaaaacaccaccctaaaagtgcagtagaacgaacgacattaccccggtatttaggaggaagaggacttatggatataggtgagcaattagataaacaaattgctaatttaagaacttattttcagatgcaggctgagacatctactctacatcgcgctatctgcgcagtagatgacacaacaccgatcaaactgagggaaccagaaatgcgcataaaccaccttactaaggacgaaaaagtgcgcacctggatgggtaaacctctgcacgggcgacatcccaatgaggtcagccaagattatgtcgacaatatagcgtcgaactactggttgacatcaggaaagatgttccctgaaacggagggttcattactggccattcaggatcaggttataccaaccagaaattacctgaaatatatcatcaaagaccctcaggttcaaaacgacagatgccgatatggatgtcaagcccaagaaaccatccaacatcttacagggggctgccaggcatttgctgcaactgaatacaaggaacggcatgacgcagtgggaaaaatccttcatcaagagatagctatcaagctgggacttctccaaacggaccatctcccatattatcaatacgtccctgagagtatgcttgaggatggcaactacaagctatactgggaccgcactgtgctcacagaccaaacagtggcacataatagaccagatctcgtactagttaataaattaacaagacaaacaacactaattgatgtggcgatacctaacaacaataatctacgtagtaaattcactgaaaagatctccaagtacagagatctagaaattcaaatacgaaggcaatggagaatgcaaagtacccagacgatacctattgttatgtttactactggagtcattccgaagaacctcct

SEQ ID NO: 602 - DNA, 1419 bp, Diabrotica virgifera
  SmartBlast Evalue=4E-69; Info=Reverse transcriptase n=1 Tax= Anopheles gambiae RepID=Q76IN5_ANOGA
aaaagaaatattttatgagactaggtacattccagaaagcagactagtagaaacgaataaatagtgttttttaatcaatactgtttttcaatattgattttctaccacacttttatttctatcacaaaaattgtcaattgtaagataaacaattatccgttatcctcggtcagcagacttgttttcttgaaacgacactttgcatacaatattggtatttaaatatcccgctctgtcattcttaatcatttgaccaatacgaacacagacatcacgtgggcagctctaaccaataaaatcttggaattcatagcggctattaacgcttcgttaaaacagctgcttcgcttcacagcttaatagtagaaatttgtttaaggcactaaacacctacgcatgttccgcgcttagctattcatttggcattgttaagtggacaaaaacggacatagaaaatcttcagcgaaaagtacgaacacacctcacaaaggcacaaaaacaccaccctaaaagtgcagtagaacgaacgacattaccccggtatttaggaggaagaggacttatggatataggtgagcaattagataaacaaattgctaatttaagaacttattttcagatgcaggctgagacatctactctacatcgcgctatctgcgcagtagatgacacaacaccgatcaaactgagggaaccagaaatgcgcataaaccacctcactaaagacgaaaaagtgcgcgcctggatgggtaaacctctgcacgggcgacatcccaatgaggtcagccaagattatgtcgacaatatagcgtcgaactactggttgacatcaggaaagatgttccctgaaacggagggttcattactggccattcaggatcaggttataccaaccagaaattacctgaaatatatcatcaaagaccctcaggttcaaaacgacagatgccgatatggatgtcaagcccaagaaaccatccaacatcttacagggggctgccaggcatttgctgcaactgaatacaaggaacggcatgacgcagtgggaaaaatccttcatcaagagatagctatcaagctgggacttctccaaacggaccatctcccatattatcaatacgtccctgagagtatgcttgaggatggcaactacaagctatactgggaccgcactgtgctcacagaccaaacagtggcacataatagaccagatctcgtactagttaataaattaacaagacaaacaacactaattgatgtggcgatacctaacaacaataatctacgtagtaaattcactgaaaagatctccaagtacagagatctagaaattcaaatacgaaggcaatggagaatgcaaagtacccagacgatacctattgttatgtttactactggagtcattccgaagaacctcct

SEQ ID NO: 603 - DNA, 1419 bp, Diabrotica virgifera
  SmartBlast Evalue=2E-69; Info=Reverse transcriptase n=1 Tax= Anopheles gambiae RepID=Q76IN5_ANOGA
aaaagaaatattttatgagactaggtacattccagaaagcagactagtagaaacgaataaatagtgttttttaatcaatactgtttttcaatattgattttctaccacacttttatttctatcacaaaaattgtcaattgtaagataaacaattatccgttatcctcggtcagcagacttgttttcttgaaacgacactttgcatacaatattggtatttaaatatcccgctctgtcattcttaatcatttgaccaatacgaacacagacatcacgtgggcagctctaaccaataaaatcttggaattcatagcggctattaacgcttcgttaaaacagctgcttcgcttcacagcttaatagtagaaatttgtttaaggcactaaacacctacgcatgttccgcgcttagctattcatttggcattgttaagtggacaaaaacggacatagaaaatcttcagcgaaaagtacgaacacacctcacaaaggcacaaaaacaccaccctaaaagtgcagtagaacgaacgacattaccccggtatttaggaggaagaggacttatggatataggtgagcaattagataaacaaattgctaatttaagaacttattttcagatgcaggctgagacatctactctacatcgcgctatctgcgcagtagatgacacaacaccgatcaaactgagggaaccagaaatgcgcataaaccacctcactaaagacgaaaaactgcgcacctggatgggtaaacctctacacgggcgacatcccaatgaggtcagccaagattatgtcgacaatatagcgtcgaactactggttgacatcaggaaagatgttccctgaaacggagggttcattactggccattcaggatcaggttataccaaccagaaattacctgaaatatatcatcaaagaccctcaggttcaaaacgacagatgccgatatggatgtcaagcccaagaaaccatccaacatcttacagggggctgccaggcatttgctgcaactgaatacaaggaacggcatgacgcagtgggaaaaatccttcatcaagagatagctatcaagctgggacttctccaaacggaccatctcccatattatcaatacgtccctgagagtatgcttgaggatggcaactacaagctatactgggaccgcactgtgctcacagaccaaacagtggcacataatagaccagatctcgtactagttaataaattaacaagacaaacaacactaattgatgtggcgatacctaacaacaataatctacgtagtaaattcactgaaaagatctccaagtacagagatctagaaattcaaatacgaaggcaatggagaatgcaaagtacccagacgatacctattgttatgtttactactggagtcattccgaagaacctcct

SEQ ID NO: 604 - DNA, 3659 bp, Diabrotica virgifera
  SmartBlast Evalue=0; Info=Endonuclease-reverse transcriptase n= 1 Tax=Bombyx mori RepID=D5LB38_BOMMO
agcgaactccaaaaaacattacatctcacagcatctagagacataacagtgatcatgggtgatttaacgcaaaaattggagaaggaaaatgctaccctaatgtatgacccatatgggcttggcgaacgaaacgacagaggggatcgcctaatagaattttgccaggagcataatgttagtagtcgcaaatacattctttaaattacctaagcgacgcctttatacatggaaatcccagctgacaaagacaacaaaatcgtcagaaatcaaattgactacatcctaataaagcacagatatcgaaactcaattcaggcagtaaaggcatatccaggagcagacgtatcttctgatcacagtcttcttattgctaggtttcaacttcaactaaaaaagacgcaaaaaagccgcaacaacaataaacttaacatacagaaactaaagtcagaagaaacaaaagaaaatctgaaacacgaaatcaacacaaatctagacagaaacccaggaaataattgcaacgtagaacagcagtggcaattcttcaaaacctctatattagaaccaagtaagaaagtacttactacaaccaaatgtaagaaagaagaatggatgacggaggaaattctagagttgatgaatgaaagaagaaaaacaaaaccattaataagacccgctataaacagcttcaaaaccaaataagaagaaaaattagggaggctaaagaaacctacttctctgaaaaatgtaaagaaatagaagaacttcaaaacacatatgcaacttcaacctacataaaaaagtcaaagaactagccggaataggaaatagaagaacctcaaatatattgctcgacaaaaacggaaatattataatggagacagaacgaaaactacgacgatggaaagagtacatcgaggaactatttcatgaccagagagaagctagtacatccgtagatagccaaaccggagatgtaggcccagagataaccaaatcagaggttagtcaggcaataaactctatgaaaaccaataaatctgctggtccagatgaattacctagcgagctgataaagttggtcaacgagaaaaacctggacataatagtagaactgttcaacgctatctatactacgggaatcatccctagagaaatgttgacatcagcatttgtgtgtttgccaaagaaagtgaatgccaaagaatgcagtgactaccgaaccataagcttaatgtcacataccttgaaaattctgctgaaaattatccacgccagaatacactctaaactggagctggatattagtgacactcaatatgggttccgcaatggtatgggtaccagagaggcattattctccttcaacgtgctgacacagagatgtttggatgttaaccgtcctctttacgtctgttttatagactacaataaagcgtttgataaagtaaaacatgatcgactcatggaaattctaaaaaataaaaacctagatgaaagagatttaagactaataacacacctctattacaatcagcgagcaatagtaagaattgaaaaagaaacatctgaagaaatggaaataaagagaggagtcaggcaaggctgcatactatcacctctattatttaacgcttattctgaagaggtaatgcgagaaactctggaagatgaaacagtcggcataagagtaaatggagtcttagttaacaacatcagatatgcagatgatacagtaataatagccgatagtttacaagacctgcaaagactcatgagtaaaatagtaaggtgtagtagggagtacggactctctctcaatatcaaaaagacgaagtttatgaaaattagtaaaaacaaccataatactaacgaaatcttgatagtagagggccagcagatcgaaagagtaaaaaagtacacttacctaggaacacttataacagaaaataatgactacactgcagaaatcaaagtcagaatcgaaaaagcacgttctaattttataaaaatgaaaaaggtcctatgtagcaaagatttaacattagctcttaaagtacgcctaacaaaatgttacgtctacagtgtactatactatggagtggaatcatggacgttaaatgtagagacaatgagacgacttaacgcctttgaaatgtggacctatagaagaattatgagggtttcctgggtagatagagttacgaacaatgaaagtactgagaagaataggtaaagaaaaggaagttgaacttacaattaaagaaagaaagctacagtatctcggacatgtgatgcggggcgagaagtatggcatcctgcgactcataatgcaaggaaagatagatggcagaagaagcatcggaagaagacgaatttcatggctgaagaacctaagagaatggtttggatgcagctcaaaacaactataataataataataataataataataataatacgaacacacctcacaaaggcacaaaaacaccaccctaaaagtgcagtagaacgaacgacattaccccggtatttaggaggaagaggacttatggatataggtgagcaattagataaacaaattgctaatttaagaacttattttcagatgcaggctgagacatctactctacatcgcgctatctgcgcagtagatgacacaacaccgatcaaactgagggaaccagaaatgcgcataaaccacctcactaaagacgaaaaagtgcgcgcctggatgggtaaacctctgcacgggcgacatcccaatgaggtcagccaagattatgtcgacaatatagcgtcgaactactggttgacatcaggaaagatgttccctgaaacggagggttcattactggccattcaggatcaggttataccaaccagaaattacctgaaatatatcatcaaagaccctcaggttcaaaacgacagatgccgatatggatgtcaagcccaagaaaccatccaacatcttacagggggctgccaggcatttgctgcaactgaatacaaggaacggcatgacgcagtgggaaaaatccttcatcaagagatagctatcaagctgggacttctccaaacggaccatctcccatattatcaatacgtccctgagagtatgcttgaggatggcaactacaagctatactgggaccgcactgtgctcacagaccaaacagtggcacataatagaccagatctcgtactagttaataaattaacaagacaaacaacactaattgatgtggcgatacctaacaacaataatctacgtagtaaatttactgaaaagatcgccaaatacagagatctagaaattcaaatacgaaggcaatggagaatgcaaagtacccagacgataccgattattatttctactactggagtcattccgaagaccctcctcgaaagcataaaaaagctgggtctgaatgaacatctttataagaccatgcagaaagctgtactactcgcgacggccagatgcgtacgaaaatttctgggagatacacctgcattccaagtcacctagggctcgataacacggaaagagtcccaccagagctcaatccttttgataccgtaggtatctgggatgagtcaattttccccttagagggagtgtgagccgtatggctaaatctggataataataataa

SEQ ID NO: 605 - DNA, 1187 bp, Diabrotica virgifera
  SmartBlast Evalue=4E-40; Info=Reverse transcriptase n=1 Tax= Anopheles gambiae RepID=Q76IN5_ANOGA
ataaatgtttgtatatgtatattgcaacttaaaataaatgtgaaaaaaaagtctaaaaaacagcctacgaaaggtcttttcagtaagttaaatatataacagttaggtatatttaagatttacgttaaagagttatggattataaaaagttccataaagggattcacccaggtattttggattgtctttaatcgtttctctgtcaatttgtaaataaaccgtcaaaaatgtttcaataacatgtacaattaattgattttaataacactgagtacgatgttaacaaataataataacaatagtaatatatgtcgacaatacagcgtcgaactattggttgacatcaggaaagatgttccctgaaacggagggttcattactggccattcaggatcacgttataccaaccaaaaattacctgaaatatatcatcaaagaccctcaggttcaaaacgacagatgccgatatggatgtcaagcccaagaaaccatccaacatcttacagggggctgccaggcatttgctgcaactgaatacaaggaacggcatgacgcagtgggaaaaatccttcatcaagagatagctatcaagctgggacttctccaaacggaccatctcccatattatcaatacgtccctgagagtatgcttgaggatggcaactacaagctatactgggaccgcactgtgctcacagaccaaacagtggcacataatagaccagatctcgtactagttaataaattaacaagacaaacaacactaattgatgtggcgatacctaacaacaataatctacgtagtaaatttactgaaaagatcgccaaatacagagatctagaaattcaaatacgaaggcaatggagaatgcaaagtacccagacgataccgattattatttctactactggagtcattccgaagaccctcctcgaaagcataaaaaagctgggtctgaatgaacatctttataagaccatgcagaaagctgtactactcgcgacggccagatgcgtacgaaaatttctgggagatacacctgcattccaagtcacctagggctcgataacacggaaagagtcccaccagagctcaatccttttgataccgtaggtatctgggatgagtcaattttccccttagagggagtgtgagccgtatggctaaatctggataataataataa

SEQ ID NO: 606 - DNA, 1215 bp, Diabrotica virgifera
  SmartBlast Evalue=5E-61; Info=Endonuclease-reverse transcriptase n=1 Tax=Bombyx mori RepID=D5LB38_BOMMO
ctcagaaaatcattctaaaaccatggtataactcaacatctacaatgagtagaagccacctgacaaccataataaggatgacaatgatagagtgcttaacagcataacacgaattcaatattaatgtggcaaataatcattgattttggaacttcaacaacaacaaatgactaataatctatggcgggagttaaaaataagttttctttgcaggtctatatagctaggcacctctattacaatcagcgagcaatatgtagtaagaattgaaaaagaaacatccgaagaaatggaaataaagagaggagtcaggcaaggctgcatactatcacctctattatttaatgcttattctgaaaaggtaattcgagaaactttggaagatgaaacagtcggcataagagtaaatggagtcttagttaacaatatcagatatgcagatgatacagtaataatagccgatagtttacaagacctggaaaggctcatgagtaaaatagtaaggtgtagtagggagtacggactctctctcaatatcaaaaagacgaagtttatgaaaattagtaaaaacaaccataatacaaacgaaattttaatagtagagggccagcagatcgaaagagtaaaaaagtatacttacctaggaacacttataacagaaaataataactacactgcagaaatcaaagtcagaataggaaaaagcatgttctaattttatgaaaataaaaaaggtcctatgtagcaaatatttaacattagctcttaaagtacgcccaacaaaatgttatgtatacagtgtactatactgtggagtggaatcatggacgttaaatctagagacttaacgcctttgaaatgtggacctatagaaaaattatgagggtttcctgggtagatagagttacaaacaatgaagtactgagaagaataggtaaagaaaaggaagttgaacttacaattaaagaaagaaagctacagtatctcggacatgtgatgcggggcgagaagtatggcatcctacgactcataatgcagggaaagatagatggcagaagaagcatcggaagaagacgaatttcatggttgaagaacctgagagagtggtttggatgcagctcgaaacaactatttagagctactgcctcaaaaattaaaatagctatgatgattgccaacctccgtagcggagatggcacctgaagaagaagaata

SEQ ID NO: 607 - DNA, 985 bp, Diabrotica virgifera
  SmartBlast Evalue=4E-41; Info=Reverse transcriptase n=1 Tax= Anopheles gambiae RepID=Q76IN5_ANOGA
ataaatgtttgtatatgtatattgcaacttaaaataaatgtgaaaaaaaagtctaaaaaacagcctacgaaaggtcttttcagtaagttaaatatataacagttaggtatatttaagatttacgttaaagagttatggattataaaaagttccataaagggattcacccaggtattttggattgtctttaatcgtttctctgtcaatttgtaaataaaccgtcaaaaatgtttcaataacatgtacaattaattgattttaataacactgagtacgatgttaacaaataataataacaatagtaatatatgtcgacaatacagcgtcgaactattggttgacatcaggaaagatgttccctgaaacggagggttcattactggccattcaggatcacgttataccaaccaaaaattacctgaaatatatcatcaaagaccctcaggttcaaaacgacagatgccgatatggatgtcaagcccaagaaaccatccaacatcttacagggggctgccaggcatttgctgcaactgaatacaaggaacggcatgacgcagtgggaaaaatccttcatcaagagatagctatcaagctgggacttctccaaacggaccatctcccatattatcaatacgtccctgagagtatgcttgaggatggcaactacaagctatactgggaccgcactgtgctcacagaccaaacagtggcacataatagaccagatctcgtactagttaataaattaacaagacaaacaacactaattgatgtggcgatacctaacaacaataatctacgtagtaaatttactgaaaagatcgccaagtacagagatctggaaattcaaatacgaagacaatggagaatgcaaagtacccagacgatacctattattatgtctactactggagtcattccgaagaacctcctcgaaagcataaaaaggctgggtctaaatgaacatatttacaagatcatgcag

SEQ ID NO: 608 - DNA, 933 bp, Diabrotica virgifera
  SmartBlast Evalue=6E-38; Info=Reverse transcriptase n=1 Tax= Anopheles gambiae RepID=Q76IN5_ANOGA
ataaatgtttgtatatgtatattgcaacttaaaataaatgtgaaaaaaaagtctaaaaaacagcctacgaaaggtcttttcagtaagttaaatatataacagttaggtatatttaagatttacgttaaagagttatggattataaaaagttccataaagggattcacccaggtattttggattgtctttaatcgtttctctgtcaatttgtaaataaaccgtcaaaaatgtttcaataacatgtacaattaattgattttaataacactgagtacgatgttaacaaataataataacaatagtaatatatgtcgacaatacagcgtcgaactattggttgacatcaggaaagatgttccctgaaacggagggttcattactggccattcaggatcacgttataccaaccaaaaattacctgaaatatatcatcaaagaccctcaggttcaaaacgacagatgccgatatggatgtcaagcccaagaaaccatccaacatcttacagggggctgccaggcatttgctgcaactgaatacaaggaacggcatgacgcagtgggaaaaatccttcatcaagagatagctatcaagctgggacttctccaaacggaccatctcccatattatcaatacgtccctgagagtatgcttgaggatggcaactacaagctatactgggaccgcactgtgctcacagaccaaacagtggcacataatagaccagatctcgtactagttaataaattaacaagacaaacaacactaattgatgtggcgatacctaacaacaataatctacgtagtaaattcactgaaaagatctccaagtacagagatctagaaattcaaatacgaaggcaatggagaatgcaaagtacccagacgatacctattgttatgtttactactggagtcattccgaagaacctcct

SEQ ID NO: 609 - DNA, 422 bp, Diabrotica virgifera
  SmartBlast Evalue=9E-12; Info=Reverse transcriptase n=1 Tax= Anopheles gambiae RepID=Q76IN5_ANOGA
aattgatgtggcgatacctaacaacaataatctacgtagtaaatttactgaaaagatcgccaagtatagagatctggaaattcaaatacggagacaatggagaatgcaaagtacccagacgatacctattgttatgtctactactggagtcattccgaagaccctcctcgaaagcataaaaaagctgggtctcaatgaacatctttataagaccatgcagaaagctgtactactcgcgacggccagaagtgtacgaaaatttttgggagatacacctgcattccaagtcacctagggctcgataacacggaaagagtcccaccagagctcaatccttttgataccgtaggtatctgggatgagtcaattttccccttagagggagtgtgagccgtatggctaaatctggataataataataa

SEQ ID NO: 610 - DNA, 375 bp, Diabrotica virgifera
ctgaaaagatcgccaagtacagagatctagaaattcaaatacgaaggcaatggagaatgcaaagtacccagacgatacctattgttatatctactactggagtcattccgaagaacctcctcgaaagcataaaaaggctgggtctaaatgaacatctttacaagaccatgcagaaagctgtactactcgcgacggccagaagtgtacgaaaatttttgggagatacacctgcattccaagtcacctagggctcgataacacggaaagagtcccaccagagctcaatccttttgataccgtaggtatctgggatgagtcaattttccccttagagggagtgtgagccgtatggctaaatctggataataataataa

SEQ ID NO: 611 - DNA, 3659 bp, Diabrotica virgifera
  SmartBlast Evalue=0; Info=Endonuclease-reverse transcriptase n= 1 Tax=Bombyx mori RepID=D5LB38_BOMMO
agcgaactccaaaaaacattacatctcacagcatctagagacataacagtgatcatgggtgatttaacgcaaaaattggagaaggaaaatgctaccctaatgtatgacccatatgggcttggcgaacgaaacgacagaggggatcgcctaatagaattttgccaggagcataatgttagtagtcgcaaatacattctttaaattacctaagcgacgcctttatacatggaaatcccagctgacaaagacaacaaaatcgtcagaaatcaaattgactacatcctaataaagcacagatatcgaaactcaattcaggcagtaaaggcatatccaggagcagacgtatcttctgatcacagtcttcttattgctaggtttcaacttcaactaaaaaagacgcaaaaaagccgcaacaacaataaacttaacatacagaaactaaagtcagaagaaacaaaagaaaatctgaaacacgaaatcaacacaaatctagacagaaacccaggaaataattgcaacgtagaacagcagtggcaattcttcaaaacctctatattagaaccaagtaagaaagtacttactacaaccaaatgtaagaaagaagaatggatgacggaggaaattctagagttgatgaatgaaagaagaaaaacaaaaccattaataagacccgctataaacagcttcaaaaccaaataagaagaaaaattagggaggctaaagaaacctacttctctgaaaaatgtaaagaaatagaagaacttcaaaacacatatgcaacttcaacctacataaaaaagtcaaagaactagccggaataggaaatagaagaacctcaaatatattgctcgacaaaaacggaaatattataatggagacagaacgaaaactacgacgatggaaagagtacatcgaggaactatttcatgaccagagagaagctagtacatccgtagatagccaaaccggagatgtaggcccagagataaccaaatcagaggttagtcaggcaataaactctatgaaaaccaataaatctgctggtccagatgaattacctagcgagctgataaagttggtcaacgagaaaaacctggacataatagtagaactgttcaacgctatctatactacgggaatcatccctagagaaatgttgacatcagcatttgtgtgtttgccaaagaaagtgaatgccaaagaatgcagtgactaccgaaccataagcttaatgtcacataccttgaaaattctgctgaaaattatccacgccagaatacactctaaactggagctggatattagtgacactcaatatgggttccgcaatggtatgggtaccagagaggcattattctccttcaacgtgctgacacagagatgtttggatgttaaccgtcctctttacgtctgttttatagactacaataaagcgtttgataaagtaaaacatgatcgactcatggaaattctaaaaaataaaaacctagatgaaagagatttaagactaataacacacctctattacaatcagcgagcaatagtaagaattgaaaaagaaacatctgaagaaatggaaataaagagaggagtcaggcaaggctgcatactatcacctctattatttaacgcttattctgaagaggtaatgcgagaaactctggaagatgaaacagtcggcataagagtaaatggagtcttagttaacaacatcagatatgcagatgatacagtaataatagccgatagtttacaagacctgcaaagactcatgagtaaaatagtaaggtgtagtagggagtacggactctctctcaatatcaaaaagacgaagtttatgaaaattagtaaaaacaaccataatactaacgaaatcttgatagtagagggccagcagatcgaaagagtaaaaaagtacacttacctaggaacacttataacagaaaataatgactacactgcagaaatcaaagtcagaatcgaaaaagcacgttctaattttataaaaatgaaaaaggtcctatgtagcaaagatttaacattagctcttaaagtacgcctaacaaaatgttacgtctacagtgtactatactatggagtggaatcatggacgttaaatgtagagacaatgagacgacttaacgcctttgaaatgtggacctatagaagaattatgagggtttcctgggtagatagagttacgaacaatgaaagtactgagaagaataggtaaagaaaaggaagttgaacttacaattaaagaaagaaagctacagtatctcggacatgtgatgcggggcgagaagtatggcatcctgcgactcataatgcaaggaaagatagatggcagaagaagcatcggaagaagacgaatttcatggctgaagaacctaagagaatggtttggatgcagctcaaaacaactataataataataataataataataataataatacgaacacacctcacaaaggcacaaaaacaccaccctaaaagtgcagtagaacgaacgacattaccccggtatttaggaggaagaggacttatggatataggtgagcaattagataaacaaattgctaatttaagaacttattttcagatgcaggctgagacatctactctacatcgcgctatctgcgcagtagatgacacaacaccgatcaaactgagggaaccagaaatgcgcataaaccacctcactaaagacgaaaaactgcgcacctggatgggtaaacctctacacgggcgacatcccaatgaggtcagccaagattatgtcgacaatatagcgtcgaactactggttgacatcaggaaagatgttccctgaaacggagggttcattactggccattcaggatcaggttataccaaccagaaattacctgaaatatatcatcaaagaccctcaggttcaaaacgacagatgccgatatggatgtcaagcccaagaaaccatccaacatcttacagggggctgccaggcatttgctgcaactgaatacaaggaacggcatgacgcagtgggaaaaatccttcatcaagagatagctatcaagctgggacttctccaaacggaccatctcccatattatcaatacgtccctgagagtatgcttgaggatggcaactacaagctatactgggaccgcactgtgctcacagaccaaacagtggcacataatagaccagatctcgtactagttaataaattaacaagacaaacaacactaattgatgtggcgatacctaacaacaataatctacgtagtaaatttactgaaaagatcgccaaatacagagatctagaaattcaaatacgaaggcaatggagaatgcaaagtacccagacgataccgattattatttctactactggagtcattccgaagaccctcctcgaaagcataaaaaagctgggtctgaatgaacatctttataagaccatgcagaaagctgtactactcgcgacggccagatgcgtacgaaaatttctgggagatacacctgcattccaagtcacctagggctcgataacacggaaagagtcccaccagagctcaatccttttgataccgtaggtatctgggatgagtcaattttccccttagagggagtgtgagccgtatggctaaatctggataataataataa

SEQ ID NO: 612 - DNA, 3457 bp, Diabrotica virgifera
  SmartBlast Evalue=0; Info=Endonuclease-reverse transcriptase n= 1 Tax=Bombyx mori RepID=D5LB38_BOMMO
agcgaactccaaaaaacattacatctcacagcatctagagacataacagtgatcatgggtgatttaacgcaaaaattggagaaggaaaatgctaccctaatgtatgacccatatgggcttggcgaacgaaacgacagaggggatcgcctaatagaattttgccaggagcataatgttagtagtcgcaaatacattctttaaattacctaagcgacgcctttatacatggaaatcccagctgacaaagacaacaaaatcgtcagaaatcaaattgactacatcctaataaagcacagatatcgaaactcaattcaggcagtaaaggcatatccaggagcagacgtatcttctgatcacagtcttcttattgctaggtttcaacttcaactaaaaaagacgcaaaaaagccgcaacaacaataaacttaacatacagaaactaaagtcagaagaaacaaaagaaaatctgaaacacgaaatcaacacaaatctagacagaaacccaggaaataattgcaacgtagaacagcagtggcaattcttcaaaacctctatattagaaccaagtaagaaagtacttactacaaccaaatgtaagaaagaagaatggatgacggaggaaattctagagttgatgaatgaaagaagaaaaacaaaaccattaataagacccgctataaacagcttcaaaaccaaataagaagaaaaattagggaggctaaagaaacctacttctctgaaaaatgtaaagaaatagaagaacttcaaaacacatatgcaacttcaacctacataaaaaagtcaaagaactagccggaataggaaatagaagaacctcaaatatattgctcgacaaaaacggaaatattataatggagacagaacgaaaactacgacgatggaaagagtacatcgaggaactatttcatgaccagagagaagctagtacatccgtagatagccaaaccggagatgtaggcccagagataaccaaatcagaggttagtcaggcaataaactctatgaaaaccaataaatctgctggtccagatgaattacctagcgagctgataaagttggtcaacgagaaaaacctggacataatagtagaactgttcaacgctatctatactacgggaatcatccctagagaaatgttgacatcagcatttgtgtgtttgccaaagaaagtgaatgccaaagaatgcagtgactaccgaaccataagcttaatgtcacataccttgaaaattctgctgaaaattatccacgccagaatacactctaaactggagctggatattagtgacactcaatatgggttccgcaatggtatgggtaccagagaggcattattctccttcaacgtgctgacacagagatgtttggatgttaaccgtcctctttacgtctgttttatagactacaataaagcgtttgataaagtaaaacatgatcgactcatggaaattctaaaaaataaaaacctagatgaaagagatttaagactaataacacacctctattacaatcagcgagcaatagtaagaattgaaaaagaaacatctgaagaaatggaaataaagagaggagtcaggcaaggctgcatactatcacctctattatttaacgcttattctgaagaggtaatgcgagaaactctggaagatgaaacagtcggcataagagtaaatggagtcttagttaacaacatcagatatgcagatgatacagtaataatagccgatagtttacaagacctgcaaagactcatgagtaaaatagtaaggtgtagtagggagtacggactctctctcaatatcaaaaagacgaagtttatgaaaattagtaaaaacaaccataatactaacgaaatcttgatagtagagggccagcagatcgaaagagtaaaaaagtacacttacctaggaacacttataacagaaaataatgactacactgcagaaatcaaagtcagaatcgaaaaagcacgttctaattttataaaaatgaaaaaggtcctatgtagcaaagatttaacattagctcttaaagtacgcctaacaaaatgttacgtctacagtgtactatactatggagtggaatcatggacgttaaatgtagagacaatgagacgacttaacgcctttgaaatgtggacctatagaagaattatgagggtttcctgggtagatagagttacgaacaatgaaagtactgagaagaataggtaaagaaaaggaagttgaacttacaattaaagaaagaaagctacagtatctcggacatgtgatgcggggcgagaagtatggcatcctgcgactcataatgcaaggaaagatagatggcagaagaagcatcggaagaagacgaatttcatggctgaagaacctaagagaatggtttggatgcagctcaaaacaactataataataataataataataataataataatacgaacacacctcacaaaggcacaaaaacaccaccctaaaagtgcagtagaacgaacgacattaccccggtatttaggaggaagaggacttatggatataggtgagcaattagataaacaaattgctaatttaagaacttattttcagatgcaggctgagacatctactctacatcgcgctatctgcgcagtagatgacacaacaccgatcaaactgagggaaccagaaatgcgcataaaccaccttactaaggacgaaaaagtgcgcacctggatgggtaaacctctgcacgggcgacatcccaatgaggtcagccaagattatgtcgacaatatagcgtcgaactactggttgacatcaggaaagatgttccctgaaacggagggttcattactggccattcaggatcaggttataccaaccagaaattacctgaaatatatcatcaaagaccctcaggttcaaaacgacagatgccgatatggatgtcaagcccaagaaaccatccaacatcttacagggggctgccaggcatttgctgcaactgaatacaaggaacggcatgacgcagtgggaaaaatccttcatcaagagatagctatcaagctgggacttctccaaacggaccatctcccatattatcaatacgtccctgagagtatgcttgaggatggcaactacaagctatactgggaccgcactgtgctcacagaccaaacagtggcacataatagaccagatctcgtactagttaataaattaacaagacaaacaacactaattgatgtggcgatacctaacaacaataatctacgtagtaaatttactgaaaagatcgccaagtacagagatctggaaattcaaatacgaagacaatggagaatgcaaagtacccagacgatacctattattatgtctactactggagtcattccgaagaacctcctcgaaagcataaaaaggctgggtctaaatgaacatatttacaagatcatgcag

SEQ ID NO: 613 - DNA, 3457 bp, Diabrotica virgifera
  SmartBlast Evalue=0; Info=Endonuclease-reverse transcriptase n= 1 Tax=Bombyx mori RepID=D5LB38_BOMMO
agcgaactccaaaaaacattacatctcacagcatctagagacataacagtgatcatgggtgatttaacgcaaaaattggagaaggaaaatgctaccctaatgtatgacccatatgggcttggcgaacgaaacgacagaggggatcgcctaatagaattttgccaggagcataatgttagtagtcgcaaatacattctttaaattacctaagcgacgcctttatacatggaaatcccagctgacaaagacaacaaaatcgtcagaaatcaaattgactacatcctaataaagcacagatatcgaaactcaattcaggcagtaaaggcatatccaggagcagacgtatcttctgatcacagtcttcttattgctaggtttcaacttcaactaaaaaagacgcaaaaaagccgcaacaacaataaacttaacatacagaaactaaagtcagaagaaacaaaagaaaatctgaaacacgaaatcaacacaaatctagacagaaacccaggaaataattgcaacgtagaacagcagtggcaattcttcaaaacctctatattagaaccaagtaagaaagtacttactacaaccaaatgtaagaaagaagaatggatgacggaggaaattctagagttgatgaatgaaagaagaaaaacaaaaccattaataagacccgctataaacagcttcaaaaccaaataagaagaaaaattagggaggctaaagaaacctacttctctgaaaaatgtaaagaaatagaagaacttcaaaacacatatgcaacttcaacctacataaaaaagtcaaagaactagccggaataggaaatagaagaacctcaaatatattgctcgacaaaaacggaaatattataatggagacagaacgaaaactacgacgatggaaagagtacatcgaggaactatttcatgaccagagagaagctagtacatccgtagatagccaaaccggagatgtaggcccagagataaccaaatcagaggttagtcaggcaataaactctatgaaaaccaataaatctgctggtccagatgaattacctagcgagctgataaagttggtcaacgagaaaaacctggacataatagtagaactgttcaacgctatctatactacgggaatcatccctagagaaatgttgacatcagcatttgtgtgtttgccaaagaaagtgaatgccaaagaatgcagtgactaccgaaccataagcttaatgtcacataccttgaaaattctgctgaaaattatccacgccagaatacactctaaactggagctggatattagtgacactcaatatgggttccgcaatggtatgggtaccagagaggcattattctccttcaacgtgctgacacagagatgtttggatgttaaccgtcctctttacgtctgttttatagactacaataaagcgtttgataaagtaaaacatgatcgactcatggaaattctaaaaaataaaaacctagatgaaagagatttaagactaataacacacctctattacaatcagcgagcaatagtaagaattgaaaaagaaacatctgaagaaatggaaataaagagaggagtcaggcaaggctgcatactatcacctctattatttaacgcttattctgaagaggtaatgcgagaaactctggaagatgaaacagtcggcataagagtaaatggagtcttagttaacaacatcagatatgcagatgatacagtaataatagccgatagtttacaagacctgcaaagactcatgagtaaaatagtaaggtgtagtagggagtacggactctctctcaatatcaaaaagacgaagtttatgaaaattagtaaaaacaaccataatactaacgaaatcttgatagtagagggccagcagatcgaaagagtaaaaaagtacacttacctaggaacacttataacagaaaataatgactacactgcagaaatcaaagtcagaatcgaaaaagcacgttctaattttataaaaatgaaaaaggtcctatgtagcaaagatttaacattagctcttaaagtacgcctaacaaaatgttacgtctacagtgtactatactatggagtggaatcatggacgttaaatgtagagacaatgagacgacttaacgcctttgaaatgtggacctatagaagaattatgagggtttcctgggtagatagagttacgaacaatgaaagtactgagaagaataggtaaagaaaaggaagttgaacttacaattaaagaaagaaagctacagtatctcggacatgtgatgcggggcgagaagtatggcatcctgcgactcataatgcaaggaaagatagatggcagaagaagcatcggaagaagacgaatttcatggctgaagaacctaagagaatggtttggatgcagctcaaaacaactataataataataataataataataataataatacgaacacacctcacaaaggcacaaaaacaccaccctaaaagtgcagtagaacgaacgacattaccccggtatttaggaggaagaggacttatggatataggtgagcaattagataaacaaattgctaatttaagaacttattttcagatgcaggctgagacatctactctacatcgcgctatctgcgcagtagatgacacaacaccgatcaaactgagggaaccagaaatgcgcataaaccacctcactaaagacgaaaaagtgcgcgcctggatgggtaaacctctgcacgggcgacatcccaatgaggtcagccaagattatgtcgacaatatagcgtcgaactactggttgacatcaggaaagatgttccctgaaacggagggttcattactggccattcaggatcaggttataccaaccagaaattacctgaaatatatcatcaaagaccctcaggttcaaaacgacagatgccgatatggatgtcaagcccaagaaaccatccaacatcttacagggggctgccaggcatttgctgcaactgaatacaaggaacggcatgacgcagtgggaaaaatccttcatcaagagatagctatcaagctgggacttctccaaacggaccatctcccatattatcaatacgtccctgagagtatgcttgaggatggcaactacaagctatactgggaccgcactgtgctcacagaccaaacagtggcacataatagaccagatctcgtactagttaataaattaacaagacaaacaacactaattgatgtggcgatacctaacaacaataatctacgtagtaaatttactgaaaagatcgccaagtacagagatctggaaattcaaatacgaagacaatggagaatgcaaagtacccagacgatacctattattatgtctactactggagtcattccgaagaacctcctcgaaagcataaaaaggctgggtctaaatgaacatatttacaagatcatgcag

SEQ ID NO: 614 - DNA, 3457 bp, Diabrotica virgifera
  SmartBlast Evalue=0; Info=Endonuclease-reverse transcriptase n= 1 Tax=Bombyx mori RepID=D5LB38_BOMMO
agcgaactccaaaaaacattacatctcacagcatctagagacataacagtgatcatgggtgatttaacgcaaaaattggagaaggaaaatgctaccctaatgtatgacccatatgggcttggcgaacgaaacgacagaggggatcgcctaatagaattttgccaggagcataatgttagtagtcgcaaatacattctttaaattacctaagcgacgcctttatacatggaaatcccagctgacaaagacaacaaaatcgtcagaaatcaaattgactacatcctaataaagcacagatatcgaaactcaattcaggcagtaaaggcatatccaggagcagacgtatcttctgatcacagtcttcttattgctaggtttcaacttcaactaaaaaagacgcaaaaaagccgcaacaacaataaacttaacatacagaaactaaagtcagaagaaacaaaagaaaatctgaaacacgaaatcaacacaaatctagacagaaacccaggaaataattgcaacgtagaacagcagtggcaattcttcaaaacctctatattagaaccaagtaagaaagtacttactacaaccaaatgtaagaaagaagaatggatgacggaggaaattctagagttgatgaatgaaagaagaaaaacaaaaccattaataagacccgctataaacagcttcaaaaccaaataagaagaaaaattagggaggctaaagaaacctacttctctgaaaaatgtaaagaaatagaagaacttcaaaacacatatgcaacttcaacctacataaaaaagtcaaagaactagccggaataggaaatagaagaacctcaaatatattgctcgacaaaaacggaaatattataatggagacagaacgaaaactacgacgatggaaagagtacatcgaggaactatttcatgaccagagagaagctagtacatccgtagatagccaaaccggagatgtaggcccagagataaccaaatcagaggttagtcaggcaataaactctatgaaaaccaataaatctgctggtccagatgaattacctagcgagctgataaagttggtcaacgagaaaaacctggacataatagtagaactgttcaacgctatctatactacgggaatcatccctagagaaatgttgacatcagcatttgtgtgtttgccaaagaaagtgaatgccaaagaatgcagtgactaccgaaccataagcttaatgtcacataccttgaaaattctgctgaaaattatccacgccagaatacactctaaactggagctggatattagtgacactcaatatgggttccgcaatggtatgggtaccagagaggcattattctccttcaacgtgctgacacagagatgtttggatgttaaccgtcctctttacgtctgttttatagactacaataaagcgtttgataaagtaaaacatgatcgactcatggaaattctaaaaaataaaaacctagatgaaagagatttaagactaataacacacctctattacaatcagcgagcaatagtaagaattgaaaaagaaacatctgaagaaatggaaataaagagaggagtcaggcaaggctgcatactatcacctctattatttaacgcttattctgaagaggtaatgcgagaaactctggaagatgaaacagtcggcataagagtaaatggagtcttagttaacaacatcagatatgcagatgatacagtaataatagccgatagtttacaagacctgcaaagactcatgagtaaaatagtaaggtgtagtagggagtacggactctctctcaatatcaaaaagacgaagtttatgaaaattagtaaaaacaaccataatactaacgaaatcttgatagtagagggccagcagatcgaaagagtaaaaaagtacacttacctaggaacacttataacagaaaataatgactacactgcagaaatcaaagtcagaatcgaaaaagcacgttctaattttataaaaatgaaaaaggtcctatgtagcaaagatttaacattagctcttaaagtacgcctaacaaaatgttacgtctacagtgtactatactatggagtggaatcatggacgttaaatgtagagacaatgagacgacttaacgcctttgaaatgtggacctatagaagaattatgagggtttcctgggtagatagagttacgaacaatgaaagtactgagaagaataggtaaagaaaaggaagttgaacttacaattaaagaaagaaagctacagtatctcggacatgtgatgcggggcgagaagtatggcatcctgcgactcataatgcaaggaaagatagatggcagaagaagcatcggaagaagacgaatttcatggctgaagaacctaagagaatggtttggatgcagctcaaaacaactataataataataataataataataataataatacgaacacacctcacaaaggcacaaaaacaccaccctaaaagtgcagtagaacgaacgacattaccccggtatttaggaggaagaggacttatggatataggtgagcaattagataaacaaattgctaatttaagaacttattttcagatgcaggctgagacatctactctacatcgcgctatctgcgcagtagatgacacaacaccgatcaaactgagggaaccagaaatgcgcataaaccacctcactaaagacgaaaaactgcgcacctggatgggtaaacctctacacgggcgacatcccaatgaggtcagccaagattatgtcgacaatatagcgtcgaactactggttgacatcaggaaagatgttccctgaaacggagggttcattactggccattcaggatcaggttataccaaccagaaattacctgaaatatatcatcaaagaccctcaggttcaaaacgacagatgccgatatggatgtcaagcccaagaaaccatccaacatcttacagggggctgccaggcatttgctgcaactgaatacaaggaacggcatgacgcagtgggaaaaatccttcatcaagagatagctatcaagctgggacttctccaaacggaccatctcccatattatcaatacgtccctgagagtatgcttgaggatggcaactacaagctatactgggaccgcactgtgctcacagaccaaacagtggcacataatagaccagatctcgtactagttaataaattaacaagacaaacaacactaattgatgtggcgatacctaacaacaataatctacgtagtaaatttactgaaaagatcgccaagtacagagatctggaaattcaaatacgaagacaatggagaatgcaaagtacccagacgatacctattattatgtctactactggagtcattccgaagaacctcctcgaaagcataaaaaggctgggtctaaatgaacatatttacaagatcatgcag

SEQ ID NO: 615 - DNA, 3405 bp, Diabrotica virgifera
  SmartBlast Evalue=0; Info=Endonuclease-reverse transcriptase n= 1 Tax=Bombyx mori RepID=D5LB38_BOMMO
agcgaactccaaaaaacattacatctcacagcatctagagacataacagtgatcatgggtgatttaacgcaaaaattggagaaggaaaatgctaccctaatgtatgacccatatgggcttggcgaacgaaacgacagaggggatcgcctaatagaattttgccaggagcataatgttagtagtcgcaaatacattctttaaattacctaagcgacgcctttatacatggaaatcccagctgacaaagacaacaaaatcgtcagaaatcaaattgactacatcctaataaagcacagatatcgaaactcaattcaggcagtaaaggcatatccaggagcagacgtatcttctgatcacagtcttcttattgctaggtttcaacttcaactaaaaaagacgcaaaaaagccgcaacaacaataaacttaacatacagaaactaaagtcagaagaaacaaaagaaaatctgaaacacgaaatcaacacaaatctagacagaaacccaggaaataattgcaacgtagaacagcagtggcaattcttcaaaacctctatattagaaccaagtaagaaagtacttactacaaccaaatgtaagaaagaagaatggatgacggaggaaattctagagttgatgaatgaaagaagaaaaacaaaaccattaataagacccgctataaacagcttcaaaaccaaataagaagaaaaattagggaggctaaagaaacctacttctctgaaaaatgtaaagaaatagaagaacttcaaaacacatatgcaacttcaacctacataaaaaagtcaaagaactagccggaataggaaatagaagaacctcaaatatattgctcgacaaaaacggaaatattataatggagacagaacgaaaactacgacgatggaaagagtacatcgaggaactatttcatgaccagagagaagctagtacatccgtagatagccaaaccggagatgtaggcccagagataaccaaatcagaggttagtcaggcaataaactctatgaaaaccaataaatctgctggtccagatgaattacctagcgagctgataaagttggtcaacgagaaaaacctggacataatagtagaactgttcaacgctatctatactacgggaatcatccctagagaaatgttgacatcagcatttgtgtgtttgccaaagaaagtgaatgccaaagaatgcagtgactaccgaaccataagcttaatgtcacataccttgaaaattctgctgaaaattatccacgccagaatacactctaaactggagctggatattagtgacactcaatatgggttccgcaatggtatgggtaccagagaggcattattctccttcaacgtgctgacacagagatgtttggatgttaaccgtcctctttacgtctgttttatagactacaataaagcgtttgataaagtaaaacatgatcgactcatggaaattctaaaaaataaaaacctagatgaaagagatttaagactaataacacacctctattacaatcagcgagcaatagtaagaattgaaaaagaaacatctgaagaaatggaaataaagagaggagtcaggcaaggctgcatactatcacctctattatttaacgcttattctgaagaggtaatgcgagaaactctggaagatgaaacagtcggcataagagtaaatggagtcttagttaacaacatcagatatgcagatgatacagtaataatagccgatagtttacaagacctgcaaagactcatgagtaaaatagtaaggtgtagtagggagtacggactctctctcaatatcaaaaagacgaagtttatgaaaattagtaaaaacaaccataatactaacgaaatcttgatagtagagggccagcagatcgaaagagtaaaaaagtacacttacctaggaacacttataacagaaaataatgactacactgcagaaatcaaagtcagaatcgaaaaagcacgttctaattttataaaaatgaaaaaggtcctatgtagcaaagatttaacattagctcttaaagtacgcctaacaaaatgttacgtctacagtgtactatactatggagtggaatcatggacgttaaatgtagagacaatgagacgacttaacgcctttgaaatgtggacctatagaagaattatgagggtttcctgggtagatagagttacgaacaatgaaagtactgagaagaataggtaaagaaaaggaagttgaacttacaattaaagaaagaaagctacagtatctcggacatgtgatgcggggcgagaagtatggcatcctgcgactcataatgcaaggaaagatagatggcagaagaagcatcggaagaagacgaatttcatggctgaagaacctaagagaatggtttggatgcagctcaaaacaactataataataataataataataataataataatacgaacacacctcacaaaggcacaaaaacaccaccctaaaagtgcagtagaacgaacgacattaccccggtatttaggaggaagaggacttatggatataggtgagcaattagataaacaaattgctaatttaagaacttattttcagatgcaggctgagacatctactctacatcgcgctatctgcgcagtagatgacacaacaccgatcaaactgagggaaccagaaatgcgcataaaccaccttactaaggacgaaaaagtgcgcacctggatgggtaaacctctgcacgggcgacatcccaatgaggtcagccaagattatgtcgacaatatagcgtcgaactactggttgacatcaggaaagatgttccctgaaacggagggttcattactggccattcaggatcaggttataccaaccagaaattacctgaaatatatcatcaaagaccctcaggttcaaaacgacagatgccgatatggatgtcaagcccaagaaaccatccaacatcttacagggggctgccaggcatttgctgcaactgaatacaaggaacggcatgacgcagtgggaaaaatccttcatcaagagatagctatcaagctgggacttctccaaacggaccatctcccatattatcaatacgtccctgagagtatgcttgaggatggcaactacaagctatactgggaccgcactgtgctcacagaccaaacagtggcacataatagaccagatctcgtactagttaataaattaacaagacaaacaacactaattgatgtggcgatacctaacaacaataatctacgtagtaaattcactgaaaagatctccaagtacagagatctagaaattcaaatacgaaggcaatggagaatgcaaagtacccagacgatacctattgttatgtttactactggagtcattccgaagaacctcct

SEQ ID NO: 616 - DNA, 3405 bp, Diabrotica virgifera
  SmartBlast Evalue=0; Info=Endonuclease-reverse transcriptase n= 1 Tax=Bombyx mori RepID=D5LB38_BOMMO
agcgaactccaaaaaacattacatctcacagcatctagagacataacagtgatcatgggtgatttaacgcaaaaattggagaaggaaaatgctaccctaatgtatgacccatatgggcttggcgaacgaaacgacagaggggatcgcctaatagaattttgccaggagcataatgttagtagtcgcaaatacattctttaaattacctaagcgacgcctttatacatggaaatcccagctgacaaagacaacaaaatcgtcagaaatcaaattgactacatcctaataaagcacagatatcgaaactcaattcaggcagtaaaggcatatccaggagcagacgtatcttctgatcacagtcttcttattgctaggtttcaacttcaactaaaaaagacgcaaaaaagccgcaacaacaataaacttaacatacagaaactaaagtcagaagaaacaaaagaaaatctgaaacacgaaatcaacacaaatctagacagaaacccaggaaataattgcaacgtagaacagcagtggcaattcttcaaaacctctatattagaaccaagtaagaaagtacttactacaaccaaatgtaagaaagaagaatggatgacggaggaaattctagagttgatgaatgaaagaagaaaaacaaaaccattaataagacccgctataaacagcttcaaaaccaaataagaagaaaaattagggaggctaaagaaacctacttctctgaaaaatgtaaagaaatagaagaacttcaaaacacatatgcaacttcaacctacataaaaaagtcaaagaactagccggaataggaaatagaagaacctcaaatatattgctcgacaaaaacggaaatattataatggagacagaacgaaaactacgacgatggaaagagtacatcgaggaactatttcatgaccagagagaagctagtacatccgtagatagccaaaccggagatgtaggcccagagataaccaaatcagaggttagtcaggcaataaactctatgaaaaccaataaatctgctggtccagatgaattacctagcgagctgataaagttggtcaacgagaaaaacctggacataatagtagaactgttcaacgctatctatactacgggaatcatccctagagaaatgttgacatcagcatttgtgtgtttgccaaagaaagtgaatgccaaagaatgcagtgactaccgaaccataagcttaatgtcacataccttgaaaattctgctgaaaattatccacgccagaatacactctaaactggagctggatattagtgacactcaatatgggttccgcaatggtatgggtaccagagaggcattattctccttcaacgtgctgacacagagatgtttggatgttaaccgtcctctttacgtctgttttatagactacaataaagcgtttgataaagtaaaacatgatcgactcatggaaattctaaaaaataaaaacctagatgaaagagatttaagactaataacacacctctattacaatcagcgagcaatagtaagaattgaaaaagaaacatctgaagaaatggaaataaagagaggagtcaggcaaggctgcatactatcacctctattatttaacgcttattctgaagaggtaatgcgagaaactctggaagatgaaacagtcggcataagagtaaatggagtcttagttaacaacatcagatatgcagatgatacagtaataatagccgatagtttacaagacctgcaaagactcatgagtaaaatagtaaggtgtagtagggagtacggactctctctcaatatcaaaaagacgaagtttatgaaaattagtaaaaacaaccataatactaacgaaatcttgatagtagagggccagcagatcgaaagagtaaaaaagtacacttacctaggaacacttataacagaaaataatgactacactgcagaaatcaaagtcagaatcgaaaaagcacgttctaattttataaaaatgaaaaaggtcctatgtagcaaagatttaacattagctcttaaagtacgcctaacaaaatgttacgtctacagtgtactatactatggagtggaatcatggacgttaaatgtagagacaatgagacgacttaacgcctttgaaatgtggacctatagaagaattatgagggtttcctgggtagatagagttacgaacaatgaaagtactgagaagaataggtaaagaaaaggaagttgaacttacaattaaagaaagaaagctacagtatctcggacatgtgatgcggggcgagaagtatggcatcctgcgactcataatgcaaggaaagatagatggcagaagaagcatcggaagaagacgaatttcatggctgaagaacctaagagaatggtttggatgcagctcaaaacaactataataataataataataataataataataatacgaacacacctcacaaaggcacaaaaacaccaccctaaaagtgcagtagaacgaacgacattaccccggtatttaggaggaagaggacttatggatataggtgagcaattagataaacaaattgctaatttaagaacttattttcagatgcaggctgagacatctactctacatcgcgctatctgcgcagtagatgacacaacaccgatcaaactgagggaaccagaaatgcgcataaaccacctcactaaagacgaaaaagtgcgcgcctggatgggtaaacctctgcacgggcgacatcccaatgaggtcagccaagattatgtcgacaatatagcgtcgaactactggttgacatcaggaaagatgttccctgaaacggagggttcattactggccattcaggatcaggttataccaaccagaaattacctgaaatatatcatcaaagaccctcaggttcaaaacgacagatgccgatatggatgtcaagcccaagaaaccatccaacatcttacagggggctgccaggcatttgctgcaactgaatacaaggaacggcatgacgcagtgggaaaaatccttcatcaagagatagctatcaagctgggacttctccaaacggaccatctcccatattatcaatacgtccctgagagtatgcttgaggatggcaactacaagctatactgggaccgcactgtgctcacagaccaaacagtggcacataatagaccagatctcgtactagttaataaattaacaagacaaacaacactaattgatgtggcgatacctaacaacaataatctacgtagtaaattcactgaaaagatctccaagtacagagatctagaaattcaaatacgaaggcaatggagaatgcaaagtacccagacgatacctattgttatgtttactactggagtcattccgaagaacctcct

SEQ ID NO: 617 - DNA, 3405 bp, Diabrotica virgifera
  SmartBlast Evalue=0; Info=Endonuclease-reverse transcriptase n= 1 Tax=Bombyx mori RepID=D5LB38_BOMMO
agcgaactccaaaaaacattacatctcacagcatctagagacataacagtgatcatgggtgatttaacgcaaaaattggagaaggaaaatgctaccctaatgtatgacccatatgggcttggcgaacgaaacgacagaggggatcgcctaatagaattttgccaggagcataatgttagtagtcgcaaatacattctttaaattacctaagcgacgcctttatacatggaaatcccagctgacaaagacaacaaaatcgtcagaaatcaaattgactacatcctaataaagcacagatatcgaaactcaattcaggcagtaaaggcatatccaggagcagacgtatcttctgatcacagtcttcttattgctaggtttcaacttcaactaaaaaagacgcaaaaaagccgcaacaacaataaacttaacatacagaaactaaagtcagaagaaacaaaagaaaatctgaaacacgaaatcaacacaaatctagacagaaacccaggaaataattgcaacgtagaacagcagtggcaattcttcaaaacctctatattagaaccaagtaagaaagtacttactacaaccaaatgtaagaaagaagaatggatgacggaggaaattctagagttgatgaatgaaagaagaaaaacaaaaccattaataagacccgctataaacagcttcaaaaccaaataagaagaaaaattagggaggctaaagaaacctacttctctgaaaaatgtaaagaaatagaagaacttcaaaacacatatgcaacttcaacctacataaaaaagtcaaagaactagccggaataggaaatagaagaacctcaaatatattgctcgacaaaaacggaaatattataatggagacagaacgaaaactacgacgatggaaagagtacatcgaggaactatttcatgaccagagagaagctagtacatccgtagatagccaaaccggagatgtaggcccagagataaccaaatcagaggttagtcaggcaataaactctatgaaaaccaataaatctgctggtccagatgaattacctagcgagctgataaagttggtcaacgagaaaaacctggacataatagtagaactgttcaacgctatctatactacgggaatcatccctagagaaatgttgacatcagcatttgtgtgtttgccaaagaaagtgaatgccaaagaatgcagtgactaccgaaccataagcttaatgtcacataccttgaaaattctgctgaaaattatccacgccagaatacactctaaactggagctggatattagtgacactcaatatgggttccgcaatggtatgggtaccagagaggcattattctccttcaacgtgctgacacagagatgtttggatgttaaccgtcctctttacgtctgttttatagactacaataaagcgtttgataaagtaaaacatgatcgactcatggaaattctaaaaaataaaaacctagatgaaagagatttaagactaataacacacctctattacaatcagcgagcaatagtaagaattgaaaaagaaacatctgaagaaatggaaataaagagaggagtcaggcaaggctgcatactatcacctctattatttaacgcttattctgaagaggtaatgcgagaaactctggaagatgaaacagtcggcataagagtaaatggagtcttagttaacaacatcagatatgcagatgatacagtaataatagccgatagtttacaagacctgcaaagactcatgagtaaaatagtaaggtgtagtagggagtacggactctctctcaatatcaaaaagacgaagtttatgaaaattagtaaaaacaaccataatactaacgaaatcttgatagtagagggccagcagatcgaaagagtaaaaaagtacacttacctaggaacacttataacagaaaataatgactacactgcagaaatcaaagtcagaatcgaaaaagcacgttctaattttataaaaatgaaaaaggtcctatgtagcaaagatttaacattagctcttaaagtacgcctaacaaaatgttacgtctacagtgtactatactatggagtggaatcatggacgttaaatgtagagacaatgagacgacttaacgcctttgaaatgtggacctatagaagaattatgagggtttcctgggtagatagagttacgaacaatgaaagtactgagaagaataggtaaagaaaaggaagttgaacttacaattaaagaaagaaagctacagtatctcggacatgtgatgcggggcgagaagtatggcatcctgcgactcataatgcaaggaaagatagatggcagaagaagcatcggaagaagacgaatttcatggctgaagaacctaagagaatggtttggatgcagctcaaaacaactataataataataataataataataataataatacgaacacacctcacaaaggcacaaaaacaccaccctaaaagtgcagtagaacgaacgacattaccccggtatttaggaggaagaggacttatggatataggtgagcaattagataaacaaattgctaatttaagaacttattttcagatgcaggctgagacatctactctacatcgcgctatctgcgcagtagatgacacaacaccgatcaaactgagggaaccagaaatgcgcataaaccacctcactaaagacgaaaaactgcgcacctggatgggtaaacctctacacgggcgacatcccaatgaggtcagccaagattatgtcgacaatatagcgtcgaactactggttgacatcaggaaagatgttccctgaaacggagggttcattactggccattcaggatcaggttataccaaccagaaattacctgaaatatatcatcaaagaccctcaggttcaaaacgacagatgccgatatggatgtcaagcccaagaaaccatccaacatcttacagggggctgccaggcatttgctgcaactgaatacaaggaacggcatgacgcagtgggaaaaatccttcatcaagagatagctatcaagctgggacttctccaaacggaccatctcccatattatcaatacgtccctgagagtatgcttgaggatggcaactacaagctatactgggaccgcactgtgctcacagaccaaacagtggcacataatagaccagatctcgtactagttaataaattaacaagacaaacaacactaattgatgtggcgatacctaacaacaataatctacgtagtaaattcactgaaaagatctccaagtacagagatctagaaattcaaatacgaaggcaatggagaatgcaaagtacccagacgatacctattgttatgtttactactggagtcattccgaagaacctcct

SEQ ID NO: 618 - DNA, 1100 bp, Diabrotica virgifera
tatcttaaagtacgtaattgagaccagtccccagaatcaaaggaatacttcaaatggcgtatgcatttacagtcccgacgattcattggacaaatttgtacttacaacgtggtatgtggggtctattctactaatttgccgcttttagattaaataataagcactgactttaccctgatcactagtttatgtttactgatgggtacaaataaatccgctttaacagtcatggaggagtaagggcgaacccgaaaaatgctcatttcaaaaatgttgccactagcggacatcacaaaatatacatgaaaaatgtcttcaccgataatgttgccactagcggacatcacaaaatatacatgaaaaacaaaatgttgaaaatattaattgtgacgctggtcctttgggctggtgtcagttatgcaaaagatgtcaaaaatgacctgagtgacggtattttatttaattctgcagatgataaaatattgtttccatcattaatagacccaaagccaacagaaataccaccaccacctcctatcaatctaccaggtccaccagagcctccaagtgacgtaccggaggccctatataacaaacgtcccagacctccaccaagcaaacgacctagaccaccaggtcctccaccaagcggacgtcctaaaccgccaggtcctccaccaagcaaaagtcctagaccaccaggtcctccaccaagcagacgtccaagaccacctggccctccaccaagcagacgccctagaccaccaggtcctcctccaagcagacgtcctagaccaccaggtcctccaccaagcagacgtccaaaaccaccaggtcctccaccaagcagacgtccaagaccaccaggccctccaccaagcagacgtccaagaccaccaggccctccaccaagcagacgtccaagaccaccaggccctccaccaagcagacgtccaagaccaccaggccctccaccaagcagaggtccaagaccacctggccctccaccaagcagacgtcctagaccaccaggtcctccaccaagtagacgccctagaccaccaggtcctccaccaagcaaacccctaaaccaccaggcc

SEQ ID NO: 619 - DNA, 1103 bp, Diabrotica virgifera
tatcttaaagtacgtaattgagaccagtccccagaatcaaaggaatacttcaaatggcgtatgcatttacagtcccgacgattcattggacaaatttgtacttacaacgtggtatgtggggtctattctactaatttgccgcttttagattaaataataagcactgactttaccctgatcactagtttatgtttactgatgggtacaaataaatccgctttaacagtcatggaggagtaagggcgaacccgaaaaatgctcatttcaaaaatgttgccactagcggacatcacaaaatatacatgaaaaatgtcttcaccgataatgttgccactagcggacatcacaaaatatacatgaaaaacaaaatgttgaaaatattaattgtgacgctggtcctttgggctggtgtcagttatgcaaaagatgtcaaaaatgacctgagtgacggtattttatttaattctgcagatgataaaatattgtttccatcattaatagacccaaagccaacagaaataccaccaccacctcctatcaatctaccaggtccaccagagcctccaagtgacgtaccggaggccctatataacaaacgtcccagacctccaccaagcaaacgacctagaccaccaggtcctccaccaagcggacgtcctaaaccgccaggtcctccaccaagcaaaagtcctagaccaccaggtcctccaccaagcagacgtccaagaccacctggccctccaccaagcagacgccctagaccaccaggtcctccaccaagcagacgtccaaaaccaccaggtcctcctccaagcagacgtcctagaccaccaggtcctccaccaagcagacgtccaaaaccaccaggccctccaccaagcagacgtccaagaccaccaggccctccaccaagcagacgtccaagaccaccaggccctccaccaagcagacgtccaagaccaccaggcccgccaccaagcagacgccctagaccaccaggccccaccaagcagacggcctagaccaccagggccctccaccaaggcagaccgttcaagaccaccaggctccttcaccaagcagtacgttccaagaccaccagg

SEQ ID NO: 620 - DNA, 1100 bp, Diabrotica virgifera
tatcttaaagtacgtaattgagaccagtccccagaatcaaaggaatacttcaaatggcgtatgcatttacagtcccgacgattcattggacaaatttgtacttacaacgtggtatgtggggtctattctactaatttgccgcttttagattaaataataagcactgactttaccctgatcactagtttatgtttactgatgggtacaaataaatccgctttaacagtcatggaggagtaagggcgaacccgaaaaatgctcatttcaaaaatgttgccactagcggacatcacaaaatatacatgaaaaatgtcttcaccgataatgttgccactagcggacatcacaaaatatacatgaaaaacaaaatgttgaaaatattaattgtgacgctggtcctttgggctggtgtcagttatgcaaaagatgtcaaaaatgacctgagtgacggtattttatttaattctgcagatgataaaatattgtttccatcattaatagacccaaagccaacagaaataccaccaccacctcctatcaatctaccaggtccaccagagcctccaagtgacgtaccggaggccctatataacaaacgtcccagacctccaccaagcaaacgacctagaccaccaggtcctccaccaagcggacgtcctaaaccgccaggtcctccaccaagcaaaagtcctagaccaccaggtcctccaccaagcagacgtccaagaccacctggccctccaccaagcagacgccctagaccaccaggtcctccaccaagcagacgtccaaaaccaccaggtcctcctccaagcagacgtcctagaccaccaggtcctccaccaagcagacgtccaaaaccaccaggccctccaccaagcagacgtccaagaccaccaggccctccaccaagcagacgtccaagaccaccaggccctccaccaagcagacgtccaagaccaccaggccctccaccaagcagaggtccaagaccacctggccctccaccaagcagacgtcctagaccaccaggtcctccaccaagtagacgccctagaccaccaggtcctccaccaagcaaacccctaaaccaccaggcc

SEQ ID NO: 621 - DNA, 772 bp, Diabrotica virgifera
acaaatgttgaaaatattaattgtgacgctggtcctttgggctggtgtcagttatgcaaaagatgtcaaaaatgacctaagtgacggtattttatctaattctgcagatgataaaatattgtttccatcattaatagacccaaagccaacagaaataccaccaccacctcctatcaatctaccaggtccaccagagcctccaagtgacgtaccggaggccctatataacaaacgtcccagacctccaccaagcaaacgacctagaccaccaggtcctccaccaagcagacgtcctaaaccaccaggtcctcctccaagcagacgtcctagaccaccaggtcctccaccaagcagacgtccaagaccacctggccctccaccaagcagacgccctagaccaccaggtcctccaccaagcagacgtccaaaaccaccaggtcctcctccaagcagacgtcctagaccaccaggtcctccaccaagcagacgtccaaaaccaccaggtcctccaccaagcagacgtccaagaccaccaggccctccaccaagcagacgtccaagaccaccaggccctccaccaagcagacgtccaagaccaccaggccctccaccaagcagacgtccaagaccaccaggcccgccaccaagcagacgccctagaccaccaggccccaccaagcagacggcctagaccaccagggccctccaccaaggcagaccgttcaagaccaccaggctccttcaccaagcagtacgttccaagaccaccagg

SEQ ID NO: 622 - DNA, 769 bp, Diabrotica virgifera
  SmartBlast Evalue=5E-10; Info="Pupal cuticle protein G1A, putative n=1 Tax=Perkinsus marinus ATCC 50983 RepID=C5LS33_ 9ALVE"
acaaatgttgaaaatattaattgtgacgctggtcctttgggctggtgtcagttatgcaaaagatgtcaaaaatgacctaagtgacggtattttatctaattctgcagatgataaaatattgtttccatcattaatagacccaaagccaacagaaataccaccaccacctcctatcaatctaccaggtccaccagagcctccaagtgacgtaccggaggccctatataacaaacgtcccagacctccaccaagcaaacgacctagaccaccaggtcctccaccaagcagacgtcctaaaccaccaggtcctcctccaagcagacgtcctagaccaccaggtcctccaccaagcagacgtccaagaccacctggccctccaccaagcagacgccctagaccaccaggtcctccaccaagcagacgtccaaaaccaccaggtcctcctccaagcagacgtcctagaccaccaggtcctccaccaagcagacgtccaaaaccaccaggtcctccaccaagcagacgtccaagaccaccaggccctccaccaagcagacgtccaagaccaccaggccctccaccaagcagacgtccaagaccaccaggccctccaccaagcagacgtccaagaccaccaggccctccaccaagcagaggtccaagaccacctggccctccaccaagcagacgtcctagaccaccaggtcctccaccaagtagacgccctagaccaccaggtcctccaccaagcaaacccctaaaccaccaggcc

SEQ ID NO: 623 - DNA, 739 bp, Diabrotica virgifera
acaaatgttgaaaatattaattgtgacgctggtcctttgggctggtgtcagttatgcaaaagatgtcaaaaatgacctaagtgacggtattttatctaattctgcagatgataaaatattgtttccatcattaatagacccaaagccaacagaaataccaccaccacctcctatcaatctaccaggtccaccagagcctccaagtgacgtaccggaggccctatataacaaacgtcccagacctccaccaagcaaacgacctagaccaccaggtcctccaccaagcagacgtcctaaaccaccaggtcctcctccaagcagacgtcctagaccaccaggtcctccaccaagcagacgtccaagaccacctggccctccaccaagcagacgccctagaccaccaggtcctcctccaagcagacgtcctagaccaccaggtcctccaccaagcagacgtccaaaaccaccaggtcctccaccaagcagacgtccaagaccaccaggccctccaccaagcagacgtccaagaccaccaggccctccaccaagcagacgtccaagaccaccaggccctccaccaagcagacgtccaagaccaccaggcccgccaccaagcagacgccctagaccaccaggccccaccaagcagacggcctagaccaccagggccctccaccaaggcagaccgttcaagaccaccaggctccttcaccaagcagtacgttccaagaccaccagg

SEQ ID NO: 624 - DNA, 736 bp, Diabrotica virgifera
  SmartBlast Evalue=0.000000004; Info="Pupal cuticle protein G1A, putative n=1 Tax=Perkinsus marinus ATCC 50983 RepID=C5LS33_ 9ALVE"
acaaatgttgaaaatattaattgtgacgctggtcctttgggctggtgtcagttatgcaaaagatgtcaaaaatgacctaagtgacggtattttatctaattctgcagatgataaaatattgtttccatcattaatagacccaaagccaacagaaataccaccaccacctcctatcaatctaccaggtccaccagagcctccaagtgacgtaccggaggccctatataacaaacgtcccagacctccaccaagcaaacgacctagaccaccaggtcctccaccaagcagacgtcctaaaccaccaggtcctcctccaagcagacgtcctagaccaccaggtcctccaccaagcagacgtccaagaccacctggccctccaccaagcagacgccctagaccaccaggtcctcctccaagcagacgtcctagaccaccaggtcctccaccaagcagacgtccaaaaccaccaggtcctccaccaagcagacgtccaagaccaccaggccctccaccaagcagacgtccaagaccaccaggccctccaccaagcagacgtccaagaccaccaggccctccaccaagcagacgtccaagaccaccaggccctccaccaagcagaggtccaagaccacctggccctccaccaagcagacgtcctagaccaccaggtcctccaccaagtagacgccctagaccaccaggtcctccaccaagcaaacccctaaaccaccaggcc

SEQ ID NO: 625 - DNA, 739 bp, Diabrotica virgifera
acaaatgttgaaaatattaattgtgacgctggtcctttgggctggtgtcagttatgcaaaagatgtcaaaaatgacctaagtgacggtattttatctaattctgcagatgataaaatattgtttccatcattaatagacccaaagccaacagaaataccaccaccacctcctatcaatctaccaggtccaccagagcctccaagtgacgtaccggaggccctatataacaaacgtcccagacctccaccaagcaaacgacctagaccaccaggtcctccaccaagcagacgtcctaaaccaccaggtcctcctccaagcagacgtcctagaccaccaggtcctccaccaagcagacgtccaagaccacctggccctccaccaagcagacgccctagaccaccaggtcctccaccaagcagacgtccaaaaccaccaggtcctcctccaagcagacgtcctagaccaccaggtcctccaccaagcagacgtccaaaaccaccaggccctccaccaagcagacgtccaagaccaccaggccctccaccaagcagacgtccaagaccaccaggccctccaccaagcagacgtccaagaccaccaggcccgccaccaagcagacgccctagaccaccaggccccaccaagcagacggcctagaccaccagggccctccaccaaggcagaccgttcaagaccaccaggctccttcaccaagcagtacgttccaagaccaccagg

SEQ ID NO: 626 - DNA, 736 bp, Diabrotica virgifera
  SmartBlast Evalue=0.000000004; Info="Pupal cuticle protein G1A, putative n=1 Tax=Perkinsus marinus ATCC 50983 RepID=C5LS33_ 9ALVE"
acaaatgttgaaaatattaattgtgacgctggtcctttgggctggtgtcagttatgcaaaagatgtcaaaaatgacctaagtgacggtattttatctaattctgcagatgataaaatattgtttccatcattaatagacccaaagccaacagaaataccaccaccacctcctatcaatctaccaggtccaccagagcctccaagtgacgtaccggaggccctatataacaaacgtcccagacctccaccaagcaaacgacctagaccaccaggtcctccaccaagcagacgtcctaaaccaccaggtcctcctccaagcagacgtcctagaccaccaggtcctccaccaagcagacgtccaagaccacctggccctccaccaagcagacgccctagaccaccaggtcctccaccaagcagacgtccaaaaccaccaggtcctcctccaagcagacgtcctagaccaccaggtcctccaccaagcagacgtccaaaaccaccaggccctccaccaagcagacgtccaagaccaccaggccctccaccaagcagacgtccaagaccaccaggccctccaccaagcagacgtccaagaccaccaggccctccaccaagcagaggtccaagaccacctggccctccaccaagcagacgtcctagaccaccaggtcctccaccaagtagacgccctagaccaccaggtcctccaccaagcaaacccctaaaccaccaggcc

SEQ ID NO: 627 - DNA, 772 bp, Diabrotica virgifera
acaaatgttgaaaatattaattgtgacgctggtcctttgggctggtgtcagttatgcaaaagatgtcaaaaatgacctgagtgacggtattttatttaattctgcagatgataaaatattgtttccatcattaatagacccaaagccaacagaaataccaccaccacctcctatcaatctaccaggtccaccagagcctccaagtgacgtaccggaggccctatataacaaacgtcccagacctccaccaagcaaacgacctagaccaccaggtcctccaccaagcggacgtcctaaaccgccaggtcctccaccaagcaaaagtcctagaccaccaggtcctccaccaagcagacgtccaagaccacctggccctccaccaagcagacgccctagaccaccaggtcctccaccaagcagacgtccaaaaccaccaggtcctcctccaagcagacgtcctagaccaccaggtcctccaccaagcagacgtccaaaaccaccaggtcctccaccaagcagacgtccaagaccaccaggccctccaccaagcagacgtccaagaccaccaggccctccaccaagcagacgtccaagaccaccaggccctccaccaagcagacgtccaagaccaccaggcccgccaccaagcagacgccctagaccaccaggccccaccaagcagacggcctagaccaccagggccctccaccaaggcagaccgttcaagaccaccaggctccttcaccaagcagtacgttccaagaccaccagg

SEQ ID NO: 628 - DNA, 1136 bp, Diabrotica virgifera
tatcttaaagtacgtaattgagaccagtccccagaatcaaaggaatacttcaaatggcgtatgcatttacagtcccgacgattcattggacaaatttgtacttacaacgtggtatgtggggtctattctactaatttgccgcttttagattaaataataagcactgactttaccctgatcactagtttatgtttactgatgggtacaaataaatccgctttaacagtcatggaggagtaagggcgaacccgaaaaatgctcatttcaaaaatgttgccactagcggacatcacaaaatatacatgaaaaatgtcttcaccgataatgttgccactagcggacatcacaaaatatacatgaaaaacaaaatgttgaaaatattaattgtgacgctggtcctttgggctggtgtcagttatgcaaaagatgtcaaaaatgacctaagtgacggtattttatctaattctgcagatgataaaatattgtttccatcattaatagacccaaagccaacagaaataccaccaccacctcctatcaatctaccaggtccaccagagcctccaagtgacgtaccggaggccctatataacaaacgtcccagacctccaccaagcaaacgacctagaccaccaggtcctccaccaagcagacgtcctaaaccaccaggtcctcctccaagcagacgtcctagaccaccaggtcctccaccaagcagacgtccaagaccacctggccctccaccaagcagacgccctagaccaccaggtcctccaccaagcagacgtccaaaaccaccaggtcctcctccaagcagacgtcctagaccaccaggtcctccaccaagcagacgtccaaaaccaccaggtcctccaccaagcagacgtccaagaccaccaggccctccaccaagcagacgtccaagaccaccaggccctccaccaagcagacgtccaagaccaccaggccctccaccaagcagacgtccaagaccaccaggcccgccaccaagcagacgccctagaccaccaggccccaccaagcagacggcctagaccaccagggccctccaccaaggcagaccgttcaagaccaccaggctccttcaccaagcagtacgttccaagaccaccagg

SEQ ID NO: 629 - DNA, 769 bp, Diabrotica virgifera
acaaatgttgaaaatattaattgtgacgctggtcctttgggctggtgtcagttatgcaaaagatgtcaaaaatgacctgagtgacggtattttatttaattctgcagatgataaaatattgtttccatcattaatagacccaaagccaacagaaataccaccaccacctcctatcaatctaccaggtccaccagagcctccaagtgacgtaccggaggccctatataacaaacgtcccagacctccaccaagcaaacgacctagaccaccaggtcctccaccaagcggacgtcctaaaccgccaggtcctccaccaagcaaaagtcctagaccaccaggtcctccaccaagcagacgtccaagaccacctggccctccaccaagcagacgccctagaccaccaggtcctccaccaagcagacgtccaaaaccaccaggtcctcctccaagcagacgtcctagaccaccaggtcctccaccaagcagacgtccaaaaccaccaggtcctccaccaagcagacgtccaagaccaccaggccctccaccaagcagacgtccaagaccaccaggccctccaccaagcagacgtccaagaccaccaggccctccaccaagcagacgtccaagaccaccaggccctccaccaagcagaggtccaagaccacctggccctccaccaagcagacgtcctagaccaccaggtcctccaccaagtagacgccctagaccaccaggtcctccaccaagcaaacccctaaaccaccaggcc

SEQ ID NO: 630 - DNA, 739 bp, Diabrotica virgifera
acaaatgttgaaaatattaattgtgacgctggtcctttgggctggtgtcagttatgcaaaagatgtcaaaaatgacctgagtgacggtattttatttaattctgcagatgataaaatattgtttccatcattaatagacccaaagccaacagaaataccaccaccacctcctatcaatctaccaggtccaccagagcctccaagtgacgtaccggaggccctatataacaaacgtcccagacctccaccaagcaaacgacctagaccaccaggtcctccaccaagcggacgtcctaaaccgccaggtcctccaccaagcaaaagtcctagaccaccaggtcctccaccaagcagacgtccaagaccacctggccctccaccaagcagacgccctagaccaccaggtcctcctccaagcagacgtcctagaccaccaggtcctccaccaagcagacgtccaaaaccaccaggtcctccaccaagcagacgtccaagaccaccaggccctccaccaagcagacgtccaagaccaccaggccctccaccaagcagacgtccaagaccaccaggccctccaccaagcagacgtccaagaccaccaggcccgccaccaagcagacgccctagaccaccaggccccaccaagcagacggcctagaccaccagggccctccaccaaggcagaccgttcaagaccaccaggctccttcaccaagcagtacgttccaagaccaccagg

SEQ ID NO: 631 - DNA, 736 bp, Diabrotica virgifera
acaaatgttgaaaatattaattgtgacgctggtcctttgggctggtgtcagttatgcaaaagatgtcaaaaatgacctgagtgacggtattttatttaattctgcagatgataaaatattgtttccatcattaatagacccaaagccaacagaaataccaccaccacctcctatcaatctaccaggtccaccagagcctccaagtgacgtaccggaggccctatataacaaacgtcccagacctccaccaagcaaacgacctagaccaccaggtcctccaccaagcggacgtcctaaaccgccaggtcctccaccaagcaaaagtcctagaccaccaggtcctccaccaagcagacgtccaagaccacctggccctccaccaagcagacgccctagaccaccaggtcctcctccaagcagacgtcctagaccaccaggtcctccaccaagcagacgtccaaaaccaccaggtcctccaccaagcagacgtccaagaccaccaggccctccaccaagcagacgtccaagaccaccaggccctccaccaagcagacgtccaagaccaccaggccctccaccaagcagacgtccaagaccaccaggccctccaccaagcagaggtccaagaccacctggccctccaccaagcagacgtcctagaccaccaggtcctccaccaagtagacgccctagaccaccaggtcctccaccaagcaaacccctaaaccaccaggcc

SEQ ID NO: 632 - DNA, 739 bp, Diabrotica virgifera
acaaatgttgaaaatattaattgtgacgctggtcctttgggctggtgtcagttatgcaaaagatgtcaaaaatgacctgagtgacggtattttatttaattctgcagatgataaaatattgtttccatcattaatagacccaaagccaacagaaataccaccaccacctcctatcaatctaccaggtccaccagagcctccaagtgacgtaccggaggccctatataacaaacgtcccagacctccaccaagcaaacgacctagaccaccaggtcctccaccaagcggacgtcctaaaccgccaggtcctccaccaagcaaaagtcctagaccaccaggtcctccaccaagcagacgtccaagaccacctggccctccaccaagcagacgccctagaccaccaggtcctccaccaagcagacgtccaaaaccaccaggtcctcctccaagcagacgtcctagaccaccaggtcctccaccaagcagacgtccaaaaccaccaggccctccaccaagcagacgtccaagaccaccaggccctccaccaagcagacgtccaagaccaccaggccctccaccaagcagacgtccaagaccaccaggcccgccaccaagcagacgccctagaccaccaggccccaccaagcagacggcctagaccaccagggccctccaccaaggcagaccgttcaagaccaccaggctccttcaccaagcagtacgttccaagaccaccagg

SEQ ID NO: 633 - DNA, 736 bp, Diabrotica virgifera
acaaatgttgaaaatattaattgtgacgctggtcctttgggctggtgtcagttatgcaaaagatgtcaaaaatgacctgagtgacggtattttatttaattctgcagatgataaaatattgtttccatcattaatagacccaaagccaacagaaataccaccaccacctcctatcaatctaccaggtccaccagagcctccaagtgacgtaccggaggccctatataacaaacgtcccagacctccaccaagcaaacgacctagaccaccaggtcctccaccaagcggacgtcctaaaccgccaggtcctccaccaagcaaaagtcctagaccaccaggtcctccaccaagcagacgtccaagaccacctggccctccaccaagcagacgccctagaccaccaggtcctccaccaagcagacgtccaaaaccaccaggtcctcctccaagcagacgtcctagaccaccaggtcctccaccaagcagacgtccaaaaccaccaggccctccaccaagcagacgtccaagaccaccaggccctccaccaagcagacgtccaagaccaccaggccctccaccaagcagacgtccaagaccaccaggccctccaccaagcagaggtccaagaccacctggccctccaccaagcagacgtcctagaccaccaggtcctccaccaagtagacgccctagaccaccaggtcctccaccaagcaaacccctaaaccaccaggcc

SEQ ID NO: 634 - DNA, 681 bp, Diabrotica virgifera
aacaaaatgttgaaaatattagttgtgacgctagtcctttgggctggtgtcagttatgcaaaagatgtcaaaaatgacctaaatgacgttattttatctaattctgaagataacaaaatattgattcaatcaataatagactcaaagccaacagaaccaacaccaccaccccctactgatcctcctggtccaccagagcctccaagtccacctggtcccccaccaagcagacgtcctagaccaccaggtcctccaccaagcagacgtccaagaccacctggccctccaccaagcagacgccctagaccaccaggtcctccaccaagcagacgtccaaaaccaccaggtcctcctccaagcagacgtcctagaccaccaggtcctccaccaagcagacgtccaaaaccaccaggtcctccaccaagcagacgtccaagaccaccaggccctccaccaagcagacgtccaagaccaccaggccctccaccaagcagacgtccaagaccaccaggccctccaccaagcagacgtccaagaccaccaggcccgccaccaagcagacgccctagaccaccaggccccaccaagcagacggcctagaccaccagggccctccaccaaggcagaccgttcaagaccaccaggctccttcaccaagcagtacgttccaagaccaccagg

SEQ ID NO: 635 - DNA, 678 bp, Diabrotica virgifera
aacaaaatgttgaaaatattagttgtgacgctagtcctttgggctggtgtcagttatgcaaaagatgtcaaaaatgacctaaatgacgttattttatctaattctgaagataacaaaatattgattcaatcaataatagactcaaagccaacagaaccaacaccaccaccccctactgatcctcctggtccaccagagcctccaagtccacctggtcccccaccaagcagacgtcctagaccaccaggtcctccaccaagcagacgtccaagaccacctggccctccaccaagcagacgccctagaccaccaggtcctccaccaagcagacgtccaaaaccaccaggtcctcctccaagcagacgtcctagaccaccaggtcctccaccaagcagacgtccaaaaccaccaggtcctccaccaagcagacgtccaagaccaccaggccctccaccaagcagacgtccaagaccaccaggccctccaccaagcagacgtccaagaccaccaggccctccaccaagcagacgtccaagaccaccaggccctccaccaagcagaggtccaagaccacctggccctccaccaagcagacgtcctagaccaccaggtcctccaccaagtagacgccctagaccaccaggtcctccaccaagcaaacccctaaaccaccaggcc

SEQ ID NO: 636 - DNA, 648 bp, Diabrotica virgifera
aacaaaatgttgaaaatattagttgtgacgctagtcctttgggctggtgtcagttatgcaaaagatgtcaaaaatgacctaaatgacgttattttatctaattctgaagataacaaaatattgattcaatcaataatagactcaaagccaacagaaccaacaccaccaccccctactgatcctcctggtccaccagagcctccaagtccacctggtcccccaccaagcagacgtcctagaccaccaggtcctccaccaagcagacgtccaagaccacctggccctccaccaagcagacgccctagaccaccaggtcctcctccaagcagacgtcctagaccaccaggtcctccaccaagcagacgtccaaaaccaccaggtcctccaccaagcagacgtccaagaccaccaggccctccaccaagcagacgtccaagaccaccaggccctccaccaagcagacgtccaagaccaccaggccctccaccaagcagacgtccaagaccaccaggcccgccaccaagcagacgccctagaccaccaggccccaccaagcagacggcctagaccaccagggccctccaccaaggcagaccgttcaagaccaccaggctccttcaccaagcagtacgttccaagaccaccagg

SEQ ID NO: 637 - DNA, 645 bp, Diabrotica virgifera
aacaaaatgttgaaaatattagttgtgacgctagtcctttgggctggtgtcagttatgcaaaagatgtcaaaaatgacctaaatgacgttattttatctaattctgaagataacaaaatattgattcaatcaataatagactcaaagccaacagaaccaacaccaccaccccctactgatcctcctggtccaccagagcctccaagtccacctggtcccccaccaagcagacgtcctagaccaccaggtcctccaccaagcagacgtccaagaccacctggccctccaccaagcagacgccctagaccaccaggtcctcctccaagcagacgtcctagaccaccaggtcctccaccaagcagacgtccaaaaccaccaggtcctccaccaagcagacgtccaagaccaccaggccctccaccaagcagacgtccaagaccaccaggccctccaccaagcagacgtccaagaccaccaggccctccaccaagcagacgtccaagaccaccaggccctccaccaagcagaggtccaagaccacctggccctccaccaagcagacgtcctagaccaccaggtcctccaccaagtagacgccctagaccaccaggtcctccaccaagcaaacccctaaaccaccaggcc

SEQ ID NO: 638 - DNA, 648 bp, Diabrotica virgifera
aacaaaatgttgaaaatattagttgtgacgctagtcctttgggctggtgtcagttatgcaaaagatgtcaaaaatgacctaaatgacgttattttatctaattctgaagataacaaaatattgattcaatcaataatagactcaaagccaacagaaccaacaccaccaccccctactgatcctcctggtccaccagagcctccaagtccacctggtcccccaccaagcagacgtcctagaccaccaggtcctccaccaagcagacgtccaagaccacctggccctccaccaagcagacgccctagaccaccaggtcctccaccaagcagacgtccaaaaccaccaggtcctcctccaagcagacgtcctagaccaccaggtcctccaccaagcagacgtccaaaaccaccaggccctccaccaagcagacgtccaagaccaccaggccctccaccaagcagacgtccaagaccaccaggccctccaccaagcagacgtccaagaccaccaggcccgccaccaagcagacgccctagaccaccaggccccaccaagcagacggcctagaccaccagggccctccaccaaggcagaccgttcaagaccaccaggctccttcaccaagcagtacgttccaagaccaccagg

SEQ ID NO: 639 - DNA, 1133 bp, Diabrotica virgifera
  SmartBlast Evalue=0.000000001; Info="Pupal cuticle protein G1A, putative n=1 Tax=Perkinsus marinus ATCC 50983 RepID=C5LS33_ 9ALVE"
tatcttaaagtacgtaattgagaccagtccccagaatcaaaggaatacttcaaatggcgtatgcatttacagtcccgacgattcattggacaaatttgtacttacaacgtggtatgtggggtctattctactaatttgccgcttttagattaaataataagcactgactttaccctgatcactagtttatgtttactgatgggtacaaataaatccgctttaacagtcatggaggagtaagggcgaacccgaaaaatgctcatttcaaaaatgttgccactagcggacatcacaaaatatacatgaaaaatgtcttcaccgataatgttgccactagcggacatcacaaaatatacatgaaaaacaaaatgttgaaaatattaattgtgacgctggtcctttgggctggtgtcagttatgcaaaagatgtcaaaaatgacctaagtgacggtattttatctaattctgcagatgataaaatattgtttccatcattaatagacccaaagccaacagaaataccaccaccacctcctatcaatctaccaggtccaccagagcctccaagtgacgtaccggaggccctatataacaaacgtcccagacctccaccaagcaaacgacctagaccaccaggtcctccaccaagcagacgtcctaaaccaccaggtcctcctccaagcagacgtcctagaccaccaggtcctccaccaagcagacgtccaagaccacctggccctccaccaagcagacgccctagaccaccaggtcctccaccaagcagacgtccaaaaccaccaggtcctcctccaagcagacgtcctagaccaccaggtcctccaccaagcagacgtccaaaaccaccaggtcctccaccaagcagacgtccaagaccaccaggccctccaccaagcagacgtccaagaccaccaggccctccaccaagcagacgtccaagaccaccaggccctccaccaagcagacgtccaagaccaccaggccctccaccaagcagaggtccaagaccacctggccctccaccaagcagacgtcctagaccaccaggtcctccaccaagtagacgccctagaccaccaggtcctccaccaagcaaacccctaaaccaccaggcc

SEQ ID NO: 640 - DNA, 645 bp, Diabrotica virgifera
aacaaaatgttgaaaatattagttgtgacgctagtcctttgggctggtgtcagttatgcaaaagatgtcaaaaatgacctaaatgacgttattttatctaattctgaagataacaaaatattgattcaatcaataatagactcaaagccaacagaaccaacaccaccaccccctactgatcctcctggtccaccagagcctccaagtccacctggtcccccaccaagcagacgtcctagaccaccaggtcctccaccaagcagacgtccaagaccacctggccctccaccaagcagacgccctagaccaccaggtcctccaccaagcagacgtccaaaaccaccaggtcctcctccaagcagacgtcctagaccaccaggtcctccaccaagcagacgtccaaaaccaccaggccctccaccaagcagacgtccaagaccaccaggccctccaccaagcagacgtccaagaccaccaggccctccaccaagcagacgtccaagaccaccaggccctccaccaagcagaggtccaagaccacctggccctccaccaagcagacgtcctagaccaccaggtcctccaccaagtagacgccctagaccaccaggtcctccaccaagcaaacccctaaaccaccaggcc

SEQ ID NO: 641 - DNA, 518 bp, Diabrotica virgifera
tatcttaaagtacgtaattgagaccagtccccagaatcaaaggaatacttcaaatggcgtatgcatttacagtcccgacgattcattggacaaatttgtacttacaacgtggtatgtggggtctattctactaatttgccgcttttagattaaataataagcactgactttaccctgatcactagtttatgtttactgatgggtacaaataaatccgctttaacagtcatggaggagtaagggcgaacccgaaaaatgctcatttcaaaaatgttgccactagcggacatcacaaaatatacatgaaaaatgtcttcaccgataatgttgccactagcggacatcacaaaatatacatgaaaaatgtcttcaccgaacttttaaatagttaagtcagtattactatttaatagaaaaaaatttagtaaatggacttcccgagtagaaccaaagccattttttaaatatagagactttgagatgaactgaaataatatacaacaataatttttcataac

SEQ ID NO: 642 - DNA, 1103 bp, Diabrotica virgifera
tatcttaaagtacgtaattgagaccagtccccagaatcaaaggaatacttcaaatggcgtatgcatttacagtcccgacgattcattggacaaatttgtacttacaacgtggtatgtggggtctattctactaatttgccgcttttagattaaataataagcactgactttaccctgatcactagtttatgtttactgatgggtacaaataaatccgctttaacagtcatggaggagtaagggcgaacccgaaaaatgctcatttcaaaaatgttgccactagcggacatcacaaaatatacatgaaaaatgtcttcaccgataatgttgccactagcggacatcacaaaatatacatgaaaaacaaaatgttgaaaatattaattgtgacgctggtcctttgggctggtgtcagttatgcaaaagatgtcaaaaatgacctaagtgacggtattttatctaattctgcagatgataaaatattgtttccatcattaatagacccaaagccaacagaaataccaccaccacctcctatcaatctaccaggtccaccagagcctccaagtgacgtaccggaggccctatataacaaacgtcccagacctccaccaagcaaacgacctagaccaccaggtcctccaccaagcagacgtcctaaaccaccaggtcctcctccaagcagacgtcctagaccaccaggtcctccaccaagcagacgtccaagaccacctggccctccaccaagcagacgccctagaccaccaggtcctcctccaagcagacgtcctagaccaccaggtcctccaccaagcagacgtccaaaaccaccaggtcctccaccaagcagacgtccaagaccaccaggccctccaccaagcagacgtccaagaccaccaggccctccaccaagcagacgtccaagaccaccaggccctccaccaagcagacgtccaagaccaccaggcccgccaccaagcagacgccctagaccaccaggccccaccaagcagacggcctagaccaccagggccctccaccaaggcagaccgttcaagaccaccaggctccttcaccaagcagtacgttccaagaccaccagg

SEQ ID NO: 643 - DNA, 1100 bp, Diabrotica virgifera
  SmartBlast Evalue=0.000000008; Info="Pupal cuticle protein G1A, putative n=1 Tax=Perkinsus marinus ATCC 50983 RepID=C5LS33_ 9ALVE"
tatcttaaagtacgtaattgagaccagtccccagaatcaaaggaatacttcaaatggcgtatgcatttacagtcccgacgattcattggacaaatttgtacttacaacgtggtatgtggggtctattctactaatttgccgcttttagattaaataataagcactgactttaccctgatcactagtttatgtttactgatgggtacaaataaatccgctttaacagtcatggaggagtaagggcgaacccgaaaaatgctcatttcaaaaatgttgccactagcggacatcacaaaatatacatgaaaaatgtcttcaccgataatgttgccactagcggacatcacaaaatatacatgaaaaacaaaatgttgaaaatattaattgtgacgctggtcctttgggctggtgtcagttatgcaaaagatgtcaaaaatgacctaagtgacggtattttatctaattctgcagatgataaaatattgtttccatcattaatagacccaaagccaacagaaataccaccaccacctcctatcaatctaccaggtccaccagagcctccaagtgacgtaccggaggccctatataacaaacgtcccagacctccaccaagcaaacgacctagaccaccaggtcctccaccaagcagacgtcctaaaccaccaggtcctcctccaagcagacgtcctagaccaccaggtcctccaccaagcagacgtccaagaccacctggccctccaccaagcagacgccctagaccaccaggtcctcctccaagcagacgtcctagaccaccaggtcctccaccaagcagacgtccaaaaccaccaggtcctccaccaagcagacgtccaagaccaccaggccctccaccaagcagacgtccaagaccaccaggccctccaccaagcagacgtccaagaccaccaggccctccaccaagcagacgtccaagaccaccaggccctccaccaagcagaggtccaagaccacctggccctccaccaagcagacgtcctagaccaccaggtcctccaccaagtagacgccctagaccaccaggtcctccaccaagcaaacccctaaaccaccaggcc

SEQ ID NO: 644 - DNA, 1103 bp, Diabrotica virgifera
tatcttaaagtacgtaattgagaccagtccccagaatcaaaggaatacttcaaatggcgtatgcatttacagtcccgacgattcattggacaaatttgtacttacaacgtggtatgtggggtctattctactaatttgccgcttttagattaaataataagcactgactttaccctgatcactagtttatgtttactgatgggtacaaataaatccgctttaacagtcatggaggagtaagggcgaacccgaaaaatgctcatttcaaaaatgttgccactagcggacatcacaaaatatacatgaaaaatgtcttcaccgataatgttgccactagcggacatcacaaaatatacatgaaaaacaaaatgttgaaaatattaattgtgacgctggtcctttgggctggtgtcagttatgcaaaagatgtcaaaaatgacctaagtgacggtattttatctaattctgcagatgataaaatattgtttccatcattaatagacccaaagccaacagaaataccaccaccacctcctatcaatctaccaggtccaccagagcctccaagtgacgtaccggaggccctatataacaaacgtcccagacctccaccaagcaaacgacctagaccaccaggtcctccaccaagcagacgtcctaaaccaccaggtcctcctccaagcagacgtcctagaccaccaggtcctccaccaagcagacgtccaagaccacctggccctccaccaagcagacgccctagaccaccaggtcctccaccaagcagacgtccaaaaccaccaggtcctcctccaagcagacgtcctagaccaccaggtcctccaccaagcagacgtccaaaaccaccaggccctccaccaagcagacgtccaagaccaccaggccctccaccaagcagacgtccaagaccaccaggccctccaccaagcagacgtccaagaccaccaggcccgccaccaagcagacgccctagaccaccaggccccaccaagcagacggcctagaccaccagggccctccaccaaggcagaccgttcaagaccaccaggctccttcaccaagcagtacgttccaagaccaccagg

SEQ ID NO: 645 - DNA, 1100 bp, Diabrotica virgifera
  SmartBlast Evalue=0.000000008; Info="Pupal cuticle protein G1A, putative n=1 Tax=Perkinsus marinus ATCC 50983 RepID=C5LS33_ 9ALVE"
tatcttaaagtacgtaattgagaccagtccccagaatcaaaggaatacttcaaatggcgtatgcatttacagtcccgacgattcattggacaaatttgtacttacaacgtggtatgtggggtctattctactaatttgccgcttttagattaaataataagcactgactttaccctgatcactagtttatgtttactgatgggtacaaataaatccgctttaacagtcatggaggagtaagggcgaacccgaaaaatgctcatttcaaaaatgttgccactagcggacatcacaaaatatacatgaaaaatgtcttcaccgataatgttgccactagcggacatcacaaaatatacatgaaaaacaaaatgttgaaaatattaattgtgacgctggtcctttgggctggtgtcagttatgcaaaagatgtcaaaaatgacctaagtgacggtattttatctaattctgcagatgataaaatattgtttccatcattaatagacccaaagccaacagaaataccaccaccacctcctatcaatctaccaggtccaccagagcctccaagtgacgtaccggaggccctatataacaaacgtcccagacctccaccaagcaaacgacctagaccaccaggtcctccaccaagcagacgtcctaaaccaccaggtcctcctccaagcagacgtcctagaccaccaggtcctccaccaagcagacgtccaagaccacctggccctccaccaagcagacgccctagaccaccaggtcctccaccaagcagacgtccaaaaccaccaggtcctcctccaagcagacgtcctagaccaccaggtcctccaccaagcagacgtccaaaaccaccaggccctccaccaagcagacgtccaagaccaccaggccctccaccaagcagacgtccaagaccaccaggccctccaccaagcagacgtccaagaccaccaggccctccaccaagcagaggtccaagaccacctggccctccaccaagcagacgtcctagaccaccaggtcctccaccaagtagacgccctagaccaccaggtcctccaccaagcaaacccctaaaccaccaggcc

SEQ ID NO: 646 - DNA, 1136 bp, Diabrotica virgifera
tatcttaaagtacgtaattgagaccagtccccagaatcaaaggaatacttcaaatggcgtatgcatttacagtcccgacgattcattggacaaatttgtacttacaacgtggtatgtggggtctattctactaatttgccgcttttagattaaataataagcactgactttaccctgatcactagtttatgtttactgatgggtacaaataaatccgctttaacagtcatggaggagtaagggcgaacccgaaaaatgctcatttcaaaaatgttgccactagcggacatcacaaaatatacatgaaaaatgtcttcaccgataatgttgccactagcggacatcacaaaatatacatgaaaaacaaaatgttgaaaatattaattgtgacgctggtcctttgggctggtgtcagttatgcaaaagatgtcaaaaatgacctgagtgacggtattttatttaattctgcagatgataaaatattgtttccatcattaatagacccaaagccaacagaaataccaccaccacctcctatcaatctaccaggtccaccagagcctccaagtgacgtaccggaggccctatataacaaacgtcccagacctccaccaagcaaacgacctagaccaccaggtcctccaccaagcggacgtcctaaaccgccaggtcctccaccaagcaaaagtcctagaccaccaggtcctccaccaagcagacgtccaagaccacctggccctccaccaagcagacgccctagaccaccaggtcctccaccaagcagacgtccaaaaccaccaggtcctcctccaagcagacgtcctagaccaccaggtcctccaccaagcagacgtccaaaaccaccaggtcctccaccaagcagacgtccaagaccaccaggccctccaccaagcagacgtccaagaccaccaggccctccaccaagcagacgtccaagaccaccaggccctccaccaagcagacgtccaagaccaccaggcccgccaccaagcagacgccctagaccaccaggccccaccaagcagacggcctagaccaccagggccctccaccaaggcagaccgttcaagaccaccaggctccttcaccaagcagtacgttccaagaccaccagg

SEQ ID NO: 647 - DNA, 1133 bp, Diabrotica virgifera
tatcttaaagtacgtaattgagaccagtccccagaatcaaaggaatacttcaaatggcgtatgcatttacagtcccgacgattcattggacaaatttgtacttacaacgtggtatgtggggtctattctactaatttgccgcttttagattaaataataagcactgactttaccctgatcactagtttatgtttactgatgggtacaaataaatccgctttaacagtcatggaggagtaagggcgaacccgaaaaatgctcatttcaaaaatgttgccactagcggacatcacaaaatatacatgaaaaatgtcttcaccgataatgttgccactagcggacatcacaaaatatacatgaaaaacaaaatgttgaaaatattaattgtgacgctggtcctttgggctggtgtcagttatgcaaaagatgtcaaaaatgacctgagtgacggtattttatttaattctgcagatgataaaatattgtttccatcattaatagacccaaagccaacagaaataccaccaccacctcctatcaatctaccaggtccaccagagcctccaagtgacgtaccggaggccctatataacaaacgtcccagacctccaccaagcaaacgacctagaccaccaggtcctccaccaagcggacgtcctaaaccgccaggtcctccaccaagcaaaagtcctagaccaccaggtcctccaccaagcagacgtccaagaccacctggccctccaccaagcagacgccctagaccaccaggtcctccaccaagcagacgtccaaaaccaccaggtcctcctccaagcagacgtcctagaccaccaggtcctccaccaagcagacgtccaaaaccaccaggtcctccaccaagcagacgtccaagaccaccaggccctccaccaagcagacgtccaagaccaccaggccctccaccaagcagacgtccaagaccaccaggccctccaccaagcagacgtccaagaccaccaggccctccaccaagcagaggtccaagaccacctggccctccaccaagcagacgtcctagaccaccaggtcctccaccaagtagacgccctagaccaccaggtcctccaccaagcaaacccctaaaccaccaggcc

SEQ ID NO: 648 - DNA, 1103 bp, Diabrotica virgifera
tatcttaaagtacgtaattgagaccagtccccagaatcaaaggaatacttcaaatggcgtatgcatttacagtcccgacgattcattggacaaatttgtacttacaacgtggtatgtggggtctattctactaatttgccgcttttagattaaataataagcactgactttaccctgatcactagtttatgtttactgatgggtacaaataaatccgctttaacagtcatggaggagtaagggcgaacccgaaaaatgctcatttcaaaaatgttgccactagcggacatcacaaaatatacatgaaaaatgtcttcaccgataatgttgccactagcggacatcacaaaatatacatgaaaaacaaaatgttgaaaatattaattgtgacgctggtcctttgggctggtgtcagttatgcaaaagatgtcaaaaatgacctgagtgacggtattttatttaattctgcagatgataaaatattgtttccatcattaatagacccaaagccaacagaaataccaccaccacctcctatcaatctaccaggtccaccagagcctccaagtgacgtaccggaggccctatataacaaacgtcccagacctccaccaagcaaacgacctagaccaccaggtcctccaccaagcggacgtcctaaaccgccaggtcctccaccaagcaaaagtcctagaccaccaggtcctccaccaagcagacgtccaagaccacctggccctccaccaagcagacgccctagaccaccaggtcctcctccaagcagacgtcctagaccaccaggtcctccaccaagcagacgtccaaaaccaccaggtcctccaccaagcagacgtccaagaccaccaggccctccaccaagcagacgtccaagaccaccaggccctccaccaagcagacgtccaagaccaccaggccctccaccaagcagacgtccaagaccaccaggcccgccaccaagcagacgccctagaccaccaggccccaccaagcagacggcctagaccaccagggccctccaccaaggcagaccgttcaagaccaccaggctccttcaccaagcagtacgttccaagaccaccagg

SEQ ID NO: 649 - DNA, 2314 bp, Diabrotica virgifera
  SmartBlast Evalue=1E-25; Info=Transposase n=1 Tax=Agrilus planipennis RepID=D2WLV0_AGRPL
tcgacttttcaccagatcacgtgttggtaagtctcacattggcatgttagaaataaaaaataaagtatacaatacgttgagttttcgatcagatataggcggctgaaggaagtgctaaaatcggcaacattgcttagtccactatgaggtgcattagcgtgggaagtggggaccatctgatactcgacggagcgcagctttgccatttataggccgtatatctaatttaaaactaaacatgctgtatatagattgtaacatcattacacatttgatagacacgtaactatttagagtcaaacatcttatggaagtacacaataagaaaataaggtcacaaaaatcctgagaaatgttatcatgtgggatgaaaagttcgtaggctgacacatagatggcgctactggtattaaatccatatggtttttagtcagccgtaaccttcaaaagatgcgtgtataaatttgacagctgtcgaactattagtgtatgagacattttgagtgaagcaacttatgttattttaaaaaaatggataaagagaaatttcgtgtcttaataaagtatttctttttgacaaaaaatactgttgaaaccaaagcttggcttggtaaacattattcggactctgcaccgggaaaataaaccgttgagaaatgttttgctaagtttaaacgaggcgaaataagcaccgaagacgatgcatgcagtggacgtcccaaagagtctgttaccgacgaaaacatcaaaaaagcccacaaaataattttggatgaccgtaaagtgaagttattcgagatagctgagacactaaagatatcaaaggaacgtgttggatatattgtgcatgaatatttgggtatacgaaaactttgtgcaaaatcgatcaaaaacaacaacgaattgatgcttctgagaagtgtttgaagctcttcaatcataatagaaccgaatttttgcgtcgatatattacaatggatgaaacatggcttccatcatttcacaccggagtccaatcgacagtctgccgagtggactgcacgtgatgaaccgacaccaaagcgtggaaagacgcaacagtcggctggcaaggttgtggcatcagtactttccttccgcagtcacctatttaccagatgtgttacccagcgactaccacctgttcgctgacctcaagaaaatgctcgctggaaagaaatttagcaccaatgaagaggtaatcgcagaaactgaagcttattttgaggctaaagacaaattgtattataaaaatggtactgaaaagttgtataaccgctataattgttgtatcgcccacgaaagtaactatattgaataataaaatcaatcaaaattgtataaaaaaaaaaaagaatatgcgtgtactttgtacgcacgtaagaagttatacttctattacacgatttaaacgaaataaatgtacctacgttaaacagtttatttttattttgtttaaatattaaactaaatttaatcttaccattttccaaaaataaaaaaagaataggaatggtccggatttgaactcaagacctctcgatctgtagccgaatgctatactaataacgctacgatgtctctgtttgtatagtctcggacataatgacaattcacggtaacaaacagacgaagtgaagtataataaatataaatgttttaataatacttatcttactcccgaggaagacaaatccaaagacacaaaaattataataaatatatttactaaaaacactaatatattcttttcacaccttttcttgcactgatatatttatacataacttgaaagatttagcaactaaacgccatactgtctgtgtgcgcatgcgcgcagtattatgaaattttactctcaatcgcgcctaaagaagtataacttaaaaaaaaacatctgctgagcctttaagttacatagtagactttatctctgaacataaaatattattgcacggtttttccctaagaaaaattttggttttccactaaatgcgtccaaatctacacattctaccagtaaattaattagagtagcaattcttaaaatgtttaatgatttctattaaccttgatgttgtataattattggtatataaaattaaatatacaattatctaaataaataacaacacagactaaaatcgctaattatttaacaaataacgtcaaaacaacaataataatgccaatacacgagagtcaagaccaattacgatgtcgaaatgtgatctcgacagggcttgtgtagtcgaaatcaatttctacccaacgttgcgatagtagagatcgagaa

SEQ ID NO: 650 - DNA, 2033 bp, Diabrotica virgifera
  SmartBlast Evalue=1E-25; Info=Transposase n=1 Tax=Agrilus planipennis RepID=D2WLV0_AGRPL
tcgacttttcaccagatcacgtgttggtaagtctcacattggcatgttagaaataaaaaataaagtatacaatacgttgagttttcgatcagatataggcggctgaaggaagtgctaaaatcggcaacattgcttagtccactatgaggtgcattagcgtgggaagtggggaccatctgatactcgacggagcgcagctttgccatttataggccgtatatctaatttaaaactaaacatgctgtatatagattgtaacatcattacacatttgatagacacgtaactatttagagtcaaacatcttatggaagtacacaataagaaaataaggtcacaaaaatcctgagaaatgttatcatgtgggatgaaaagttcgtaggctgacacatagatggcgctactggtattaaatccatatggtttttagtcagccgtaaccttcaaaagatgcgtgtataaatttgacagctgtcgaactattagtgtatgagacattttgagtgaagcaacttatgttattttaaaaaaatggataaagagaaatttcgtgtcttaataaagtatttctttttgacaaaaaatactgttgaaaccaaagcttggcttggtaaacattattcggactctgcaccgggaaaataaaccgttgagaaatgttttgctaagtttaaacgaggcgaaataagcaccgaagacgatgcatgcagtggacgtcccaaagagtctgttaccgacgaaaacatcaaaaaagcccacaaaataattttggatgaccgtaaagtgaagttattcgagatagctgagacactaaagatatcaaaggaacgtgttggatatattgtgcatgaatatttgggtatacgaaaactttgtgcaaaatcgatcaaaaacaacaacgaattgatgcttctgagaagtgtttgaagctcttcaatcataatagaaccgaatttttgcgtcgatatattacaatggatgaaacatggcttccatcatttcacaccggagtccaatcgacagtctgccgagtggactgcacgtgatgaaccgacaccaaagcgtggaaagacgcaacagtcggctggcaaggttgtggcatcagtactttccttccgcagtcacctatttaccagatgtgttacccagcgactaccacctgttcgctgacctcaagaaaatgctcgctggaaagaaatttagcaccaatgaagaggtaatcgcagaaactgaagcttattttgaggctaaagacaaattgtattataaaaatggtactgaaaagttgtataaccgctataattgttgtatcgcccacgaaagtaactatattgaataataaaatcaatcaaaattgtataaaaaaaaaaaagaatatgcgtgtactttgtacgcacgtaagaagttatacttctattacacgatttaaacgaaataaatgtacctacgttaaacagtttatttttattttgtttaaatattaaactaaatttaatcttaccattttccaaaaataaaaaaagaataggaatggtccggatttgaactcaagacctctcgatctgtagccgaatgctatactaataacgctacgatgtctctgtttgtatagtctcggacataatgacaattcacggtaacaaacagacgaagtgaagtataataaatataaatgttttaataatacttatcttactcccgaggaagacaaatccaaagacacaaaaattataataaatatatttactaaaaacactaatatattcttttcacaccttttcttgcactgatatatttatacataacttgaaagatttagcaactaaacgccatactgtctgtgtgcgcatgcgcgcagtattatgaaattttactctcaatcgcgcctaaagaagtataactgaaataaaaaataagaattttaaatattaggtaatcttcgattaataatcagtataacaccactcacactcactaattaattttattggcttttaagataactcattttcaaagttttcatcagttagagc

SEQ ID NO: 651 - DNA, 1935 bp, Diabrotica virgifera
  SmartBlast Evalue=2E-25; Info=Transposase (Fragment) n=1 Tax= Sphyracephala europaea RepID=A4ZGV4_9DIOP
tgactgtaaagtgaagttgttcgagatagctccgcgagagttcacaatcgatcaaaatcaacaacgaattgatgattctgagaagtgtttgaagctctttaatcatattaaaaccgaattcttgcgtcaatatattacaatggatgaaacatggcttccatcatttcacaccggagtccaatcgacagtctgccgagtggactgcacgtgatgaaccgacaccaaagcgtggaaagacgcaacagtcggctggcaaggttgtggcatcagtactttccttccgcagtcacctatttaccagatgtgttacccagcgactaccacctgttcgctgacctcaagaaaatgctcgctggaaagaaatttagcaccaatgaagaggtaatcgcagaaactgaagcttattttgaggctaaagacaaattgtattataaaaatggtactgaaaagttgtataaccgctataattgttgtatcgcccacgaaagtaactatattgaataataaaatcaatcaaaattgtataaaaaaaaaaaagaatatgcgtgtactttgtacgcacgtaagaagttatacttctattacacgatttaaacgaaataaatgtacctacgttaaacagtttatttttattttgtttaaatattaaactaaatttaatcttaccattttccaaaaataaaaaaagaataggaatggtccggatttgaactcaagacctctcgatctgtagccgaatgctatactaataacgctacgatgtctctgtttgtatagtctcggacataatgacaattcacggtaacaaacagacgaagtgaagtataataaatataaatgttttaataatacttatcttactcccgaggaagacaaatccaaagacacaaaaattataataaatatatttactaaaaacactaatatattcttttcacaccttttcttgcactgatatatttatacataacttgaaagatttagcaactaaacgccatactgtctgtgtgcgcatgcgcgcagtattatgaaattttactctcaatcgcgcctaaagaagtataccttcaaaaaattgtttgagttgtgacactatacagatatatcattatttttatctggttaacagagttatactttttaatgatctaactttaaatatacctaagtaacaaaattaaataaaaaatagtgcaaaaggaaaaataaaagtaacttttcttgagtacattcgcagattgttttgactaaggcaatcacaaaatacactgtcttaaactcgacaaacgacgctttacacatatcttagatggacaacttcattgcgcaagccgatatgtgacactgtttatgttcggtctcggtgcatccttgattttagttaaacatataatgacgccagtgtcatctaacgacaaatacttgaactatatcagtagtagtttttgagataggattttgcagttttattaaactgttgaggcaataaaaccattcttttttttttttagttgtgacactatttgagcggatgtgcgatatgttcatcacaataaattctgctggtgttacagttcaaaaactatcaagagtgttccaaaatagatcctgtgtttttatttcacattgttacctaagattggccagatattataatatttcttctatgaatgattcccacatattatactcgtagcttagatttttacatatacctataataattaaaaaagaaataaaaaaagagtgagtgagttcctttaaaaaattaacaaatatgcatagttagcattacagttgtattaaaataagcagtacctatatactaatttgggcataaacttgaatttatagaattgtatagtgaataatggctggaaccatggtaaacgggaaatactaagaaaatattaaaggaacatattggagggaagc

SEQ ID NO: 652 - DNA, 1748 bp, Diabrotica virgifera
  SmartBlast Evalue=4E-63; Info=Transposase (Fragment) n=1 Tax= Sphyracephala europaea RepID=A4ZGV4_9DIOP
tcgacttttcaccagatcacgtgttggtaagtctcacattggcatgttagaaataaaaaataaagtatacaatacgttgagttttcgatcagatataggcggctgaaggaagtgctaaaatcggcaacattgcttagtccactatgaggtgcattagcgtgggaagtggggaccatctgatactcgacggagcgcagctttgccatttataggccgtatatctaatttaaaactaaacatgctgtatatagattgtaacatcattacacatttgatagacacgtaactatttagagtcaaacatcttatggaagtacacaataagaaaataaggtcacaaaaatcctgagaaatgttatcatgtgggatgaaaagttcgtaggctgacacatagatggcgctactggtattaaatccatatggtttttagtcagccgtaaccttcaaaagatgcgtgtataaatttgacagctgtcgaactattagtgtatgagacattttgagtgaagcaacttatgttattttaaaaaaatggataaagagaaatttcgtgtcttaataaagtatttctttttgacaaaaaatactgttgaaaccaaagcttggcttggtaaacattattcggactctgcaccgggaaaataaaccgttgagaaatgttttgctaagtttaaacgaggcgaaataagcaccgaagacgatgcatgcagtggacgtcccaaagagtctgttaccgacgaaaacatcaaaaaagcccacaaaataattttggatgaccgtaaagtgaagttattcgagatagctgagacactaaagatatcaaaggaacgtgttggatatattgtgcatgaatatttgggtatacgaaaactttgtgcaaaatcgatcaaaaacaacaacgaattgatgcttctgagaagtgtttgaagctcttcaatcataatagaaccgaatttttgcgtcgatatattacaatggatgaaacatggcttccatcatttcacaccggagtccaatcgacagtctgccgagtggactgcacgtgatgaaccgacaccaaagcgtggaaagacgcaacagtcggctggcaaggttgtggcatcagtacttttgggatgcacatggtataatattcatcgactatgttgaaaagggaaaaaccatcaacagcgactattatattgcgttattggagcgtttgaaggacgaaactgcgaaaaaacggcgccatttaaagaaagagaaagtgctatttcatcaagacaacgcactgtgtcacaaatggatgaaaacgatgtcaaaatttcatgaattgggcttcgaattgcttccgcagccaccgtattcaccagatatggctcccaacgaggaccacttcttcgctgacctcaagagaatacacggtaaaaaaatttagcaccaatgaagaggtcatcgccgaaattggagcttattacgcactaggcagccatattcaatcgttcctaaaagaagtttaacaccgatcgaaattcaattgcggctggtaactttgtagaatcttatcttccatttttagcactaagaaacgataggtcaagtttaattaaagtatccaatacaatccaaaaaaacttcgacaaagtgcctatagttttggaagatcgtcgtataaaaatacgtcaaaattactaatactttgagatttaaaagaacgtgacacatctttaactaggaattaaacttgcgcaaacctttgcacaagatga

SEQ ID NO: 653 - DNA, 1581 bp, Diabrotica virgifera
aaacgacgtttaaaattagttctataacttttccggatttagttcaaagaccatatattcaaataaatattcaaatagaagatattcaaattagaacaataactcttttagtaagttacaaacgtttttgaagctctacaaaatagcgtataatgtctactaaaaatattaaagaaaaaagaatgtgtgtactttgtacgcacgtaagaagttatacttctattatatgatttcttaaaaataaatatactttaaacagtttgttttaatttttttaaacaccaaattttgtgcttaccgctttcaaaaaaataaaaaaaaaagtatagaattgctccggattcgaactcaagacctctcgatctctggccgaatgctataccaaatacgctacgaggactgtgtctgtatcggttcggacgtacctaatgacaattcacggtaacaaacagacaaggtgaagtataataaatatacaataaaatgttttaataatactcatcttactcctgaggaagacaaatccaaagacacaaaaattataataaatatatttactaaaaacactaatatattcttttcacaccttttcttgcactgatatatttatacataacttgaaagatttagcaactaaacgccatactgtctgtgtgcgcatgcgcgcagtattatgaaattttactctcaatcgcgcctaaagaagtataccttcaaaaaattgtttgagttgtgacactatacagatatatcattatttttatctggttaacagagttatactttttaatgatctaactttaaatatacctaagtaacaaaattaaataaaaaatagtgcaaaaggaaaaataaaagtaacttttcttgagtacattcgcagattgttttgactaaggcaatcacaaaatacactgtcttaaactcgacaaacgacgctttacacatatcttagatggacaacttcattgcgcaagccgatatgtgacactgtttatgttcggtctcggtgcatccttgattttagttaaacatataatgacgccagtgtcatctaacgacaaatacttgaactatatcagtagtagtttttgagataggattttgcagttttattaaactgttgaggcaataaaaccattcttttttttttttagttgtgacactatttgagcggatgtgcgatatgttcatcacaataaattctgctggtgttacagttcaaaaactatcaagagtgttccaaaatagatcctgtgtttttatttcacattgttacctaagattggccagatattataatatttcttctatgaatgattcccacatattatactcgtagcttagatttttacatatacctataataattaaaaaagaaataaaaaaagagtgagtgagttcctttaaaaaattaacaaatatgcatagttagcattacagttgtattaaaataagcagtacctatatactaatttgggcataaacttgaatttatagaattgtatagtgaataatggctggaaccatggtaaacgggaaatactaagaaaatattaaaggaacatattggagggaagc

SEQ ID NO: 654 - DNA, 1479 bp, Diabrotica virgifera
  SmartBlast Evalue=2E-25; Info=Transposase (Fragment) n=1 Tax= Sphyracephala europaea RepID=A4ZGV4_9DIOP
tgactgtaaagtgaagttgttcgagatagctccgcgagagttcacaatcgatcaaaatcaacaacgaattgatgattctgagaagtgtttgaagctctttaatcatattaaaaccgaattcttgcgtcaatatattacaatggatgaaacatggcttccatcatttcacaccggagtccaatcgacagtctgccgagtggactgcacgtgatgaaccgacaccaaagcgtggaaagacgcaacagtcggctggcaaggttgtggcatcagtactttccttccgcagtcacctatttaccagatgtgttacccagcgactaccacctgttcgctgacctcaagaaaatgctcgctggaaagaaatttagcaccaatgaagaggtaatcgcagaaactgaagcttattttgaggctaaagacaaattgtattataaaaatggtactgaaaagttgtataaccgctataattgttgtatcgcccacgaaagtaactatattgaataataaaatcaatcaaaattgtataaaaaaaaaaaagaatatgcgtgtactttgtacgcacgtaagaagttatacttctattacacgatttaaacgaaataaatgtacctacgttaaacagtttatttttattttgtttaaatattaaactaaatttaatcttaccattttccaaaaataaaaaaagaataggaatggtccggatttgaactcaagacctctcgatctgtagccgaatgctatactaataacgctacgatgtctctgtttgtatagtctcggacataatgacaattcacggtaacaaacagacgaagtgaagtataataaatataaatgttttaataatacttatcttactcccgaggaagacaaatccaaagacacaaaaattataataaatatatttactaaaaacactaatatattcttttcacaccttttcttgcactgatatatttatacataacttgaaagatttagcaactaaacgccatactgtctgtgtgcgcatgcgcgcagtattatgaaattttactctcaatcgcgcctaaagaagtataacttaaaaaaaaacatctgctgagcctttaagttacatagtagactttatctctgaacataaaatattattgcacggtttttccctaagaaaaattttggttttccactaaatgcgtccaaatctacacattctaccagtaaattaattagagtagcaattcttaaaatgtttaatgatttctattaaccttgatgttgtataattattggtatataaaattaaatatacaattatctaaataaataacaacacagactaaaatcgctaattatttaacaaataacgtcaaaacaacaataataatgccaatacacgagagtcaagaccaattacgatgtcgaaatgtgatctcgacagggcttgtgtagtcgaaatcaatttctacccaacgttgcgatagtagagatcgagaa

SEQ ID NO: 655 - DNA, 1198 bp, Diabrotica virgifera
  SmartBlast Evalue=1E-25; Info=Transposase (Fragment) n=1 Tax= Sphyracephala europaea RepID=A4ZGV4_9DIOP
tgactgtaaagtgaagttgttcgagatagctccgcgagagttcacaatcgatcaaaatcaacaacgaattgatgattctgagaagtgtttgaagctctttaatcatattaaaaccgaattcttgcgtcaatatattacaatggatgaaacatggcttccatcatttcacaccggagtccaatcgacagtctgccgagtggactgcacgtgatgaaccgacaccaaagcgtggaaagacgcaacagtcggctggcaaggttgtggcatcagtactttccttccgcagtcacctatttaccagatgtgttacccagcgactaccacctgttcgctgacctcaagaaaatgctcgctggaaagaaatttagcaccaatgaagaggtaatcgcagaaactgaagcttattttgaggctaaagacaaattgtattataaaaatggtactgaaaagttgtataaccgctataattgttgtatcgcccacgaaagtaactatattgaataataaaatcaatcaaaattgtataaaaaaaaaaaagaatatgcgtgtactttgtacgcacgtaagaagttatacttctattacacgatttaaacgaaataaatgtacctacgttaaacagtttatttttattttgtttaaatattaaactaaatttaatcttaccattttccaaaaataaaaaaagaataggaatggtccggatttgaactcaagacctctcgatctgtagccgaatgctatactaataacgctacgatgtctctgtttgtatagtctcggacataatgacaattcacggtaacaaacagacgaagtgaagtataataaatataaatgttttaataatacttatcttactcccgaggaagacaaatccaaagacacaaaaattataataaatatatttactaaaaacactaatatattcttttcacaccttttcttgcactgatatatttatacataacttgaaagatttagcaactaaacgccatactgtctgtgtgcgcatgcgcgcagtattatgaaattttactctcaatcgcgcctaaagaagtataactgaaataaaaaataagaattttaaatattaggtaatcttcgattaataatcagtataacaccactcacactcactaattaattttattggcttttaagataactcattttcaaagttttcatcagttagagc

SEQ ID NO: 656 - DNA, 1125 bp, Diabrotica virgifera
aaacgacgtttaaaattagttctataacttttccggatttagttcaaagaccatatattcaaataaatattcaaatagaagatattcaaattagaacaataactcttttagtaagttacaaacgtttttgaagctctacaaaatagcgtataatgtctactaaaaatattaaagaaaaaagaatgtgtgtactttgtacgcacgtaagaagttatacttctattatatgatttcttaaaaataaatatactttaaacagtttgttttaatttttttaaacaccaaattttgtgcttaccgctttcaaaaaaataaaaaaaaaagtatagaattgctccggattcgaactcaagacctctcgatctctggccgaatgctataccaaatacgctacgaggactgtgtctgtatcggttcggacgtacctaatgacaattcacggtaacaaacagacaaggtgaagtataataaatatacaataaaatgttttaataatactcatcttactcctgaggaagacaaatccaaagacacaaaaattataataaatatatttactaaaaacactaatatattcttttcacaccttttcttgcactgatatatttatacataacttgaaagatttagcaactaaacgccatactgtctgtgtgcgcatgcgcgcagtattatgaaattttactctcaatcgcgcctaaagaagtataacttaaaaaaaaacatctgctgagcctttaagttacatagtagactttatctctgaacataaaatattattgcacggtttttccctaagaaaaattttggttttccactaaatgcgtccaaatctacacattctaccagtaaattaattagagtagcaattcttaaaatgtttaatgatttctattaaccttgatgttgtataattattggtatataaaattaaatatacaattatctaaataaataacaacacagactaaaatcgctaattatttaacaaataacgtcaaaacaacaataataatgccaatacacgagagtcaagaccaattacgatgtcgaaatgtgatctcgacagggcttgtgtagtcgaaatcaatttctacccaacgttgcgatagtagagatcgagaa

SEQ ID NO: 657 - DNA, 913 bp, Diabrotica virgifera
  SmartBlast Evalue=1E-64; Info=Transposase (Fragment) n=1 Tax= Sphyracephala europaea RepID=A4ZGV4_9DIOP
tgactgtaaagtgaagttgttcgagatagctccgcgagagttcacaatcgatcaaaatcaacaacgaattgatgattctgagaagtgtttgaagctctttaatcatattaaaaccgaattcttgcgtcaatatattacaatggatgaaacatggcttccatcatttcacaccggagtccaatcgacagtctgccgagtggactgcacgtgatgaaccgacaccaaagcgtggaaagacgcaacagtcggctggcaaggttgtggcatcagtacttttgggatgcacatggtataatattcatcgactatgttgaaaagggaaaaaccatcaacagcgactattatattgcgttattggagcgtttgaaggacgaaactgcgaaaaaacggcgccatttaaagaaagagaaagtgctatttcatcaagacaacgcactgtgtcacaaatggatgaaaacgatgtcaaaatttcatgaattgggcttcgaattgcttccgcagccaccgtattcaccagatatggctcccaacgaggaccacttcttcgctgacctcaagagaatacacggtaaaaaaatttagcaccaatgaagaggtcatcgccgaaattggagcttattacgcactaggcagccatattcaatcgttcctaaaagaagtttaacaccgatcgaaattcaattgcggctggtaactttgtagaatcttatcttccatttttagcactaagaaacgataggtcaagtttaattaaagtatccaatacaatccaaaaaaacttcgacaaagtgcctatagttttggaagatcgtcgtataaaaatacgtcaaaattactaatactttgagatttaaaagaacgtgacacatctttaactaggaattaaacttgcgcaaacctttgcacaagatga

SEQ ID NO: 658 - DNA, 844 bp, Diabrotica virgifera
aaacgacgtttaaaattagttctataacttttccggatttagttcaaagaccatatattcaaataaatattcaaatagaagatattcaaattagaacaataactcttttagtaagttacaaacgtttttgaagctctacaaaatagcgtataatgtctactaaaaatattaaagaaaaaagaatgtgtgtactttgtacgcacgtaagaagttatacttctattatatgatttcttaaaaataaatatactttaaacagtttgttttaatttttttaaacaccaaattttgtgcttaccgctttcaaaaaaataaaaaaaaaagtatagaattgctccggattcgaactcaagacctctcgatctctggccgaatgctataccaaatacgctacgaggactgtgtctgtatcggttcggacgtacctaatgacaattcacggtaacaaacagacaaggtgaagtataataaatatacaataaaatgttttaataatactcatcttactcctgaggaagacaaatccaaagacacaaaaattataataaatatatttactaaaaacactaatatattcttttcacaccttttcttgcactgatatatttatacataacttgaaagatttagcaactaaacgccatactgtctgtgtgcgcatgcgcgcagtattatgaaattttactctcaatcgcgcctaaagaagtataactgaaataaaaaataagaattttaaatattaggtaatcttcgattaataatcagtataacaccactcacactcactaattaattttattggcttttaagataactcattttcaaagttttcatcagttagagc

SEQ ID NO: 659 - DNA, 3396 bp, Diabrotica virgifera
  SmartBlast Evalue=0; Info=Patatin-like phospholipase domain- containing protein 2 n=1 Tax=Harpegnathos saltator RepID=E2B3G0_ 9HYME
attgaatcgagaaacgagttgaacggttacacgcagtatactcatataatatcccaattgtttatttattacgagttgatctgttgtttagaagtgaagtttgttggttatatcgactgagaaaagactcttgaatcggttttcggagaaatatgaatttatctttcgccggttgtggttttttgggtatctaccatgtcggagttgcctgttgttttcgaaaatatgcgccccatttactattggacaagatttcgggggcatcagcgggagcaattgctgcatgctgcttgatctgtgatctgcctattggtgatatgaccagtgatgttctccgagtatgtacggaagcccgaagcaggtctctaggtgccttctctccttcgtttaatattcacaaattaatgttagaaaatttagaaaaatttttaccagaagatgctcatatcagatgtagtggaaaacttcacgtatcccttactagagttcatgacggaaagaacgttgtggtttcacaatttgacagcagagaagatttaatccaaattctgctagcatcagccttcattccattcttctctggattaattcctccaaaattcaagggtgtacgttatatggatggtggttatagcgacaatttacctactttagacgaaaataccattacagttagtccattctgtggcgaaagtgacatttgcccaagagatgacagctcacaactattccatattaacatcgcaaacacaagtatagaactctccaagcacaacatgtatagaatagttcgtatactgtttccgccaaaaccagagattttgtcaaatatgtgcaaacaaggattcgacgatgcgcttagatttctacataggaacaacttgatcaattgcaccaggtgcttggctgtgcaatctacattcgtggtctcagaaactttggacgaagaattggaatacgacccacagtgtaaagaatgtaaacttcatagacaagaggcacttgtatctaatgtacctgaatctgtcctaagtaaatttcaagaagccgtggacaaagccaacaatggtcttctaaattggttgttcaaacacaggggtatgaaactgctgtctgtgcttacgttaccttacaccttacctgctgatgtgatgtatgctacatttacaaagtttcaaacatttccgataaaacctggtcggtcgatggcattttatagaaattgcgcccaatttcactttcagagttttatgggcaaaatatatgacaataaatcgtatcaatttgaattactgggaaatgccattttagcttcaccttcatttgcatgccacgaacatatttatagagaaaaaagatttatggtagcagcaccacaacttggaaatggagcatgggaattgagcaaagttttcattgataagatgacgttcctgctgaagaaaatcaataggaaacgacaacaacttagcgccaaaattacttgccaattagcgattacagaatatggtaaaaataaattcgacgtggaatcatgccaggatgtacaaaatggaaataaaatgaaccttaacttcaccttacaattagaggatagagacttaccattaaaccaaagcccagtacgaaagttcaacacaaaggaaattctccaacgaaaaccgagttttactgtaaataggacggaatccatggacaatgatacattcgaccacatcctacaagtcacatcacaacacgatactataatggcttattattatttggacgaaaataataaagttaaagtcactgaaattttcgacgtaaccgatagtgattctccaattgttcagacttctgaagaaagaagtgcaaatacaaatttggagttcgacgacgactggacaaatcaagagcaatggcaaccaaatgaggaaaatattgctcagtttgaactagaggacatacttgacagagaaccaatcttttctgaccccgaaagcgaatggacaggtacgttcaaaatcgaagaaccagaagatgaagatgaacaataccctaccaacgatactctcccagaatctgatcgaaggggtagccgagaagtcatcaaccagtggaacaaaaaggaatataaaatcccatcgatggtctacgaagatagtgacacataaatgtattggcatctacgtttaggatgatagttttttaagatattttaaattatataaaattattaaagtaataatcagcggaccataaaaataaagatttagggttttccacacttactgaaaaaatattgtattatatgcagctctcgttgagacgttccaattttcttattccatatatcagccctccgctcaaacagtgtcataagtcaaaaaatcaaagtatcgagaaaacgacgtttaaaattagttctatctataatttttccggatttagttcaaaagctgttcaaattagaacaataactcttttagttacaaaggtttttgaagctctacaaaatagcgtacaatgtctactaaaaatatttaaaaaaattttaagttgtgacactatacatatatatcattattattatttggttaacagagttatacgttttaatgatctaacttttaatatacctaagtaacaaaattaaataaaaaatagtgcaaaagtaacaaataaaggtctcacttttcttgggtaccttcgcagattgttttgactaaagcaatcacataaaatatactgtctaaactcgacaaacgactctttatacagatcttagatggacaacttcattgcacaagccgatatgtgacactgtttatgttcggtctcggtgcatccttgattttagttaaacatataatgacgccagtgtcatctaacgacaaatacttgaactatatcagtagtactttttgagataggattttgcagttttattaaactgttgaggcaataaaaccattcttttttttttttagttgtgacactatttgagcggatgtgcgatatgttcatcacaataaattctgctggtgttacagttcaaaaactatcaagagtgttccaaaatagatcctgtgtttttatttcacattgttacctaagattggccagatattataatatttcttctatgaatgattcccacatattatactcgtagcttagatttttacatatacctataataattaaaaaagaaataaaaaaagagtgagtgagttcctttaaaaaattaacaaatatgcatagttagcattacagttgtattaaaataagcagtacctatatactaatttgggcataaacttgaatttatagaattgtatagtgaataatggctggaaccatggtaaacgggaaatactaagaaaatattaaaggaacatattggagggaagc

SEQ ID NO: 660 - DNA, 675 bp, Diabrotica virgifera
cggatatgaataatgaatatttgatattggacacacatcgtcttcagtgtaaatcgaaaacgcccacttctatttgacgcgctcaggaggaggtggcaacaccgtacttcaaagtgaaataagtgttttgtgcgaaaagttcatcaaaataagaagaaattttgatttgttttcgatggttttggttaagttagacaaattaaaacacaaaagaaaaaaatggaacaccgctgggaacacgaacaccaaagaaaaaacatctgctgagcatttaaattatatagtagactttatctctgaacataattgcacggtaaaagtaagttttttccctaagaaaaattttggcgttttcgtttgaaacacactagatacgttcaaatctacacattctaccagtaaattaattagagtagcaattcttaaaatgtttaatgatttctattaaccttgatgttgtataattattggtatataaaattaaatatacaattatctaaataaataacaacacagactaaaatcgctaattatttaacaaataacgtcaaaacaacaataataatgccaatacacgagagtcaagaccaattacgatgtcgaaatgtgatctcgacagggcttgtgtagtcgaaatcaatttctacccaacgttgcgatagtagagatcgagaa

SEQ ID NO: 661 - DNA, 635 bp, Diabrotica virgifera
  SmartBlast Evalue=4E-25; Info=Transposase (Fragment) n=1 Tax= Sphyracephala europaea RepID=A4ZGV4_9DIOP
agatgcgcatggtataatattcatcgactatcttgaaaagggaaaaactattaacagggactattacattgcgttagtggagagtttgaagaacgtaatcgcgaaaaaacggtcccatttgaagaagaagaaagtgctatttcatcaagacaacgcactgtgtcacaaatggatgaaaacgatgtcaaaatttcatgaattgggcttcgaattgcttccgcagccaccgtattcaccagatatggctcccaacgaggaccacttcttcgctgacctcaagagaatacacggtaaaaaaatttagcaccaatgaagaggtcatcgccgaaattggagcttattacgcactaggcagccatattcaatcgttcctaaaagaagtttaacaccgatcgaaattcaattgcggctggtaactttgtagaatcttatcttccatttttagcactaagaaacgataggtcaagtttaattaaagtatccaatacaatccaaaaaaacttcgacaaagtgcctatagttttggaagatcgtcgtataaaaatacgtcaaaattactaatactttgagatttaaaagaacgtgacacatctttaactaggaattaaacttgcgcaaacctttgcacaagatga

SEQ ID NO: 662 - DNA, 3396 bp, Diabrotica virgifera
  SmartBlast Evalue=0; Info=Patatin-like phospholipase domain- containing protein 2 n=1 Tax=Harpegnathos saltator RepID=E2B3G0_ 9HYME
attgaatcgagaaacgagttgaacggttacacgcagtatactcatataatatcccaattgtttatttattacgagttgatctgttgtttagaagtgaagtttgttggttatatcgactgagaaaagactcttgaatcggttttcggagaaatatgaatttatctttcgccggttgtggttttttgggtatctaccatgtcggagttgcctgttgttttcgaaaatatgcgccccatttactattggacaagatttcgggggcatcagcgggagcaattgctgcatgctgcttgatctgtgatctgcctattggtgatatgaccagtgatgttctccgagtatgtacggaagcccgaagcaggtctctaggtgccttctctccttcgtttaatattcacaaattaatgttagaaaatttagaaaaatttttaccagaagatgctcatatcagatgtagtggaaaacttcacgtatcccttactagagttcatgacggaaagaacgttgtggtttcacaatttgacagcagagaagatttaatccaaattctgctagcatcagccttcattccattcttctctggattaattcctccaaaattcaagggtgtacgttatatggatggtggttatagcgacaatttacctactttagacgaaaataccattacagttagtccattctgtggcgaaagtgacatttgcccaagagatgacagctcacaactattccatattaacatcgcaaacacaagtatagaactctccaagcacaacatgtatagaatagttcgtatactgtttccgccaaaaccagagattttgtcaaatatgtgcaaacaaggattcgacgatgcgcttagatttctacataggaacaacttgatcaattgcaccaggtgcttggctgtgcaatctacattcgtggtctcagaaactttggacgaagaattggaatacgacccacagtgtaaagaatgtaaacttcatagacaagaggcacttgtatctaatgtacctgaatctgtcctaagtaaatttcaagaagccgtggacaaagccaacaatggtcttctaaattggttgttcaaacacaggggtatgaaactgctgtctgtgcttacgttaccttacaccttacctgctgatgtgatgtatgctacatttacaaagtttcaaacatttccgataaaacctggtcggtcgatggcattttatagaaattgcgcccaatttcactttcagagttttatgggcaaaatatatgacaataaatcgtatcaatttgaattactgggaaatgccattttagcttcaccttcatttgcatgccacgaacatatttatagagaaaaaagatttatggtagcagcaccacaacttggaaatggagcatgggaattgagcaaagttttcattgataagatgacgttcctgctgaagaaaatcaataggaaacgacaacaacttagcgccaaaattacttgccaattagcgattacagaatatggtaaaaataaattcgacgtggaatcatgccaggatgtacaaaatggaaataaaatgaaccttaacttcaccttacaattagaggatagagacttaccattaaaccaaagcccagtacgaaagttcaacacaaaggaaattctccagcgaaaaccgagttttactgtaaataggactgaatccatggacaacgatacattcgatcatatcctacaagtcacatcacaacacgatactataatggcttattattatttggacgaaaataataaagttaaagtcactgaaatttttgatgtaaccgatagtgattctccaattgttcagacttctgaagaaagaagtgcaaatacaaatttggagttcgacgacgactggacaaatcaagagcaatggcaaccaaatgaggaaaatattgctcagtttgaactagaggacatacttgacagagaaccaatcttttctgaccccgaaagcgaatggacaggtacgttcaaaatcgaagaaccagaagatgaagatgaacaataccctaccaacgatactctcccagaatctgatcgaaggggtagccgagaagtcatcaaccagtggaacaaaaaggaatataaaatcccatcgatggtctacgaagatagtgacacataaatgtattggcatctacgtttaggatgatagttttttaagatattttaaattatataaaattattaaagtaataatcagcggaccataaaaataaagatttagggttttccacacttactgaaaaaatattgtattatatgcagctctcgttgagacgttccaattttcttattccatatatcagccctccgctcaaacagtgtcataagtcaaaaaatcaaagtatcgagaaaacgacgtttaaaattagttctatctataatttttccggatttagttcaaaagctgttcaaattagaacaataactcttttagttacaaaggtttttgaagctctacaaaatagcgtacaatgtctactaaaaatatttaaaaaaattttaagttgtgacactatacatatatatcattattattatttggttaacagagttatacgttttaatgatctaacttttaatatacctaagtaacaaaattaaataaaaaatagtgcaaaagtaacaaataaaggtctcacttttcttgggtaccttcgcagattgttttgactaaagcaatcacataaaatatactgtctaaactcgacaaacgactctttatacagatcttagatggacaacttcattgcacaagccgatatgtgacactgtttatgttcggtctcggtgcatccttgattttagttaaacatataatgacgccagtgtcatctaacgacaaatacttgaactatatcagtagtactttttgagataggattttgcagttttattaaactgttgaggcaataaaaccattcttttttttttttagttgtgacactatttgagcggatgtgcgatatgttcatcacaataaattctgctggtgttacagttcaaaaactatcaagagtgttccaaaatagatcctgtgtttttatttcacattgttacctaagattggccagatattataatatttcttctatgaatgattcccacatattatactcgtagcttagatttttacatatacctataataattaaaaaagaaataaaaaaagagtgagtgagttcctttaaaaaattaacaaatatgcatagttagcattacagttgtattaaaataagcagtacctatatactaatttgggcataaacttgaatttatagaattgtatagtgaataatggctggaaccatggtaaacgggaaatactaagaaaatattaaaggaacatattggagggaagc

SEQ ID NO: 663 - DNA, 3396 bp, Diabrotica virgifera
  SmartBlast Evalue=0; Info=Patatin-like phospholipase domain- containing protein 2 n=1 Tax=Harpegnathos saltator RepID=E2B3G0_ 9HYME
attgaatcgagaaacgagttgaacggttacacgcagtatactcatataatatcccaattgtttatttattacgagttgatctgttgtttagaagtgaagtttgttggttatatcgactgagaaaagactcttgaatcggttttcggagaaatatgaatttatctttcgccggttgtggttttttgggtatctaccatgtcggagttgcctgttgttttcgaaaatatgcgccccatttactattggacaagatttcgggggcatcagcgggagcaattgctgcatgctgcttgatctgtgatctgcctattggtgatatgaccagtgatgttctccgagtatgtacggaagcccgaagcaggtctctaggtgccttctctccttcgtttaatattcacaaattaatgttagaaaatttagaaaaatttttaccagaagatgctcatatcagatgtagtggaaaacttcacgtatcccttactagagttcatgacggaaagaacgttgtggtttcacaatttgacagcagagaagatttaatccaaattctgctagcatcagccttcattccattcttctctggattaattcctccaaaattcaagggcgtacgttatatggatggtggttatagcgacaatttacctactttagacgaaaataccattacagttagtccattctgtggtgaaagtgatatttgtccaagagatgacagctcacaactattccatattaacatcgcaaacacaagtatagaactctccaagcacaacatgtatagaatagttcgtatactgtttccgccaaaacctgagattttgtcaaatatgtgcaaacaaggattcgacgatgcgcttagatttctacataggaacaacttgatcaattgcaccaggtgcttggctgtgcaatctacattcgtggtctcagaaactttggacgaagaattggaatacgacccacagtgtaaagaatgtaaacttcatagacaagaagcacttgtatctaatgtacctgaatctgtcctaagtaaatttcaagaagccgtggacaaagccaacaatggtcttctaaattggttgttcaaacacaggggtatgaaactgctgtctgtgcttacgttaccttacaccttacctgctgatgtgatgtatgctacatttacaaagtttcaaacatttccgataaaacctggtcggtcgatggcattttatagaaattgcgcccaatttcactttcagagttttatgggcaaaatatatgacaataaatcgtatcaatttgaattactgggaaatgccattttagcttcaccttcatttgcatgccacgaacatatttatagagaaaaaagatttatggtagcagcaccacaacttggaaatggagcatgggaattgagcaaagttttcattgataagatgacgttcctgctgaagaaaatcaataggaaacgacaacaacttagcgccaaaattacttgccaattagcgattacagaatatggtaaaaataaattcgacgtggaatcatgccaggatgtacaaaatggaaataaaatgaaccttaacttcaccttacaattagaggatagagacttaccattaaaccaaagcccagtacgaaagttcaacacaaaggaaattctccaacgaaaaccgagttttactgtaaataggacggaatccatggacaatgatacattcgaccacatcctacaagtcacatcacaacacgatactataatggcttattattatttggacgaaaataataaagttaaagtcactgaaattttcgacgtaaccgatagtgattctccaattgttcagacttctgaagaaagaagtgcaaatacaaatttggagttcgacgacgactggacaaatcaagagcaatggcaaccaaatgaggaaaatattgctcagtttgaactagaggacatacttgacagagaaccaatcttttctgaccccgaaagcgaatggacaggtacgttcaaaatcgaagaaccagaagatgaagatgaacaataccctaccaacgatactctcccagaatctgatcgaaggggtagccgagaagtcatcaaccagtggaacaaaaaggaatataaaatcccatcgatggtctacgaagatagtgacacataaatgtattggcatctacgtttaggatgatagttttttaagatattttaaattatataaaattattaaagtaataatcagcggaccataaaaataaagatttagggttttccacacttactgaaaaaatattgtattatatgcagctctcgttgagacgttccaattttcttattccatatatcagccctccgctcaaacagtgtcataagtcaaaaaatcaaagtatcgagaaaacgacgtttaaaattagttctatctataatttttccggatttagttcaaaagctgttcaaattagaacaataactcttttagttacaaaggtttttgaagctctacaaaatagcgtacaatgtctactaaaaatatttaaaaaaattttaagttgtgacactatacatatatatcattattattatttggttaacagagttatacgttttaatgatctaacttttaatatacctaagtaacaaaattaaataaaaaatagtgcaaaagtaacaaataaaggtctcacttttcttgggtaccttcgcagattgttttgactaaagcaatcacataaaatatactgtctaaactcgacaaacgactctttatacagatcttagatggacaacttcattgcacaagccgatatgtgacactgtttatgttcggtctcggtgcatccttgattttagttaaacatataatgacgccagtgtcatctaacgacaaatacttgaactatatcagtagtactttttgagataggattttgcagttttattaaactgttgaggcaataaaaccattcttttttttttttagttgtgacactatttgagcggatgtgcgatatgttcatcacaataaattctgctggtgttacagttcaaaaactatcaagagtgttccaaaatagatcctgtgtttttatttcacattgttacctaagattggccagatattataatatttcttctatgaatgattcccacatattatactcgtagcttagatttttacatatacctataataattaaaaaagaaataaaaaaagagtgagtgagttcctttaaaaaattaacaaatatgcatagttagcattacagttgtattaaaataagcagtacctatatactaatttgggcataaacttgaatttatagaattgtatagtgaataatggctggaaccatggtaaacgggaaatactaagaaaatattaaaggaacatattggagggaagc

SEQ ID NO: 664 - DNA, 3396 bp, Diabrotica virgifera
  SmartBlast Evalue=0; Info=Patatin-like phospholipase domain- containing protein 2 n=1 Tax=Harpegnathos saltator RepID=E2B3G0_ 9HYME
attgaatcgagaaacgagttgaacggttacacgcagtatactcatataatatcccaattgtttatttattacgagttgatctgttgtttagaagtgaagtttgttggttatatcgactgagaaaagactcttgaatcggttttcggagaaatatgaatttatctttcgccggttgtggttttttgggtatctaccatgtcggagttgcctgttgttttcgaaaatatgcgccccatttactattggacaagatttcgggggcatcagcgggagcaattgctgcatgctgcttgatctgtgatctgcctattggtgatatgaccagtgatgttctccgagtatgtacggaagcccgaagcaggtctctaggtgccttctctccttcgtttaatattcacaaattaatgttagaaaatttagaaaaatttttaccagaagatgctcatatcagatgtagtggaaaacttcacgtatcccttactagagttcatgacggaaagaacgttgtggtttcacaatttgacagcagagaagatttaatccaaattctgctagcatcagccttcattccattcttctctggattaattcctccaaaattcaagggcgtacgttatatggatggtggttatagcgacaatttacctactttagacgaaaataccattacagttagtccattctgtggtgaaagtgatatttgtccaagagatgacagctcacaactattccatattaacatcgcaaacacaagtatagaactctccaagcacaacatgtatagaatagttcgtatactgtttccgccaaaacctgagattttgtcaaatatgtgcaaacaaggattcgacgatgcgcttagatttctacataggaacaacttgatcaattgcaccaggtgcttggctgtgcaatctacattcgtggtctcagaaactttggacgaagaattggaatacgacccacagtgtaaagaatgtaaacttcatagacaagaagcacttgtatctaatgtacctgaatctgtcctaagtaaatttcaagaagccgtggacaaagccaacaatggtcttctaaattggttgttcaaacacaggggtatgaaactgctgtctgtgcttacgttaccttacaccttacctgctgatgtgatgtatgctacatttacaaagtttcaaacatttccgataaaacctggtcggtcgatggcattttatagaaattgcgcccaatttcactttcagagttttatgggcaaaatatatgacaataaatcgtatcaatttgaattactgggaaatgccattttagcttcaccttcatttgcatgccacgaacatatttatagagaaaaaagatttatggtagcagcaccacaacttggaaatggagcatgggaattgagcaaagttttcattgataagatgacgttcctgctgaagaaaatcaataggaaacgacaacaacttagcgccaaaattacttgccaattagcgattacagaatatggtaaaaataaattcgacgtggaatcatgccaggatgtacaaaatggaaataaaatgaaccttaacttcaccttacaattagaggatagagacttaccattaaaccaaagcccagtacgaaagttcaacacaaaggaaattctccagcgaaaaccgagttttactgtaaataggactgaatccatggacaacgatacattcgatcatatcctacaagtcacatcacaacacgatactataatggcttattattatttggacgaaaataataaagttaaagtcactgaaatttttgatgtaaccgatagtgattctccaattgttcagacttctgaagaaagaagtgcaaatacaaatttggagttcgacgacgactggacaaatcaagagcaatggcaaccaaatgaggaaaatattgctcagtttgaactagaggacatacttgacagagaaccaatcttttctgaccccgaaagcgaatggacaggtacgttcaaaatcgaagaaccagaagatgaagatgaacaataccctaccaacgatactctcccagaatctgatcgaaggggtagccgagaagtcatcaaccagtggaacaaaaaggaatataaaatcccatcgatggtctacgaagatagtgacacataaatgtattggcatctacgtttaggatgatagttttttaagatattttaaattatataaaattattaaagtaataatcagcggaccataaaaataaagatttagggttttccacacttactgaaaaaatattgtattatatgcagctctcgttgagacgttccaattttcttattccatatatcagccctccgctcaaacagtgtcataagtcaaaaaatcaaagtatcgagaaaacgacgtttaaaattagttctatctataatttttccggatttagttcaaaagctgttcaaattagaacaataactcttttagttacaaaggtttttgaagctctacaaaatagcgtacaatgtctactaaaaatatttaaaaaaattttaagttgtgacactatacatatatatcattattattatttggttaacagagttatacgttttaatgatctaacttttaatatacctaagtaacaaaattaaataaaaaatagtgcaaaagtaacaaataaaggtctcacttttcttgggtaccttcgcagattgttttgactaaagcaatcacataaaatatactgtctaaactcgacaaacgactctttatacagatcttagatggacaacttcattgcacaagccgatatgtgacactgtttatgttcggtctcggtgcatccttgattttagttaaacatataatgacgccagtgtcatctaacgacaaatacttgaactatatcagtagtactttttgagataggattttgcagttttattaaactgttgaggcaataaaaccattcttttttttttttagttgtgacactatttgagcggatgtgcgatatgttcatcacaataaattctgctggtgttacagttcaaaaactatcaagagtgttccaaaatagatcctgtgtttttatttcacattgttacctaagattggccagatattataatatttcttctatgaatgattcccacatattatactcgtagcttagatttttacatatacctataataattaaaaaagaaataaaaaaagagtgagtgagttcctttaaaaaattaacaaatatgcatagttagcattacagttgtattaaaataagcagtacctatatactaatttgggcataaacttgaatttatagaattgtatagtgaataatggctggaaccatggtaaacgggaaatactaagaaaatattaaaggaacatattggagggaagc

SEQ ID NO: 665 - DNA, 3210 bp, Diabrotica virgifera
  SmartBlast Evalue=0; Info=Patatin-like phospholipase domain- containing protein 2 n=1 Tax=Harpegnathos saltator RepID=E2B3G0_ 9HYME
attgaatcgagaaacgagttgaacggttacacgcagtatactcatataatatcccaattgtttatttattacgagttgatctgttgtttagaagtgaagtttgttggttatatcgactgagaaaagactcttgaatcggttttcggagaaatatgaatttatctttcgccggttgtggttttttgggtatctaccatgtcggagttgcctgttgttttcgaaaatatgcgccccatttactattggacaagatttcgggggcatcagcgggagcaattgctgcatgctgcttgatctgtgatctgcctattggtgatatgaccagtgatgttctccgagtatgtacggaagcccgaagcaggtctctaggtgccttctctccttcgtttaatattcacaaattaatgttagaaaatttagaaaaatttttaccagaagatgctcatatcagatgtagtggaaaacttcacgtatcccttactagagttcatgacggaaagaacgttgtggtttcacaatttgacagcagagaagatttaatccaaattctgctagcatcagccttcattccattcttctctggattaattcctccaaaattcaagggtgtacgttatatggatggtggttatagcgacaatttacctactttagacgaaaataccattacagttagtccattctgtggcgaaagtgacatttgcccaagagatgacagctcacaactattccatattaacatcgcaaacacaagtatagaactctccaagcacaacatgtatagaatagttcgtatactgtttccgccaaaaccagagattttgtcaaatatgtgcaaacaaggattcgacgatgcgcttagatttctacataggaacaacttgatcaattgcaccaggtgcttggctgtgcaatctacattcgtggtctcagaaactttggacgaagaattggaatacgacccacagtgtaaagaatgtaaacttcatagacaagaggcacttgtatctaatgtacctgaatctgtcctaagtaaatttcaagaagccgtggacaaagccaacaatggtcttctaaattggttgttcaaacacaggggtatgaaactgctgtctgtgcttacgttaccttacaccttacctgctgatgtgatgtatgctacatttacaaaatttatggtagcagcaccacaacttggaaatggagcatgggaattgagcaaagttttcattgataagatgacgttcctgctgaagaaaatcaataggaaacgacaacaacttagcgccaaaattacttgccaattagcgattacagaatatggtaaaaataaattcgacgtggaatcatgccaggatgtacaaaatggaaataaaatgaaccttaacttcaccttacaattagaggatagagacttaccattaaaccaaagcccagtacgaaagttcaacacaaaggaaattctccaacgaaaaccgagttttactgtaaataggacggaatccatggacaatgatacattcgaccacatcctacaagtcacatcacaacacgatactataatggcttattattatttggacgaaaataataaagttaaagtcactgaaattttcgacgtaaccgatagtgattctccaattgttcagacttctgaagaaagaagtgcaaatacaaatttggagttcgacgacgactggacaaatcaagagcaatggcaaccaaatgaggaaaatattgctcagtttgaactagaggacatacttgacagagaaccaatcttttctgaccccgaaagcgaatggacaggtacgttcaaaatcgaagaaccagaagatgaagatgaacaataccctaccaacgatactctcccagaatctgatcgaaggggtagccgagaagtcatcaaccagtggaacaaaaaggaatataaaatcccatcgatggtctacgaagatagtgacacataaatgtattggcatctacgtttaggatgatagttttttaagatattttaaattatataaaattattaaagtaataatcagcggaccataaaaataaagatttagggttttccacacttactgaaaaaatattgtattatatgcagctctcgttgagacgttccaattttcttattccatatatcagccctccgctcaaacagtgtcataagtcaaaaaatcaaagtatcgagaaaacgacgtttaaaattagttctatctataatttttccggatttagttcaaaagctgttcaaattagaacaataactcttttagttacaaaggtttttgaagctctacaaaatagcgtacaatgtctactaaaaatatttaaaaaaattttaagttgtgacactatacatatatatcattattattatttggttaacagagttatacgttttaatgatctaacttttaatatacctaagtaacaaaattaaataaaaaatagtgcaaaagtaacaaataaaggtctcacttttcttgggtaccttcgcagattgttttgactaaagcaatcacataaaatatactgtctaaactcgacaaacgactctttatacagatcttagatggacaacttcattgcacaagccgatatgtgacactgtttatgttcggtctcggtgcatccttgattttagttaaacatataatgacgccagtgtcatctaacgacaaatacttgaactatatcagtagtactttttgagataggattttgcagttttattaaactgttgaggcaataaaaccattcttttttttttttagttgtgacactatttgagcggatgtgcgatatgttcatcacaataaattctgctggtgttacagttcaaaaactatcaagagtgttccaaaatagatcctgtgtttttatttcacattgttacctaagattggccagatattataatatttcttctatgaatgattcccacatattatactcgtagcttagatttttacatatacctataataattaaaaaagaaataaaaaaagagtgagtgagttcctttaaaaaattaacaaatatgcatagttagcattacagttgtattaaaataagcagtacctatatactaatttgggcataaacttgaatttatagaattgtatagtgaataatggctggaaccatggtaaacgggaaatactaagaaaatattaaaggaacatattggagggaagc

SEQ ID NO: 666 - DNA, 3210 bp, Diabrotica virgifera
  SmartBlast Evalue=0; Info=Patatin-like phospholipase domain- containing protein 2 n=1 Tax=Harpegnathos saltator RepID=E2B3G0_ 9HYME
attgaatcgagaaacgagttgaacggttacacgcagtatactcatataatatcccaattgtttatttattacgagttgatctgttgtttagaagtgaagtttgttggttatatcgactgagaaaagactcttgaatcggttttcggagaaatatgaatttatctttcgccggttgtggttttttgggtatctaccatgtcggagttgcctgttgttttcgaaaatatgcgccccatttactattggacaagatttcgggggcatcagcgggagcaattgctgcatgctgcttgatctgtgatctgcctattggtgatatgaccagtgatgttctccgagtatgtacggaagcccgaagcaggtctctaggtgccttctctccttcgtttaatattcacaaattaatgttagaaaatttagaaaaatttttaccagaagatgctcatatcagatgtagtggaaaacttcacgtatcccttactagagttcatgacggaaagaacgttgtggtttcacaatttgacagcagagaagatttaatccaaattctgctagcatcagccttcattccattcttctctggattaattcctccaaaattcaagggtgtacgttatatggatggtggttatagcgacaatttacctactttagacgaaaataccattacagttagtccattctgtggcgaaagtgacatttgcccaagagatgacagctcacaactattccatattaacatcgcaaacacaagtatagaactctccaagcacaacatgtatagaatagttcgtatactgtttccgccaaaaccagagattttgtcaaatatgtgcaaacaaggattcgacgatgcgcttagatttctacataggaacaacttgatcaattgcaccaggtgcttggctgtgcaatctacattcgtggtctcagaaactttggacgaagaattggaatacgacccacagtgtaaagaatgtaaacttcatagacaagaggcacttgtatctaatgtacctgaatctgtcctaagtaaatttcaagaagccgtggacaaagccaacaatggtcttctaaattggttgttcaaacacaggggtatgaaactgctgtctgtgcttacgttaccttacaccttacctgctgatgtgatgtatgctacatttacaaaatttatggtagcagcaccacaacttggaaatggagcatgggaattgagcaaagttttcattgataagatgacgttcctgctgaagaaaatcaataggaaacgacaacaacttagcgccaaaattacttgccaattagcgattacagaatatggtaaaaataaattcgacgtggaatcatgccaggatgtacaaaatggaaataaaatgaaccttaacttcaccttacaattagaggatagagacttaccattaaaccaaagcccagtacgaaagttcaacacaaaggaaattctccagcgaaaaccgagttttactgtaaataggactgaatccatggacaacgatacattcgatcatatcctacaagtcacatcacaacacgatactataatggcttattattatttggacgaaaataataaagttaaagtcactgaaatttttgatgtaaccgatagtgattctccaattgttcagacttctgaagaaagaagtgcaaatacaaatttggagttcgacgacgactggacaaatcaagagcaatggcaaccaaatgaggaaaatattgctcagtttgaactagaggacatacttgacagagaaccaatcttttctgaccccgaaagcgaatggacaggtacgttcaaaatcgaagaaccagaagatgaagatgaacaataccctaccaacgatactctcccagaatctgatcgaaggggtagccgagaagtcatcaaccagtggaacaaaaaggaatataaaatcccatcgatggtctacgaagatagtgacacataaatgtattggcatctacgtttaggatgatagttttttaagatattttaaattatataaaattattaaagtaataatcagcggaccataaaaataaagatttagggttttccacacttactgaaaaaatattgtattatatgcagctctcgttgagacgttccaattttcttattccatatatcagccctccgctcaaacagtgtcataagtcaaaaaatcaaagtatcgagaaaacgacgtttaaaattagttctatctataatttttccggatttagttcaaaagctgttcaaattagaacaataactcttttagttacaaaggtttttgaagctctacaaaatagcgtacaatgtctactaaaaatatttaaaaaaattttaagttgtgacactatacatatatatcattattattatttggttaacagagttatacgttttaatgatctaacttttaatatacctaagtaacaaaattaaataaaaaatagtgcaaaagtaacaaataaaggtctcacttttcttgggtaccttcgcagattgttttgactaaagcaatcacataaaatatactgtctaaactcgacaaacgactctttatacagatcttagatggacaacttcattgcacaagccgatatgtgacactgtttatgttcggtctcggtgcatccttgattttagttaaacatataatgacgccagtgtcatctaacgacaaatacttgaactatatcagtagtactttttgagataggattttgcagttttattaaactgttgaggcaataaaaccattcttttttttttttagttgtgacactatttgagcggatgtgcgatatgttcatcacaataaattctgctggtgttacagttcaaaaactatcaagagtgttccaaaatagatcctgtgtttttatttcacattgttacctaagattggccagatattataatatttcttctatgaatgattcccacatattatactcgtagcttagatttttacatatacctataataattaaaaaagaaataaaaaaagagtgagtgagttcctttaaaaaattaacaaatatgcatagttagcattacagttgtattaaaataagcagtacctatatactaatttgggcataaacttgaatttatagaattgtatagtgaataatggctggaaccatggtaaacgggaaatactaagaaaatattaaaggaacatattggagggaagc

SEQ ID NO: 667 - DNA, 3210 bp, Diabrotica virgifera
  SmartBlast Evalue=0; Info=Patatin-like phospholipase domain- containing protein 2 n=1 Tax=Harpegnathos saltator RepID=E2B3G0_ 9HYME
attgaatcgagaaacgagttgaacggttacacgcagtatactcatataatatcccaattgtttatttattacgagttgatctgttgtttagaagtgaagtttgttggttatatcgactgagaaaagactcttgaatcggttttcggagaaatatgaatttatctttcgccggttgtggttttttgggtatctaccatgtcggagttgcctgttgttttcgaaaatatgcgccccatttactattggacaagatttcgggggcatcagcgggagcaattgctgcatgctgcttgatctgtgatctgcctattggtgatatgaccagtgatgttctccgagtatgtacggaagcccgaagcaggtctctaggtgccttctctccttcgtttaatattcacaaattaatgttagaaaatttagaaaaatttttaccagaagatgctcatatcagatgtagtggaaaacttcacgtatcccttactagagttcatgacggaaagaacgttgtggtttcacaatttgacagcagagaagatttaatccaaattctgctagcatcagccttcattccattcttctctggattaattcctccaaaattcaagggcgtacgttatatggatggtggttatagcgacaatttacctactttagacgaaaataccattacagttagtccattctgtggtgaaagtgatatttgtccaagagatgacagctcacaactattccatattaacatcgcaaacacaagtatagaactctccaagcacaacatgtatagaatagttcgtatactgtttccgccaaaacctgagattttgtcaaatatgtgcaaacaaggattcgacgatgcgcttagatttctacataggaacaacttgatcaattgcaccaggtgcttggctgtgcaatctacattcgtggtctcagaaactttggacgaagaattggaatacgacccacagtgtaaagaatgtaaacttcatagacaagaagcacttgtatctaatgtacctgaatctgtcctaagtaaatttcaagaagccgtggacaaagccaacaatggtcttctaaattggttgttcaaacacaggggtatgaaactgctgtctgtgcttacgttaccttacaccttacctgctgatgtgatgtatgctacatttacaaaatttatggtagcagcaccacaacttggaaatggagcatgggaattgagcaaagttttcattgataagatgacgttcctgctgaagaaaatcaataggaaacgacaacaacttagcgccaaaattacttgccaattagcgattacagaatatggtaaaaataaattcgacgtggaatcatgccaggatgtacaaaatggaaataaaatgaaccttaacttcaccttacaattagaggatagagacttaccattaaaccaaagcccagtacgaaagttcaacacaaaggaaattctccaacgaaaaccgagttttactgtaaataggacggaatccatggacaatgatacattcgaccacatcctacaagtcacatcacaacacgatactataatggcttattattatttggacgaaaataataaagttaaagtcactgaaattttcgacgtaaccgatagtgattctccaattgttcagacttctgaagaaagaagtgcaaatacaaatttggagttcgacgacgactggacaaatcaagagcaatggcaaccaaatgaggaaaatattgctcagtttgaactagaggacatacttgacagagaaccaatcttttctgaccccgaaagcgaatggacaggtacgttcaaaatcgaagaaccagaagatgaagatgaacaataccctaccaacgatactctcccagaatctgatcgaaggggtagccgagaagtcatcaaccagtggaacaaaaaggaatataaaatcccatcgatggtctacgaagatagtgacacataaatgtattggcatctacgtttaggatgatagttttttaagatattttaaattatataaaattattaaagtaataatcagcggaccataaaaataaagatttagggttttccacacttactgaaaaaatattgtattatatgcagctctcgttgagacgttccaattttcttattccatatatcagccctccgctcaaacagtgtcataagtcaaaaaatcaaagtatcgagaaaacgacgtttaaaattagttctatctataatttttccggatttagttcaaaagctgttcaaattagaacaataactcttttagttacaaaggtttttgaagctctacaaaatagcgtacaatgtctactaaaaatatttaaaaaaattttaagttgtgacactatacatatatatcattattattatttggttaacagagttatacgttttaatgatctaacttttaatatacctaagtaacaaaattaaataaaaaatagtgcaaaagtaacaaataaaggtctcacttttcttgggtaccttcgcagattgttttgactaaagcaatcacataaaatatactgtctaaactcgacaaacgactctttatacagatcttagatggacaacttcattgcacaagccgatatgtgacactgtttatgttcggtctcggtgcatccttgattttagttaaacatataatgacgccagtgtcatctaacgacaaatacttgaactatatcagtagtactttttgagataggattttgcagttttattaaactgttgaggcaataaaaccattcttttttttttttagttgtgacactatttgagcggatgtgcgatatgttcatcacaataaattctgctggtgttacagttcaaaaactatcaagagtgttccaaaatagatcctgtgtttttatttcacattgttacctaagattggccagatattataatatttcttctatgaatgattcccacatattatactcgtagcttagatttttacatatacctataataattaaaaaagaaataaaaaaagagtgagtgagttcctttaaaaaattaacaaatatgcatagttagcattacagttgtattaaaataagcagtacctatatactaatttgggcataaacttgaatttatagaattgtatagtgaataatggctggaaccatggtaaacgggaaatactaagaaaatattaaaggaacatattggagggaagc

SEQ ID NO: 668 - DNA, 3210 bp, Diabrotica virgifera
  SmartBlast Evalue=0; Info=Patatin-like phospholipase domain- containing protein 2 n=1 Tax=Harpegnathos saltator RepID=E2B3G0_ 9HYME
attgaatcgagaaacgagttgaacggttacacgcagtatactcatataatatcccaattgtttatttattacgagttgatctgttgtttagaagtgaagtttgttggttatatcgactgagaaaagactcttgaatcggttttcggagaaatatgaatttatctttcgccggttgtggttttttgggtatctaccatgtcggagttgcctgttgttttcgaaaatatgcgccccatttactattggacaagatttcgggggcatcagcgggagcaattgctgcatgctgcttgatctgtgatctgcctattggtgatatgaccagtgatgttctccgagtatgtacggaagcccgaagcaggtctctaggtgccttctctccttcgtttaatattcacaaattaatgttagaaaatttagaaaaatttttaccagaagatgctcatatcagatgtagtggaaaacttcacgtatcccttactagagttcatgacggaaagaacgttgtggtttcacaatttgacagcagagaagatttaatccaaattctgctagcatcagccttcattccattcttctctggattaattcctccaaaattcaagggcgtacgttatatggatggtggttatagcgacaatttacctactttagacgaaaataccattacagttagtccattctgtggtgaaagtgatatttgtccaagagatgacagctcacaactattccatattaacatcgcaaacacaagtatagaactctccaagcacaacatgtatagaatagttcgtatactgtttccgccaaaacctgagattttgtcaaatatgtgcaaacaaggattcgacgatgcgcttagatttctacataggaacaacttgatcaattgcaccaggtgcttggctgtgcaatctacattcgtggtctcagaaactttggacgaagaattggaatacgacccacagtgtaaagaatgtaaacttcatagacaagaagcacttgtatctaatgtacctgaatctgtcctaagtaaatttcaagaagccgtggacaaagccaacaatggtcttctaaattggttgttcaaacacaggggtatgaaactgctgtctgtgcttacgttaccttacaccttacctgctgatgtgatgtatgctacatttacaaaatttatggtagcagcaccacaacttggaaatggagcatgggaattgagcaaagttttcattgataagatgacgttcctgctgaagaaaatcaataggaaacgacaacaacttagcgccaaaattacttgccaattagcgattacagaatatggtaaaaataaattcgacgtggaatcatgccaggatgtacaaaatggaaataaaatgaaccttaacttcaccttacaattagaggatagagacttaccattaaaccaaagcccagtacgaaagttcaacacaaaggaaattctccagcgaaaaccgagttttactgtaaataggactgaatccatggacaacgatacattcgatcatatcctacaagtcacatcacaacacgatactataatggcttattattatttggacgaaaataataaagttaaagtcactgaaatttttgatgtaaccgatagtgattctccaattgttcagacttctgaagaaagaagtgcaaatacaaatttggagttcgacgacgactggacaaatcaagagcaatggcaaccaaatgaggaaaatattgctcagtttgaactagaggacatacttgacagagaaccaatcttttctgaccccgaaagcgaatggacaggtacgttcaaaatcgaagaaccagaagatgaagatgaacaataccctaccaacgatactctcccagaatctgatcgaaggggtagccgagaagtcatcaaccagtggaacaaaaaggaatataaaatcccatcgatggtctacgaagatagtgacacataaatgtattggcatctacgtttaggatgatagttttttaagatattttaaattatataaaattattaaagtaataatcagcggaccataaaaataaagatttagggttttccacacttactgaaaaaatattgtattatatgcagctctcgttgagacgttccaattttcttattccatatatcagccctccgctcaaacagtgtcataagtcaaaaaatcaaagtatcgagaaaacgacgtttaaaattagttctatctataatttttccggatttagttcaaaagctgttcaaattagaacaataactcttttagttacaaaggtttttgaagctctacaaaatagcgtacaatgtctactaaaaatatttaaaaaaattttaagttgtgacactatacatatatatcattattattatttggttaacagagttatacgttttaatgatctaacttttaatatacctaagtaacaaaattaaataaaaaatagtgcaaaagtaacaaataaaggtctcacttttcttgggtaccttcgcagattgttttgactaaagcaatcacataaaatatactgtctaaactcgacaaacgactctttatacagatcttagatggacaacttcattgcacaagccgatatgtgacactgtttatgttcggtctcggtgcatccttgattttagttaaacatataatgacgccagtgtcatctaacgacaaatacttgaactatatcagtagtactttttgagataggattttgcagttttattaaactgttgaggcaataaaaccattcttttttttttttagttgtgacactatttgagcggatgtgcgatatgttcatcacaataaattctgctggtgttacagttcaaaaactatcaagagtgttccaaaatagatcctgtgtttttatttcacattgttacctaagattggccagatattataatatttcttctatgaatgattcccacatattatactcgtagcttagatttttacatatacctataataattaaaaaagaaataaaaaaagagtgagtgagttcctttaaaaaattaacaaatatgcatagttagcattacagttgtattaaaataagcagtacctatatactaatttgggcataaacttgaatttatagaattgtatagtgaataatggctggaaccatggtaaacgggaaatactaagaaaatattaaaggaacatattggagggaagc

SEQ ID NO: 669 - DNA, 2770 bp, Diabrotica virgifera
  SmartBlast Evalue=1E-25; Info=Transposase n=1 Tax=Agrilus planipennis RepID=D2WLV0_AGRPL
tcgacttttcaccagatcacgtgttggtaagtctcacattggcatgttagaaataaaaaataaagtatacaatacgttgagttttcgatcagatataggcggctgaaggaagtgctaaaatcggcaacattgcttagtccactatgaggtgcattagcgtgggaagtggggaccatctgatactcgacggagcgcagctttgccatttataggccgtatatctaatttaaaactaaacatgctgtatatagattgtaacatcattacacatttgatagacacgtaactatttagagtcaaacatcttatggaagtacacaataagaaaataaggtcacaaaaatcctgagaaatgttatcatgtgggatgaaaagttcgtaggctgacacatagatggcgctactggtattaaatccatatggtttttagtcagccgtaaccttcaaaagatgcgtgtataaatttgacagctgtcgaactattagtgtatgagacattttgagtgaagcaacttatgttattttaaaaaaatggataaagagaaatttcgtgtcttaataaagtatttctttttgacaaaaaatactgttgaaaccaaagcttggcttggtaaacattattcggactctgcaccgggaaaataaaccgttgagaaatgttttgctaagtttaaacgaggcgaaataagcaccgaagacgatgcatgcagtggacgtcccaaagagtctgttaccgacgaaaacatcaaaaaagcccacaaaataattttggatgaccgtaaagtgaagttattcgagatagctgagacactaaagatatcaaaggaacgtgttggatatattgtgcatgaatatttgggtatacgaaaactttgtgcaaaatcgatcaaaaacaacaacgaattgatgcttctgagaagtgtttgaagctcttcaatcataatagaaccgaatttttgcgtcgatatattacaatggatgaaacatggcttccatcatttcacaccggagtccaatcgacagtctgccgagtggactgcacgtgatgaaccgacaccaaagcgtggaaagacgcaacagtcggctggcaaggttgtggcatcagtactttccttccgcagtcacctatttaccagatgtgttacccagcgactaccacctgttcgctgacctcaagaaaatgctcgctggaaagaaatttagcaccaatgaagaggtaatcgcagaaactgaagcttattttgaggctaaagacaaattgtattataaaaatggtactgaaaagttgtataaccgctataattgttgtatcgcccacgaaagtaactatattgaataataaaatcaatcaaaattgtataaaaaaaaaaaagaatatgcgtgtactttgtacgcacgtaagaagttatacttctattacacgatttaaacgaaataaatgtacctacgttaaacagtttatttttattttgtttaaatattaaactaaatttaatcttaccattttccaaaaataaaaaaagaataggaatggtccggatttgaactcaagacctctcgatctgtagccgaatgctatactaataacgctacgatgtctctgtttgtatagtctcggacataatgacaattcacggtaacaaacagacgaagtgaagtataataaatataaatgttttaataatacttatcttactcccgaggaagacaaatccaaagacacaaaaattataataaatatatttactaaaaacactaatatattcttttcacaccttttcttgcactgatatatttatacataacttgaaagatttagcaactaaacgccatactgtctgtgtgcgcatgcgcgcagtattatgaaattttactctcaatcgcgcctaaagaagtataccttcaaaaaattgtttgagttgtgacactatacagatatatcattatttttatctggttaacagagttatactttttaatgatctaactttaaatatacctaagtaacaaaattaaataaaaaatagtgcaaaaggaaaaataaaagtaacttttcttgagtacattcgcagattgttttgactaaggcaatcacaaaatacactgtcttaaactcgacaaacgacgctttacacatatcttagatggacaacttcattgcgcaagccgatatgtgacactgtttatgttcggtctcggtgcatccttgattttagttaaacatataatgacgccagtgtcatctaacgacaaatacttgaactatatcagtagtagtttttgagataggattttgcagttttattaaactgttgaggcaataaaaccattcttttttttttttagttgtgacactatttgagcggatgtgcgatatgttcatcacaataaattctgctggtgttacagttcaaaaactatcaagagtgttccaaaatagatcctgtgtttttatttcacattgttacctaagattggccagatattataatatttcttctatgaatgattcccacatattatactcgtagcttagatttttacatatacctataataattaaaaaagaaataaaaaaagagtgagtgagttcctttaaaaaattaacaaatatgcatagttagcattacagttgtattaaaataagcagtacctatatactaatttgggcataaacttgaatttatagaattgtatagtgaataatggctggaaccatggtaaacgggaaatactaagaaaatattaaaggaacatattggagggaagc

SEQ ID NO: 670 - DNA, 1197 bp, Diabrotica virgifera
  SmartBlast Evalue=1E-161; Info=Cathepsin L-like proteinase (Fragment) n=1 Tax=Diabrotica virgifera virgifera RepID=Q70EX0_ DIAVI
gatcaagtggcatgataatgttaatacaatcgacaatcaatataaaaaatgacgcaatcaagatgtaaaataccttatataagatagtataaaagagtataaataagtataggggaacataacaccgtatctatcattgtgattaggtgtgaaaggtgtttaaaaatgaggttccttattctacttgccgtattggctgtagctgtgaatgctacatcaatccaccaacaatgggctacatttaaggtaaaccattccaagaagtacggacatcttaaagaagagcaagttcgcttccaagttttctctcaaaatctccgcaaaattgaagaacacaatgcaagataccagaatggtgaagtgtccttctacttgggggttaatcagttcgcagatatgacttcagaggaattcaaggctatgcttgactcccaactcattcacaaacctaagcgaaacattacatcccgctttgtagctgatcctcaattgactgttccagaatcaattgactggagagagaaaggggcagttgctcccataagggaccaagggcaatgtggatcatgttgggcatttagtgcagctggtgctcttgaaggacaaagatttttaaagcagaacgtactagaagtactgagtacccaacagttagtagattgttccggtgattacgacaatgaaggctgcaatggtggttggccccattgggcatataactacattaaagatcatggcctctgtctagagtctgactacaagtatcaaggattagacggtgactgcaaacagtgtaatccggttatcaaaaccatcaatggctatgcatctgtagatcaaaccgaagaagcacttaaggaggctgtaggtactgttggcccaatatcagtatgtgtcaacgctaattgggactggcaactgtatagcgggggtatccttgatagccaaagttgtccaggcgacattttaaaccatgcagttttagctgttggatatggttcagaaaatggtaaagacttttggcttatcaagaattcatgggacacttattggggagaagcaggttatttgagattagtacgtggtacaaaccagtgcggtatcaataaagtggccgattatcctctcctataattttaaaaattgtcatgccttacagtttatataatgaaacatgaataaaaatattataacttt

SEQ ID NO: 671 - DNA, 1204 bp, Diabrotica virgifera
  SmartBlast Evalue=1E-162; Info=Cathepsin L-like proteinase (Fragment) n=1 Tax=Diabrotica virgifera virgifera RepID=Q70EX0_ DIAVI
gatcaagtggcatgataatgttaatacaatcgacaatcaatataaaaaatgacgcaatcaagatgtaaaataccttatataagatagtataaaagagtataaataagtataggggaacataacaccgtatctatcattgtgaaattaggtgtgaaaggtgtttaaaaatgaggttccttattctacttgccgtattggctgtagctgtgaatgctacatcaatccaccaacaatgggctacatttaaggtaaaccattccaagaagtacggacatcttaaagaagagcaagttcgcttccaagttttctctcaaaatctccgcaaaattgaagaacacaatgcaagataccagaatggtgaagtgtccttctacttgggggttaatcagttcgcagatatgacttcagaggaattcaaggctatgcttgactcccaactcattcacaagcctaaacgaaacattacatcccgatttgtagctgatcctcaattgactgttccagaatcaattgactggagagaaaagggggcagttgctcccataagggaccaagggcaatgtggatcatgttgggcatttagtgcagctggtgctcttgaaggacaaagatttttaaagcagaacgtactagaagtactgagtacccaacagttagtagattgttccggtgattacgacaatgaaggctgcaatggtggttggccccattgggcatataactacattaaagatcatggcctctgtctagagtctgactacaagtatcaaggattagacggtgactgcaaacagtgtaatccggttctcaaaaccatcaatggctacgcatctgtagatcaaaccgaagaagcacttaaggaggctgtaggtactgttggcccaatatcagtatgtgtgaacgctaattgggactggcaactgtacagcggaggtatccttgatagccaaagttgtccaggcggcattttaaaccatgcagttttagctgttggatatggttcagaaaatggtaaagacttttggcttatcaagaattcatgggacacttattggggagaagcaggttatttgagattggtacgtggtacaaaccagtgcggtatcaatgaagttgccgattatcctctcctataattttaaaaattgtcataccttacagtttatataatgaaacatgaataaaaatattataactttacgtg

SEQ ID NO: 672 - DNA, 1202 bp, Diabrotica virgifera
  SmartBlast Evalue=1E-162; Info=Cathepsin L-like proteinase (Fragment) n=1 Tax=Diabrotica virgifera virgifera RepID=Q70EX0_ DIAVI
gatcaagtggcatgataatgttaatacaatcgacaatcaatataaaaaatgacgcaatcaagatgtaaaataccttatataagatagtataaaagagtataaataagtataggggaacataacaccgtatctatcattgtgattaggtgtgaaaggtgtttaaaaatgaggttccttattctacttgccgtattggctgtagctgtgaatgctacatcaatccaccaacaatgggctacatttaaggtaaaccattccaagaagtacggacatcttaaagaagagcaagttcgcttccaagttttctctcaaaatctccgcaaaattgaagaacacaatgcaagataccagaatggtgaagtgtccttctacttgggggttaatcagttcgcagatatgacttcagaggaattcaaggctatgcttgactcccaactcattcacaagcctaaacgaaacattacatcccgatttgtagctgatcctcaattgactgttccagaatcaattgactggagagaaaagggggcagttgctcccataagggaccaagggcaatgtggatcatgttgggcatttagtgcagctggtgctcttgaaggacaaagatttttaaagcagaacgtactagaagtactgagtacccaacagttagtagattgttccggtgattacgacaatgaaggctgcaatggtggttggccccattgggcatataactacattaaagatcatggcctctgtctagagtctgactacaagtatcaaggattagacggtgactgcaaacagtgtaatccggttctcaaaaccatcaatggctacgcatctgtagatcaaaccgaagaagcacttaaggaggctgtaggtactgttggcccaatatcagtatgtgtgaacgctaattgggactggcaactgtacagcggaggtatccttgatagccaaagttgtccaggcggcattttaaaccatgcagttttagctgttggatatggttcagaaaatggtaaagacttttggcttatcaagaattcatgggacacttattggggagaagcaggttatttgagattggtacgtggtacaaaccagtgcggtatcaatgaagttgccgattatcctctcctataattttaaaaattgtcataccttacagtttatataatgaaacatgaataaaaatattataactttacgtg

SEQ ID NO: 673 - DNA, 1204 bp, Diabrotica virgifera
  SmartBlast Evalue=1E-162; Info=Cathepsin L-like proteinase (Fragment) n=1 Tax=Diabrotica virgifera virgifera RepID=Q70EX0_ DIAVI
gatcaagtggcatgataatgttaatacaatcgacaatcaatataaaaaatgacgcaatcaagatgtaaaataccttatataagatagtataaaagagtataaataagtataggggaacataacaccgtatctatcattgtgaaattaggtgtgaaaggtgtttaaaaatgaggttccttattctacttgccgtattggctgtagctgtgaatgctacatcaatccaccaacaatgggctacatttaaggtaaaccattccaagaagtacggacatcttaaagaagagcaagttcgcttccaagttttctctcaaaatctccgcaaaattgaagaacacaatgcaagataccagaatggtgaagtgtccttctacttgggggttaatcagttcgcagatatgacttcagaggaattcaaggctatgcttgactcccaactcattcacaaacctaagcgaaacattacatcccgctttgtagctgatcctcaattgactgttccagaatcaattgactggagagagaaaggggcagttgctcccataagggaccaagggcaatgtggatcatgttgggcatttagtgcagctggtgctcttgaaggacaaagatttttaaagcagaacgtactagaagtactgagtacccaacagttagtagattgttccggtgattacgacaatgaaggctgcaatggtggttggccccattgggcatataactacattaaagatcatggcctctgtctagagtctgactacaagtatcaaggattagacggtgactgcaaacagtgtaatccggttctcaaaaccatcaatggctacgcatctgtagatcaaaccgaagaagcacttaaggaggctgtaggtactgttggcccaatatcagtatgtgtgaacgctaattgggactggcaactgtacagcggaggtatccttgatagccaaagttgtccaggcggcattttaaaccatgcagttttagctgttggatatggttcagaaaatggtaaagacttttggcttatcaagaattcatgggacacttattggggagaagcaggttatttgagattggtacgtggtacaaaccagtgcggtatcaatgaagttgccgattatcctctcctataattttaaaaattgtcataccttacagtttatataatgaaacatgaataaaaatattataactttacgtg

SEQ ID NO: 674 - DNA, 1202 bp, Diabrotica virgifera
  SmartBlast Evalue=1E-162; Info=Cathepsin L-like proteinase (Fragment) n=1 Tax=Diabrotica virgifera virgifera RepID=Q70EX0_ DIAVI
gatcaagtggcatgataatgttaatacaatcgacaatcaatataaaaaatgacgcaatcaagatgtaaaataccttatataagatagtataaaagagtataaataagtataggggaacataacaccgtatctatcattgtgattaggtgtgaaaggtgtttaaaaatgaggttccttattctacttgccgtattggctgtagctgtgaatgctacatcaatccaccaacaatgggctacatttaaggtaaaccattccaagaagtacggacatcttaaagaagagcaagttcgcttccaagttttctctcaaaatctccgcaaaattgaagaacacaatgcaagataccagaatggtgaagtgtccttctacttgggggttaatcagttcgcagatatgacttcagaggaattcaaggctatgcttgactcccaactcattcacaaacctaagcgaaacattacatcccgctttgtagctgatcctcaattgactgttccagaatcaattgactggagagagaaaggggcagttgctcccataagggaccaagggcaatgtggatcatgttgggcatttagtgcagctggtgctcttgaaggacaaagatttttaaagcagaacgtactagaagtactgagtacccaacagttagtagattgttccggtgattacgacaatgaaggctgcaatggtggttggccccattgggcatataactacattaaagatcatggcctctgtctagagtctgactacaagtatcaaggattagacggtgactgcaaacagtgtaatccggttctcaaaaccatcaatggctacgcatctgtagatcaaaccgaagaagcacttaaggaggctgtaggtactgttggcccaatatcagtatgtgtgaacgctaattgggactggcaactgtacagcggaggtatccttgatagccaaagttgtccaggcggcattttaaaccatgcagttttagctgttggatatggttcagaaaatggtaaagacttttggcttatcaagaattcatgggacacttattggggagaagcaggttatttgagattggtacgtggtacaaaccagtgcggtatcaatgaagttgccgattatcctctcctataattttaaaaattgtcataccttacagtttatataatgaaacatgaataaaaatattataactttacgtg

SEQ ID NO: 675 - DNA, 1204 bp, Diabrotica virgifera
  SmartBlast Evalue=1E-161; Info=Cathepsin L-like proteinase (Fragment) n=1 Tax=Diabrotica virgifera virgifera RepID=Q70EX0_ DIAVI
gatcaagtggcatgataatgttaatacaatcgacaatcaatataaaaaatgacgcaatcaagatgtaaaataccttatataagatagtataaaagagtataaataagtataggggaacataacaccgtatctatcattgtgaaattaggtgtgaaaggtgtttaaaaatgaggttccttattctacttgccgtattggctgtagctgtgaatgctacatcaatccaccaacaatgggctacatttaaggtaaaccattccaagaagtacggacatcttaaagaagagcaagttcgcttccaagttttctctcaaaatctccgcaaaattgaagaacacaatgcaagataccagaatggtgaagtgtccttctacttgggggttaatcagttcgcagatatgacttcagaggaattcaaggctatgcttgactcccaactcattcacaagcctaaacgaaacattacatcccgatttgtagctgatcctcaattgactgttccagaatcaattgactggagagaaaagggggcagttgctcccataagggaccaagggcaatgtggatcatgttgggcatttagtgcagctggtgctcttgaaggacaaagatttttaaagcagaacgtactagaagtactgagtacccaacagttagtagattgttccggtgattacgacaatgaaggctgcaatggtggttggccccattgggcatataactacattaaagatcatggcctctgtctagagtctgactacaagtatcaagcattagacggtgactgcaaacagtgtaatccggttctcaaaaccatcaatggctatgcatctgtagatcaaaccgaagaagcacttaaggaggctgtaggtactgttggcccaatatcagtatgtgtcaacgctaattgggactggcaactgtacagcgggggtatccttgatagccaaagttgtccaggcggcattttaaaccatgcagttttagctgttggatatggttcagaaaatggtaaagacttttggcttatcaagaattcatgggacacttattggggagaagcaggttatttgagattggtacgtggtacaaaccagtgcggtatcaatgaagttgccgattatcctctcctataattttaaaaattgtcataccttacagtttatataatgaaacatgaataaaaatattataactttacgtg

SEQ ID NO: 676 - DNA, 1202 bp, Diabrotica virgifera
  SmartBlast Evalue=1E-161; Info=Cathepsin L-like proteinase (Fragment) n=1 Tax=Diabrotica virgifera virgifera RepID=Q70EX0_ DIAVI
gatcaagtggcatgataatgttaatacaatcgacaatcaatataaaaaatgacgcaatcaagatgtaaaataccttatataagatagtataaaagagtataaataagtataggggaacataacaccgtatctatcattgtgattaggtgtgaaaggtgtttaaaaatgaggttccttattctacttgccgtattggctgtagctgtgaatgctacatcaatccaccaacaatgggctacatttaaggtaaaccattccaagaagtacggacatcttaaagaagagcaagttcgcttccaagttttctctcaaaatctccgcaaaattgaagaacacaatgcaagataccagaatggtgaagtgtccttctacttgggggttaatcagttcgcagatatgacttcagaggaattcaaggctatgcttgactcccaactcattcacaagcctaaacgaaacattacatcccgatttgtagctgatcctcaattgactgttccagaatcaattgactggagagaaaagggggcagttgctcccataagggaccaagggcaatgtggatcatgttgggcatttagtgcagctggtgctcttgaaggacaaagatttttaaagcagaacgtactagaagtactgagtacccaacagttagtagattgttccggtgattacgacaatgaaggctgcaatggtggttggccccattgggcatataactacattaaagatcatggcctctgtctagagtctgactacaagtatcaagcattagacggtgactgcaaacagtgtaatccggttctcaaaaccatcaatggctatgcatctgtagatcaaaccgaagaagcacttaaggaggctgtaggtactgttggcccaatatcagtatgtgtcaacgctaattgggactggcaactgtacagcgggggtatccttgatagccaaagttgtccaggcggcattttaaaccatgcagttttagctgttggatatggttcagaaaatggtaaagacttttggcttatcaagaattcatgggacacttattggggagaagcaggttatttgagattggtacgtggtacaaaccagtgcggtatcaatgaagttgccgattatcctctcctataattttaaaaattgtcataccttacagtttatataatgaaacatgaataaaaatattataactttacgtg

SEQ ID NO: 677 - DNA, 1091 bp, Diabrotica virgifera
  SmartBlast Evalue=1E-156; Info=Cathepsin L-like proteinase (Fragment) n=1 Tax=Diabrotica virgifera virgifera RepID=Q70EX0_ DIAVI
ataccatcgtatctatcattgtgaaattaggtgttaaaggtatatagaagaaaatgaggttctttattcttcttgccgtattggctgtagctgtgaatgctacgtcagtccaccaacaatgggctcaatttaaggtaaaccattccaagaagtacggacatcttaaagaagagcaagttcgcttccaagttttctctcaaaatctccagcaaaattgaacagcacaatgcaagataccagaatggtgaagtgtccttctacttgggggttaatcagttcgcagatatgacttcagaggaattcaaggctatgcttgactcccaactcattcacaagcctaaacgaaacattacatcccgatttgtagctgatcctcaattgactgttccagaatcaattgactggagagaaaagggggcagttgctcccataagggaccaagggcaatgtggatcatgttgggcatttagtgcagctggtgctcttgaaggacaaagatttttaaagcagaacgtactagaagtactgagtacccaacagttagtagattgttccggtgattacgacaatgaaggctgcaatggtggttggccccattgggcatataactacattaaagatcatggcctctgtctagagtctgactacaagtatcaaggattagacggtgactgcaaacagtgtaatccggttatcaaaaccatcaatggctatgcatctgtagatcaaaccgaagaagcacttaaggaggctgtaggtactgttggcccaatatcagtatgtgtcaacgctaattgggactggcaactgtatagcgggggtatccttgatagccaaagttgtccaggcgacattttaaaccatgcagttttagctgttggatatggttcagaaaatggtaaagacttttggcttatcaagaattcatgggacacttattggggagaagcaggttatttgagattagtacgtggtacaaaccagtgcggtatcaataaagtggccgattatcctctcctataattttaaaaattgtcatgccttacagtttatataatgaaacatgaataaaaatattataactttaaaaa

SEQ ID NO: 678 - DNA, 1204 bp, Diabrotica virgifera
  SmartBlast Evalue=1E-161; Info=Cathepsin L-like proteinase (Fragment) n=1 Tax=Diabrotica virgifera virgifera RepID=Q70EX0_ DIAVI
gatcaagtggcatgataatgttaatacaatcgacaatcaatataaaaaatgacgcaatcaagatgtaaaataccttatataagatagtataaaagagtataaataagtataggggaacataacaccgtatctatcattgtgaaattaggtgtgaaaggtgtttaaaaatgaggttccttattctacttgccgtattggctgtagctgtgaatgctacatcaatccaccaacaatgggctacatttaaggtaaaccattccaagaagtacggacatcttaaagaagagcaagttcgcttccaagttttctctcaaaatctccgcaaaattgaagaacacaatgcaagataccagaatggtgaagtgtccttctacttgggggttaatcagttcgcagatatgacttcagaggaattcaaggctatgcttgactcccaactcattcacaaacctaagcgaaacattacatcccgctttgtagctgatcctcaattgactgttccagaatcaattgactggagagagaaaggggcagttgctcccataagggaccaagggcaatgtggatcatgttgggcatttagtgcagctggtgctcttgaaggacaaagatttttaaagcagaacgtactagaagtactgagtacccaacagttagtagattgttccggtgattacgacaatgaaggctgcaatggtggttggccccattgggcatataactacattaaagatcatggcctctgtctagagtctgactacaagtatcaagcattagacggtgactgcaaacagtgtaatccggttctcaaaaccatcaatggctatgcatctgtagatcaaaccgaagaagcacttaaggaggctgtaggtactgttggcccaatatcagtatgtgtcaacgctaattgggactggcaactgtacagcgggggtatccttgatagccaaagttgtccaggcggcattttaaaccatgcagttttagctgttggatatggttcagaaaatggtaaagacttttggcttatcaagaattcatgggacacttattggggagaagcaggttatttgagattggtacgtggtacaaaccagtgcggtatcaatgaagttgccgattatcctctcctataattttaaaaattgtcataccttacagtttatataatgaaacatgaataaaaatattataactttacgtg

SEQ ID NO: 679 - DNA, 1202 bp, Diabrotica virgifera
  SmartBlast Evalue=1E-161; Info=Cathepsin L-like proteinase (Fragment) n=1 Tax=Diabrotica virgifera virgifera RepID=Q70EX0_ DIAVI
gatcaagtggcatgataatgttaatacaatcgacaatcaatataaaaaatgacgcaatcaagatgtaaaataccttatataagatagtataaaagagtataaataagtataggggaacataacaccgtatctatcattgtgattaggtgtgaaaggtgtttaaaaatgaggttccttattctacttgccgtattggctgtagctgtgaatgctacatcaatccaccaacaatgggctacatttaaggtaaaccattccaagaagtacggacatcttaaagaagagcaagttcgcttccaagttttctctcaaaatctccgcaaaattgaagaacacaatgcaagataccagaatggtgaagtgtccttctacttgggggttaatcagttcgcagatatgacttcagaggaattcaaggctatgcttgactcccaactcattcacaaacctaagcgaaacattacatcccgctttgtagctgatcctcaattgactgttccagaatcaattgactggagagagaaaggggcagttgctcccataagggaccaagggcaatgtggatcatgttgggcatttagtgcagctggtgctcttgaaggacaaagatttttaaagcagaacgtactagaagtactgagtacccaacagttagtagattgttccggtgattacgacaatgaaggctgcaatggtggttggccccattgggcatataactacattaaagatcatggcctctgtctagagtctgactacaagtatcaagcattagacggtgactgcaaacagtgtaatccggttctcaaaaccatcaatggctatgcatctgtagatcaaaccgaagaagcacttaaggaggctgtaggtactgttggcccaatatcagtatgtgtcaacgctaattgggactggcaactgtacagcgggggtatccttgatagccaaagttgtccaggcggcattttaaaccatgcagttttagctgttggatatggttcagaaaatggtaaagacttttggcttatcaagaattcatgggacacttattggggagaagcaggttatttgagattggtacgtggtacaaaccagtgcggtatcaatgaagttgccgattatcctctcctataattttaaaaattgtcataccttacagtttatataatgaaacatgaataaaaatattataactttacgtg

SEQ ID NO: 680 - DNA, 1204 bp, Diabrotica virgifera
  SmartBlast Evalue=1E-161; Info=Cathepsin L-like proteinase (Fragment) n=1 Tax=Diabrotica virgifera virgifera RepID=Q70EX0_ DIAVI
gatcaagtggcatgataatgttaatacaatcgacaatcaatataaaaaatgacgcaatcaagatgtaaaataccttatataagatagtataaaagagtataaataagtataggggaacataacaccgtatctatcattgtgaaattaggtgtgaaaggtgtttaaaaatgaggttccttattctacttgccgtattggctgtagctgtgaatgctacatcaatccaccaacaatgggctacatttaaggtaaaccattccaagaagtacggacatcttaaagaagagcaagttcgcttccaagttttctctcaaaatctccgcaaaattgaagaacacaatgcaagataccagaatggtgaagtgtccttctacttgggggttaatcagttcgcagatatgacttcagaggaattcaaggctatgcttgactcccaactcattcacaagcctaaacgaaacattacatcccgatttgtagctgatcctcaattgactgttccagaatcaattgactggagagaaaagggggcagttgctcccataagggaccaagggcaatgtggatcatgttgggcatttagtgcagctggtgctcttgaaggacaaagatttttaaagcagaacgtactagaagtactgagtacccaacagttagtagattgttccggtgattacgacaatgaaggctgcaatggtggttggccccattgggcatataactacattaaagatcatggcctctgtctagagtctgactacaagtatcaaggattagacggtgactgcaaacagtgtaatccggttatcaaaaccatcaatggctatgcatctgtagatcaaaccgaagaagcacttaaggaggctgtaggtactgttggcccaatatcagtatgtgtcaacgctaattgggactggcaactgtatagcgggggtatccttgatagccaaagttgtccaggcgacattttaaaccatgcagttttagctgttggatatggttcagaaaatggtaaagacttttggcttatcaagaattcatgggacacttattggggagaagcaggttatttgagattagtacgtggtacaaaccagtgcggtatcaataaagtggccgattatcctctcctataattttaaaaattgtcatgccttacagtttatataatgaaacatgaataaaaatattataactttaaaaa

SEQ ID NO: 681 - DNA, 1086 bp, Diabrotica virgifera
  SmartBlast Evalue=1E-156; Info=Cathepsin L-like proteinase (Fragment) n=1 Tax=Diabrotica virgifera virgifera RepID=Q70EX0_ DIAVI
ataccatcgtatctatcattgtgaaattaggtgttaaaggtatatagaagaaaatgaggttctttattcttcttgccgtattggctgtagctgtgaatgctacgtcagtccaccaacaatgggctcaatttaaggtaaaccattccaagaagtacggacatcttaaagaagagcaagttcgcttccaagttttctctcaaaatctccagcaaaattgaacagcacaatgcaagataccagaatggtgaagtgtccttctacttgggggttaatcagttcgcagatatgacttcagaggaattcaaggctatgcttgactcccaactcattcacaagcctaaacgaaacattacatcccgatttgtagctgatcctcaattgactgttccagaatcaattgactggagagaaaagggggcagttgctcccataagggaccaagggcaatgtggatcatgttgggcatttagtgcagctggtgctcttgaaggacaaagatttttaaagcagaacgtactagaagtactgagtacccaacagttagtagattgttccggtgattacgacaatgaaggctgcaatggtggttggccccattgggcatataactacattaaagatcatggcctctgtctagagtctgactacaagtatcaaggattagacggtgactgcaaacagtgtaatccggttatcaaaaccatcaatggctatgcatctgtagatcaaaccgaagaagcacttaaggaggctgtaggtactgttggcccaatatcagtatgtgtcaacgctaattgggactggcaactgtatagcgggggtatccttgatagccaaagttgtccaggcgacattttaaaccatgcagttttagctgttggatatggttcagaaaatggtaaagacttttggcttatcaagaattcatgggacacttattggggagaagcaggttatttgagattagtacgtggtacaaaccagtgcggtatcaataaagtggccgattatcctctcctataattttaaaaattgtcatgccttacagtttatataatgaaacatgaataaaaatattataacttt

SEQ ID NO: 682 - DNA, 1096 bp, Diabrotica virgifera
  SmartBlast Evalue=0; Info=Cathepsin L-like proteinase (Fragment) n=1 Tax=Diabrotica virgifera virgifera RepID=Q70EX0_ DIAVI
ataccatcgtatctatcattgtgaaattaggtgttaaaggtatatagaagaaaatgaggttctttattcttcttgccgtattggctgtagctgtgaatgctacgtcagtccaccaacaatgggctcaatttaaggtaaaccattccaagaagtacggacatcttaaagaagagcaagttcgcttccaagttttctctcaaaatctccgcaaaattgaacagcacaatgcaagataccagaatggtgaagtgtccttctacttgggggttaatcagttcgcagatatgacttcagaggaattcaaggctatgcttgactcccaactcattcacaagcctaagcgagacattacatcccgctttgtagctgatcctcaattgactgttccagaatcaattgactggagagaaaagggggcagttaatcccgtaagggaccaagagcaatgcggatcatgttgggcatttagtgcagctggtgctcttgaaggacaaagatttttaaaggagggcaaactagaagtactgagtactcaacagttagtagattgttcccgtgattacaaaaatgaaggctgcaatggtggttggcctcattgggcatatgactacatcaaagataatggcctctgtctagagtctaagtacaggtatcaaggatatgacggttactactgcaaagagtgtattccggctatcaaaaaaatcaatggctattcatctataaatcaaactgaagaagcacttaaggaggctgtgggtacggctggcccaattgcagtatgtgtcaacgctaatgacgactggcaactgtacagcgggggtatccttgagagccaaagttgcccaggcggcgaaagtataaaccatgcagttttagctgttggatatggttcagaaaatggtaaagacttttggcttatcaagaattcgtggaacacttattggggagaagaaggttatttgagaatagtacgtggtaaaaaccagtgtggtatcaatgaagtggccgattatcccctcctataattttaaaaattgtcatgccttacaatataatgaaacataaaaaaaatattataactttacgtgttaaa

SEQ ID NO: 683 - DNA, 1091 bp, Diabrotica virgifera
  SmartBlast Evalue=1E-156; Info=Cathepsin L-like proteinase (Fragment) n=1 Tax=Diabrotica virgifera virgifera RepID=Q70EX0_ DIAVI
ataccatcgtatctatcattgtgaaattaggtgttaaaggtatatagaagaaaatgaggttctttattcttcttgccgtattggctgtagctgtgaatgctacgtcagtccaccaacaatgggctcaatttaaggtaaaccattccaagaagtacggacatcttaaagaagagcaagttcgcttccaagttttctctcaaaatctccagcaaaattgaacagcacaatgcaagataccagaatggtgaagtgtccttctacttgggggttaatcagttcgcagatatgacttcagaggaattcaaggctatgcttgactcccaactcattcacaaacctaagcgaaacattacatcccgctttgtagctgatcctcaattgactgttccagaatcaattgactggagagagaaaggggcagttgctcccataagggaccaagggcaatgtggatcatgttgggcatttagtgcagctggtgctcttgaaggacaaagatttttaaagcagaacgtactagaagtactgagtacccaacagttagtagattgttccggtgattacgacaatgaaggctgcaatggtggttggccccattgggcatataactacattaaagatcatggcctctgtctagagtctgactacaagtatcaaggattagacggtgactgcaaacagtgtaatccggttatcaaaaccatcaatggctatgcatctgtagatcaaaccgaagaagcacttaaggaggctgtaggtactgttggcccaatatcagtatgtgtcaacgctaattgggactggcaactgtatagcgggggtatccttgatagccaaagttgtccaggcgacattttaaaccatgcagttttagctgttggatatggttcagaaaatggtaaagacttttggcttatcaagaattcatgggacacttattggggagaagcaggttatttgagattagtacgtggtacaaaccagtgcggtatcaataaagtggccgattatcctctcctataattttaaaaattgtcatgccttacagtttatataatgaaacatgaataaaaatattataactttaaaaa

SEQ ID NO: 684 - DNA, 1077 bp, Diabrotica virgifera
  SmartBlast Evalue=1E-156; Info=Cathepsin L-like proteinase (Fragment) n=1 Tax=Diabrotica virgifera virgifera RepID=Q70EX0_ DIAVI
atcattgtgaaattaggtgttaaaggtatatagaagaaaatgaggttctttattcttcttgccgtattggctgtagctgtgaatgctacgtcagtccaccaacaatgggctcaatttaaggtaaaccattccaagaagtacggacatcttaaagaagagcaagttcgcttccaagttttctctcaaaatctccagcaaaattgaacagcacaatgcaagataccagaatggtgaagtgtccttctacttgggggttaatcagttcgcagatatgacttcagaggaattcaaggctatgcttgactcccaactcattcacaagcctaaacgaaacattacatcccgatttgtagctgatcctcaattgactgttccagaatcaattgactggagagaaaagggggcagttgctcccataagggaccaagggcaatgtggatcatgttgggcatttagtgcagctggtgctcttgaaggacaaagatttttaaagcagaacgtactagaagtactgagtacccaacagttagtagattgttccggtgattacgacaatgaaggctgcaatggtggttggccccattgggcatataactacattaaagatcatggcctctgtctagagtctgactacaagtatcaaggattagacggtgactgcaaacagtgtaatccggttatcaaaaccatcaatggctatgcatctgtagatcaaaccgaagaagcacttaaggaggctgtaggtactgttggcccaatatcagtatgtgtcaacgctaattgggactggcaactgtatagcgggggtatccttgatagccaaagttgtccaggcgacattttaaaccatgcagttttagctgttggatatggttcagaaaatggtaaagacttttggcttatcaagaattcatgggacacttattggggagaagcaggttatttgagattagtacgtggtacaaaccagtgcggtatcaataaagtggccgattatcctctcctataattttaaaaattgtcatgccttacagtttatataatgaaacatgaataaaaatattataactttaaaaa

SEQ ID NO: 685 - DNA, 1086 bp, Diabrotica virgifera
  SmartBlast Evalue=1E-156; Info=Cathepsin L-like proteinase (Fragment) n=1 Tax=Diabrotica virgifera virgifera RepID=Q70EX0_ DIAVI
ataccatcgtatctatcattgtgaaattaggtgttaaaggtatatagaagaaaatgaggttctttattcttcttgccgtattggctgtagctgtgaatgctacgtcagtccaccaacaatgggctcaatttaaggtaaaccattccaagaagtacggacatcttaaagaagagcaagttcgcttccaagttttctctcaaaatctccagcaaaattgaacagcacaatgcaagataccagaatggtgaagtgtccttctacttgggggttaatcagttcgcagatatgacttcagaggaattcaaggctatgcttgactcccaactcattcacaaacctaagcgaaacattacatcccgctttgtagctgatcctcaattgactgttccagaatcaattgactggagagagaaaggggcagttgctcccataagggaccaagggcaatgtggatcatgttgggcatttagtgcagctggtgctcttgaaggacaaagatttttaaagcagaacgtactagaagtactgagtacccaacagttagtagattgttccggtgattacgacaatgaaggctgcaatggtggttggccccattgggcatataactacattaaagatcatggcctctgtctagagtctgactacaagtatcaaggattagacggtgactgcaaacagtgtaatccggttatcaaaaccatcaatggctatgcatctgtagatcaaaccgaagaagcacttaaggaggctgtaggtactgttggcccaatatcagtatgtgtcaacgctaattgggactggcaactgtatagcgggggtatccttgatagccaaagttgtccaggcgacattttaaaccatgcagttttagctgttggatatggttcagaaaatggtaaagacttttggcttatcaagaattcatgggacacttattggggagaagcaggttatttgagattagtacgtggtacaaaccagtgcggtatcaataaagtggccgattatcctctcctataattttaaaaattgtcatgccttacagtttatataatgaaacatgaataaaaatattataacttt

SEQ ID NO: 686 - DNA, 1082 bp, Diabrotica virgifera
  SmartBlast Evalue=0; Info=Cathepsin L-like proteinase (Fragment) n=1 Tax=Diabrotica virgifera virgifera RepID=Q70EX0_ DIAVI
atcattgtgaaattaggtgttaaaggtatatagaagaaaatgaggttctttattcttcttgccgtattggctgtagctgtgaatgctacgtcagtccaccaacaatgggctcaatttaaggtaaaccattccaagaagtacggacatcttaaagaagagcaagttcgcttccaagttttctctcaaaatctccgcaaaattgaacagcacaatgcaagataccagaatggtgaagtgtccttctacttgggggttaatcagttcgcagatatgacttcagaggaattcaaggctatgcttgactcccaactcattcacaagcctaagcgagacattacatcccgctttgtagctgatcctcaattgactgttccagaatcaattgactggagagaaaagggggcagttaatcccgtaagggaccaagagcaatgcggatcatgttgggcatttagtgcagctggtgctcttgaaggacaaagatttttaaaggagggcaaactagaagtactgagtactcaacagttagtagattgttcccgtgattacaaaaatgaaggctgcaatggtggttggcctcattgggcatatgactacatcaaagataatggcctctgtctagagtctaagtacaggtatcaaggatatgacggttactactgcaaagagtgtattccggctatcaaaaaaatcaatggctattcatctataaatcaaactgaagaagcacttaaggaggctgtgggtacggctggcccaattgcagtatgtgtcaacgctaatgacgactggcaactgtacagcgggggtatccttgagagccaaagttgcccaggcggcgaaagtataaaccatgcagttttagctgttggatatggttcagaaaatggtaaagacttttggcttatcaagaattcgtggaacacttattggggagaagaaggttatttgagaatagtacgtggtaaaaaccagtgtggtatcaatgaagtggccgattatcccctcctataattttaaaaattgtcatgccttacaatataatgaaacataaaaaaaatattataactttacgtgttaaa

SEQ ID NO: 687 - DNA, 1077 bp, Diabrotica virgifera
  SmartBlast Evalue=1E-156; Info=Cathepsin L-like proteinase (Fragment) n=1 Tax=Diabrotica virgifera virgifera RepID=Q70EX0_ DIAVI
atcattgtgaaattaggtgttaaaggtatatagaagaaaatgaggttctttattcttcttgccgtattggctgtagctgtgaatgctacgtcagtccaccaacaatgggctcaatttaaggtaaaccattccaagaagtacggacatcttaaagaagagcaagttcgcttccaagttttctctcaaaatctccagcaaaattgaacagcacaatgcaagataccagaatggtgaagtgtccttctacttgggggttaatcagttcgcagatatgacttcagaggaattcaaggctatgcttgactcccaactcattcacaaacctaagcgaaacattacatcccgctttgtagctgatcctcaattgactgttccagaatcaattgactggagagagaaaggggcagttgctcccataagggaccaagggcaatgtggatcatgttgggcatttagtgcagctggtgctcttgaaggacaaagatttttaaagcagaacgtactagaagtactgagtacccaacagttagtagattgttccggtgattacgacaatgaaggctgcaatggtggttggccccattgggcatataactacattaaagatcatggcctctgtctagagtctgactacaagtatcaaggattagacggtgactgcaaacagtgtaatccggttatcaaaaccatcaatggctatgcatctgtagatcaaaccgaagaagcacttaaggaggctgtaggtactgttggcccaatatcagtatgtgtcaacgctaattgggactggcaactgtatagcgggggtatccttgatagccaaagttgtccaggcgacattttaaaccatgcagttttagctgttggatatggttcagaaaatggtaaagacttttggcttatcaagaattcatgggacacttattggggagaagcaggttatttgagattagtacgtggtacaaaccagtgcggtatcaataaagtggccgattatcctctcctataattttaaaaattgtcatgccttacagtttatataatgaaacatgaataaaaatattataactttaaaaa

SEQ ID NO: 688 - DNA, 1091 bp, Diabrotica virgifera
  SmartBlast Evalue=1E-157; Info=Cathepsin L-like proteinase (Fragment) n=1 Tax=Diabrotica virgifera virgifera RepID=Q70EX0_ DIAVI
ataccatcgtatctatcattgtgaaattaggtgttaaaggtatatagaagaaaatgaggttctttattcttcttgccgtattggctgtagctgtgaatgctacgtcagtccaccaacaatgggctcaatttaaggtaaaccattccaagaagtacggacatcttaaagaagagcaagttcgcttccaagttttctctcaaaatctccagcaaaattgaacagcacaatgcaagataccagaatggtgaagtgtccttctacttgggggttaatcagttcgcagatatgacttcagaggaattcaaggctatgcttgactcccaactcattcacaagcctaaacgaaacattacatcccgatttgtagctgatcctcaattgactgttccagaatcaattgactggagagaaaagggggcagttgctcccataagggaccaagggcaatgtggatcatgttgggcatttagtgcagctggtgctcttgaaggacaaagatttttaaagcagaacgtactagaagtactgagtacccaacagttagtagattgttccggtgattacgacaatgaaggctgcaatggtggttggccccattgggcatataactacattaaagatcatggcctctgtctagagtctgactacaagtatcaaggattagacggtgactgcaaacagtgtaatccggttctcaaaaccatcaatggctacgcatctgtagatcaaaccgaagaagcacttaaggaggctgtaggtactgttggcccaatatcagtatgtgtgaacgctaattgggactggcaactgtacagcggaggtatccttgatagccaaagttgtccaggcggcattttaaaccatgcagttttagctgttggatatggttcagaaaatggtaaagacttttggcttatcaagaattcatgggacacttattggggagaagcaggttatttgagattggtacgtggtacaaaccagtgcggtatcaatgaagttgccgattatcctctcctataattttaaaaattgtcataccttacagtttatataatgaaacatgaataaaaatattataactttacgtg

SEQ ID NO: 689 - DNA, 1091 bp, Diabrotica virgifera
  SmartBlast Evalue=1E-157; Info=Cathepsin L-like proteinase (Fragment) n=1 Tax=Diabrotica virgifera virgifera RepID=Q70EX0_ DIAVI
ataccatcgtatctatcattgtgaaattaggtgttaaaggtatatagaagaaaatgaggttctttattcttcttgccgtattggctgtagctgtgaatgctacgtcagtccaccaacaatgggctcaatttaaggtaaaccattccaagaagtacggacatcttaaagaagagcaagttcgcttccaagttttctctcaaaatctccagcaaaattgaacagcacaatgcaagataccagaatggtgaagtgtccttctacttgggggttaatcagttcgcagatatgacttcagaggaattcaaggctatgcttgactcccaactcattcacaaacctaagcgaaacattacatcccgctttgtagctgatcctcaattgactgttccagaatcaattgactggagagagaaaggggcagttgctcccataagggaccaagggcaatgtggatcatgttgggcatttagtgcagctggtgctcttgaaggacaaagatttttaaagcagaacgtactagaagtactgagtacccaacagttagtagattgttccggtgattacgacaatgaaggctgcaatggtggttggccccattgggcatataactacattaaagatcatggcctctgtctagagtctgactacaagtatcaaggattagacggtgactgcaaacagtgtaatccggttctcaaaaccatcaatggctacgcatctgtagatcaaaccgaagaagcacttaaggaggctgtaggtactgttggcccaatatcagtatgtgtgaacgctaattgggactggcaactgtacagcggaggtatccttgatagccaaagttgtccaggcggcattttaaaccatgcagttttagctgttggatatggttcagaaaatggtaaagacttttggcttatcaagaattcatgggacacttattggggagaagcaggttatttgagattggtacgtggtacaaaccagtgcggtatcaatgaagttgccgattatcctctcctataattttaaaaattgtcataccttacagtttatataatgaaacatgaataaaaatattataactttacgtg

SEQ ID NO: 690 - DNA, 1077 bp, Diabrotica virgifera
  SmartBlast Evalue=1E-157; Info=Cathepsin L-like proteinase (Fragment) n=1 Tax=Diabrotica virgifera virgifera RepID=Q70EX0_ DIAVI
atcattgtgaaattaggtgttaaaggtatatagaagaaaatgaggttctttattcttcttgccgtattggctgtagctgtgaatgctacgtcagtccaccaacaatgggctcaatttaaggtaaaccattccaagaagtacggacatcttaaagaagagcaagttcgcttccaagttttctctcaaaatctccagcaaaattgaacagcacaatgcaagataccagaatggtgaagtgtccttctacttgggggttaatcagttcgcagatatgacttcagaggaattcaaggctatgcttgactcccaactcattcacaagcctaaacgaaacattacatcccgatttgtagctgatcctcaattgactgttccagaatcaattgactggagagaaaagggggcagttgctcccataagggaccaagggcaatgtggatcatgttgggcatttagtgcagctggtgctcttgaaggacaaagatttttaaagcagaacgtactagaagtactgagtacccaacagttagtagattgttccggtgattacgacaatgaaggctgcaatggtggttggccccattgggcatataactacattaaagatcatggcctctgtctagagtctgactacaagtatcaaggattagacggtgactgcaaacagtgtaatccggttctcaaaaccatcaatggctacgcatctgtagatcaaaccgaagaagcacttaaggaggctgtaggtactgttggcccaatatcagtatgtgtgaacgctaattgggactggcaactgtacagcggaggtatccttgatagccaaagttgtccaggcggcattttaaaccatgcagttttagctgttggatatggttcagaaaatggtaaagacttttggcttatcaagaattcatgggacacttattggggagaagcaggttatttgagattggtacgtggtacaaaccagtgcggtatcaatgaagttgccgattatcctctcctataattttaaaaattgtcataccttacagtttatataatgaaacatgaataaaaatattataactttacgtg

SEQ ID NO: 691 - DNA, 1202 bp, Diabrotica virgifera
  SmartBlast Evalue=1E-161; Info=Cathepsin L-like proteinase (Fragment) n=1 Tax=Diabrotica virgifera virgifera RepID=Q70EX0_ DIAVI
gatcaagtggcatgataatgttaatacaatcgacaatcaatataaaaaatgacgcaatcaagatgtaaaataccttatataagatagtataaaagagtataaataagtataggggaacataacaccgtatctatcattgtgattaggtgtgaaaggtgtttaaaaatgaggttccttattctacttgccgtattggctgtagctgtgaatgctacatcaatccaccaacaatgggctacatttaaggtaaaccattccaagaagtacggacatcttaaagaagagcaagttcgcttccaagttttctctcaaaatctccgcaaaattgaagaacacaatgcaagataccagaatggtgaagtgtccttctacttgggggttaatcagttcgcagatatgacttcagaggaattcaaggctatgcttgactcccaactcattcacaagcctaaacgaaacattacatcccgatttgtagctgatcctcaattgactgttccagaatcaattgactggagagaaaagggggcagttgctcccataagggaccaagggcaatgtggatcatgttgggcatttagtgcagctggtgctcttgaaggacaaagatttttaaagcagaacgtactagaagtactgagtacccaacagttagtagattgttccggtgattacgacaatgaaggctgcaatggtggttggccccattgggcatataactacattaaagatcatggcctctgtctagagtctgactacaagtatcaaggattagacggtgactgcaaacagtgtaatccggttatcaaaaccatcaatggctatgcatctgtagatcaaaccgaagaagcacttaaggaggctgtaggtactgttggcccaatatcagtatgtgtcaacgctaattgggactggcaactgtatagcgggggtatccttgatagccaaagttgtccaggcgacattttaaaccatgcagttttagctgttggatatggttcagaaaatggtaaagacttttggcttatcaagaattcatgggacacttattggggagaagcaggttatttgagattagtacgtggtacaaaccagtgcggtatcaataaagtggccgattatcctctcctataattttaaaaattgtcatgccttacagtttatataatgaaacatgaataaaaatattataactttaaaaa

SEQ ID NO: 692 - DNA, 1077 bp, Diabrotica virgifera
  SmartBlast Evalue=1E-157; Info=Cathepsin L-like proteinase (Fragment) n=1 Tax=Diabrotica virgifera virgifera RepID=Q70EX0_ DIAVI
atcattgtgaaattaggtgttaaaggtatatagaagaaaatgaggttctttattcttcttgccgtattggctgtagctgtgaatgctacgtcagtccaccaacaatgggctcaatttaaggtaaaccattccaagaagtacggacatcttaaagaagagcaagttcgcttccaagttttctctcaaaatctccagcaaaattgaacagcacaatgcaagataccagaatggtgaagtgtccttctacttgggggttaatcagttcgcagatatgacttcagaggaattcaaggctatgcttgactcccaactcattcacaaacctaagcgaaacattacatcccgctttgtagctgatcctcaattgactgttccagaatcaattgactggagagagaaaggggcagttgctcccataagggaccaagggcaatgtggatcatgttgggcatttagtgcagctggtgctcttgaaggacaaagatttttaaagcagaacgtactagaagtactgagtacccaacagttagtagattgttccggtgattacgacaatgaaggctgcaatggtggttggccccattgggcatataactacattaaagatcatggcctctgtctagagtctgactacaagtatcaaggattagacggtgactgcaaacagtgtaatccggttctcaaaaccatcaatggctacgcatctgtagatcaaaccgaagaagcacttaaggaggctgtaggtactgttggcccaatatcagtatgtgtgaacgctaattgggactggcaactgtacagcggaggtatccttgatagccaaagttgtccaggcggcattttaaaccatgcagttttagctgttggatatggttcagaaaatggtaaagacttttggcttatcaagaattcatgggacacttattggggagaagcaggttatttgagattggtacgtggtacaaaccagtgcggtatcaatgaagttgccgattatcctctcctataattttaaaaattgtcataccttacagtttatataatgaaacatgaataaaaatattataactttacgtg

SEQ ID NO: 693 - DNA, 1091 bp, Diabrotica virgifera
  SmartBlast Evalue=1E-156; Info=Cathepsin L-like proteinase (Fragment) n=1 Tax=Diabrotica virgifera virgifera RepID=Q70EX0_ DIAVI
ataccatcgtatctatcattgtgaaattaggtgttaaaggtatatagaagaaaatgaggttctttattcttcttgccgtattggctgtagctgtgaatgctacgtcagtccaccaacaatgggctcaatttaaggtaaaccattccaagaagtacggacatcttaaagaagagcaagttcgcttccaagttttctctcaaaatctccagcaaaattgaacagcacaatgcaagataccagaatggtgaagtgtccttctacttgggggttaatcagttcgcagatatgacttcagaggaattcaaggctatgcttgactcccaactcattcacaagcctaaacgaaacattacatcccgatttgtagctgatcctcaattgactgttccagaatcaattgactggagagaaaagggggcagttgctcccataagggaccaagggcaatgtggatcatgttgggcatttagtgcagctggtgctcttgaaggacaaagatttttaaagcagaacgtactagaagtactgagtacccaacagttagtagattgttccggtgattacgacaatgaaggctgcaatggtggttggccccattgggcatataactacattaaagatcatggcctctgtctagagtctgactacaagtatcaagcattagacggtgactgcaaacagtgtaatccggttctcaaaaccatcaatggctatgcatctgtagatcaaaccgaagaagcacttaaggaggctgtaggtactgttggcccaatatcagtatgtgtcaacgctaattgggactggcaactgtacagcgggggtatccttgatagccaaagttgtccaggcggcattttaaaccatgcagttttagctgttggatatggttcagaaaatggtaaagacttttggcttatcaagaattcatgggacacttattggggagaagcaggttatttgagattggtacgtggtacaaaccagtgcggtatcaatgaagttgccgattatcctctcctataattttaaaaattgtcataccttacagtttatataatgaaacatgaataaaaatattataactttacgtg

SEQ ID NO: 694 - DNA, 1091 bp, Diabrotica virgifera
  SmartBlast Evalue=1E-156; Info=Cathepsin L-like proteinase (Fragment) n=1 Tax=Diabrotica virgifera virgifera RepID=Q70EX0_ DIAVI
ataccatcgtatctatcattgtgaaattaggtgttaaaggtatatagaagaaaatgaggttctttattcttcttgccgtattggctgtagctgtgaatgctacgtcagtccaccaacaatgggctcaatttaaggtaaaccattccaagaagtacggacatcttaaagaagagcaagttcgcttccaagttttctctcaaaatctccagcaaaattgaacagcacaatgcaagataccagaatggtgaagtgtccttctacttgggggttaatcagttcgcagatatgacttcagaggaattcaaggctatgcttgactcccaactcattcacaaacctaagcgaaacattacatcccgctttgtagctgatcctcaattgactgttccagaatcaattgactggagagagaaaggggcagttgctcccataagggaccaagggcaatgtggatcatgttgggcatttagtgcagctggtgctcttgaaggacaaagatttttaaagcagaacgtactagaagtactgagtacccaacagttagtagattgttccggtgattacgacaatgaaggctgcaatggtggttggccccattgggcatataactacattaaagatcatggcctctgtctagagtctgactacaagtatcaagcattagacggtgactgcaaacagtgtaatccggttctcaaaaccatcaatggctatgcatctgtagatcaaaccgaagaagcacttaaggaggctgtaggtactgttggcccaatatcagtatgtgtcaacgctaattgggactggcaactgtacagcgggggtatccttgatagccaaagttgtccaggcggcattttaaaccatgcagttttagctgttggatatggttcagaaaatggtaaagacttttggcttatcaagaattcatgggacacttattggggagaagcaggttatttgagattggtacgtggtacaaaccagtgcggtatcaatgaagttgccgattatcctctcctataattttaaaaattgtcataccttacagtttatataatgaaacatgaataaaaatattataactttacgtg

SEQ ID NO: 695 - DNA, 1077 bp, Diabrotica virgifera
  SmartBlast Evalue=1E-156; Info=Cathepsin L-like proteinase (Fragment) n=1 Tax=Diabrotica virgifera virgifera RepID=Q70EX0_ DIAVI
atcattgtgaaattaggtgttaaaggtatatagaagaaaatgaggttctttattcttcttgccgtattggctgtagctgtgaatgctacgtcagtccaccaacaatgggctcaatttaaggtaaaccattccaagaagtacggacatcttaaagaagagcaagttcgcttccaagttttctctcaaaatctccagcaaaattgaacagcacaatgcaagataccagaatggtgaagtgtccttctacttgggggttaatcagttcgcagatatgacttcagaggaattcaaggctatgcttgactcccaactcattcacaagcctaaacgaaacattacatcccgatttgtagctgatcctcaattgactgttccagaatcaattgactggagagaaaagggggcagttgctcccataagggaccaagggcaatgtggatcatgttgggcatttagtgcagctggtgctcttgaaggacaaagatttttaaagcagaacgtactagaagtactgagtacccaacagttagtagattgttccggtgattacgacaatgaaggctgcaatggtggttggccccattgggcatataactacattaaagatcatggcctctgtctagagtctgactacaagtatcaagcattagacggtgactgcaaacagtgtaatccggttctcaaaaccatcaatggctatgcatctgtagatcaaaccgaagaagcacttaaggaggctgtaggtactgttggcccaatatcagtatgtgtcaacgctaattgggactggcaactgtacagcgggggtatccttgatagccaaagttgtccaggcggcattttaaaccatgcagttttagctgttggatatggttcagaaaatggtaaagacttttggcttatcaagaattcatgggacacttattggggagaagcaggttatttgagattggtacgtggtacaaaccagtgcggtatcaatgaagttgccgattatcctctcctataattttaaaaattgtcataccttacagtttatataatgaaacatgaataaaaatattataactttacgtg

SEQ ID NO: 696 - DNA, 1077 bp, Diabrotica virgifera
  SmartBlast Evalue=1E-156; Info=Cathepsin L-like proteinase (Fragment) n=1 Tax=Diabrotica virgifera virgifera RepID=Q70EX0_ DIAVI
atcattgtgaaattaggtgttaaaggtatatagaagaaaatgaggttctttattcttcttgccgtattggctgtagctgtgaatgctacgtcagtccaccaacaatgggctcaatttaaggtaaaccattccaagaagtacggacatcttaaagaagagcaagttcgcttccaagttttctctcaaaatctccagcaaaattgaacagcacaatgcaagataccagaatggtgaagtgtccttctacttgggggttaatcagttcgcagatatgacttcagaggaattcaaggctatgcttgactcccaactcattcacaaacctaagcgaaacattacatcccgctttgtagctgatcctcaattgactgttccagaatcaattgactggagagagaaaggggcagttgctcccataagggaccaagggcaatgtggatcatgttgggcatttagtgcagctggtgctcttgaaggacaaagatttttaaagcagaacgtactagaagtactgagtacccaacagttagtagattgttccggtgattacgacaatgaaggctgcaatggtggttggccccattgggcatataactacattaaagatcatggcctctgtctagagtctgactacaagtatcaagcattagacggtgactgcaaacagtgtaatccggttctcaaaaccatcaatggctatgcatctgtagatcaaaccgaagaagcacttaaggaggctgtaggtactgttggcccaatatcagtatgtgtcaacgctaattgggactggcaactgtacagcgggggtatccttgatagccaaagttgtccaggcggcattttaaaccatgcagttttagctgttggatatggttcagaaaatggtaaagacttttggcttatcaagaattcatgggacacttattggggagaagcaggttatttgagattggtacgtggtacaaaccagtgcggtatcaatgaagttgccgattatcctctcctataattttaaaaattgtcataccttacagtttatataatgaaacatgaataaaaatattataactttacgtg

SEQ ID NO: 697 - DNA, 1210 bp, Diabrotica virgifera
  SmartBlast Evalue=1E-162; Info=Cathepsin L-like proteinase (Fragment) n=1 Tax=Diabrotica virgifera virgifera RepID=Q70EX0_ DIAVI
gatcaagtggcatgataatgttaatacaatcgacaatcaatataaaaaatgacgcaatcaagatgtaaaataccttatataagatagtataaaagagtataaataagtataggggaacataacacggtatctatcattgtgaaattaggtgtgaacggtgcttaaaaatgaggttccttattctacttgccgtattggctgtagctgtgaatgctacatcaatccaccaacaatgggctacatttaaggtaaaccattccaagaagtacggacatcttaaagaagagcaagttcgcttccaagttttctctcaaaatctccgcaaaattgaagaacacaatgcaagataccagaatggtgaagtatccttctacttgggggttaatcagttcgcagatatgacttcagaggaattcaaggctatgcttgactcccaactcattcacaagcctaaaagaaacattacatcccactttgtggctgatcctcaattgactgttccagaatcaattgactggagagaaaaaggggcagttgctcccataagggaccaagggcaatgcggatcatgttgggcatttagtgcagctggtgctcttgaaggacaaagatttttaaagcagaacgtactagaggtactgagtacccaacagttagtagattgttccggtgattactacaatcaaggctgcaatggtggttggcctcattgggcatataactacattaaagatcatggcctctgtctagagtctgattacaagtatcaaggattagatggtgactgcaaacagtgtaatccggttctcaaaaccatcaatggctatacttctatagatcaaactgaagaagcacttaaggaggctgtaggtactgctggcccaatatcagtatgtgtcaacgctaattgggactggcaactctacagcgggggtatccttgatagccaaagttgtccaggcgacagtttaagtataaaccatgcagttttagctgttggatatggttcagaaaatggtaaagacttttggcttatcaagaattcatggaacacttattggggagaagcaggttatttgagactagtacgtggtaaaaaccattgcggtatcagtgaagtggccgattatcctctcctataatttaaaaaattgtcatgtctgacagtttatataatgaaacataaataaaaatattataactttaaaaa

SEQ ID NO: 698 - DNA, 1199 bp, Diabrotica virgifera
  SmartBlast Evalue=1E-161; Info=Cathepsin L-like proteinase (Fragment) n=1 Tax=Diabrotica virgifera virgifera RepID=Q70EX0_ DIAVI
gatcaagtggcatgataatgttaatacaatcgacaatcaatataaaaaatgacgcaatcaagatgtaaaataccttatataagatagtataaaagagtataaataagtataggggaacataacaccgtatctatcattgtgaaattaggtgtgaaaggtgtttaaaaatgaggttccttattctacttgccgtattggctgtagctgtgaatgctacatcaatccaccaacaatgggctacatttaaggtaaaccattccaagaagtacggacatcttaaagaagagcaagttcgcttccaagttttctctcaaaatctccgcaaaattgaagaacacaatgcaagataccagaatggtgaagtgtccttctacttgggggttaatcagttcgcagatatgacttcagaggaattcaaggctatgcttgactcccaactcattcacaagcctaaacgaaacattacatcccgatttgtagctgatcctcaattgactgttccagaatcaattgactggagagaaaagggggcagttgctcccataagggaccaagggcaatgtggatcatgttgggcatttagtgcagctggtgctcttgaaggacaaagatttttaaagcagaacgtactagaagtactgagtacccaacagttagtagattgttccggtgattacgacaatgaaggctgcaatggtggttggccccattgggcatataactacattaaagatcatggcctctgtctagagtctgactacaagtatcaaggattagacggtgactgcaaacagtgtaatccggttatcaaaaccatcaatggctatgcatctgtagatcaaaccgaagaagcacttaaggaggctgtaggtactgttggcccaatatcagtatgtgtcaacgctaattgggactggcaactgtatagcgggggtatccttgatagccaaagttgtccaggcgacattttaaaccatgcagttttagctgttggatatggttcagaaaatggtaaagacttttggcttatcaagaattcatgggacacttattggggagaagcaggttatttgagattagtacgtggtacaaaccagtgcggtatcaataaagtggccgattatcctctcctataattttaaaaattgtcatgccttacagtttatataatgaaacatgaataaaaatattataacttt

SEQ ID NO: 699 - DNA, 1210 bp, Diabrotica virgifera
  SmartBlast Evalue=0; Info=Cathepsin L-like proteinase (Fragment) n=1 Tax=Diabrotica virgifera virgifera RepID=Q70EX0_ DIAVI
gatcaagtggcatgataatgttaatacaatcgacaatcaatataaaaaatgacgcaatcaagatgtaaaataccttatataagatagtataaaagagtataaataagtataggggaacataacaccgtatctatcattgtgaaattaggtgtgaaaggtgtttaaaaatgaggttccttattctacttgccgtattggctgtagctgtgaatgctacatcaatccaccaacaatgggctacatttaaggtaaaccattccaagaagtacggacatcttaaagaagagcaagttcgcttccaagttttctctcaaaatctccgcaaaattgaagaacacaatgcaagataccagaatggtgaagtgtccttctacttgggggttaatcagttcgcagatatgacttcagaggaattcaaggctatgcttgactcccaactcattcacaagcctaagcgagacattacatcccgctttgtagctgatcctcaattgactgttccagaatcaattgactggagagaaaagggggcagttaatcccgtaagggaccaagagcaatgcggatcatgttgggcatttagtgcagctggtgctcttgaaggacaaagatttttaaaggagggcaaactagaagtactgagtactcaacagttagtagattgttcccgtgattacaaaaatgaaggctgcaatggtggttggcctcattgggcatatgactacatcaaagataatggcctctgtctagagtctaagtacaggtatcaaggatatgacggttactactgcaaagagtgtattccggctatcaaaaaaatcaatggctattcatctataaatcaaactgaagaagcacttaaggaggctgtgggtacggctggcccaattgcagtatgtgtcaacgctaatgacgactggcaactgtacagcgggggtatccttgagagccaaagttgcccaggcggcgaaagtataaaccatgcagttttagctgttggatatggttcagaaaatggtaaagacttttggcttatcaagaattcgtggaacacttattggggagaagaaggttatttgagaatagtacgtggtaaaaaccagtgtggtatcaatgaagtggccgattatcccctcctataattttaaaaattgtcatgccttacaatataatgaaacataaaaaaaatattataactttacgtgttaaa

SEQ ID NO: 700 - DNA, 1204 bp, Diabrotica virgifera
  SmartBlast Evalue=1E-161; Info=Cathepsin L-like proteinase (Fragment) n=1 Tax=Diabrotica virgifera virgifera RepID=Q70EX0_ DIAVI
gatcaagtggcatgataatgttaatacaatcgacaatcaatataaaaaatgacgcaatcaagatgtaaaataccttatataagatagtataaaagagtataaataagtataggggaacataacaccgtatctatcattgtgaaattaggtgtgaaaggtgtttaaaaatgaggttccttattctacttgccgtattggctgtagctgtgaatgctacatcaatccaccaacaatgggctacatttaaggtaaaccattccaagaagtacggacatcttaaagaagagcaagttcgcttccaagttttctctcaaaatctccgcaaaattgaagaacacaatgcaagataccagaatggtgaagtgtccttctacttgggggttaatcagttcgcagatatgacttcagaggaattcaaggctatgcttgactcccaactcattcacaaacctaagcgaaacattacatcccgctttgtagctgatcctcaattgactgttccagaatcaattgactggagagagaaaggggcagttgctcccataagggaccaagggcaatgtggatcatgttgggcatttagtgcagctggtgctcttgaaggacaaagatttttaaagcagaacgtactagaagtactgagtacccaacagttagtagattgttccggtgattacgacaatgaaggctgcaatggtggttggccccattgggcatataactacattaaagatcatggcctctgtctagagtctgactacaagtatcaaggattagacggtgactgcaaacagtgtaatccggttatcaaaaccatcaatggctatgcatctgtagatcaaaccgaagaagcacttaaggaggctgtaggtactgttggcccaatatcagtatgtgtcaacgctaattgggactggcaactgtatagcgggggtatccttgatagccaaagttgtccaggcgacattttaaaccatgcagttttagctgttggatatggttcagaaaatggtaaagacttttggcttatcaagaattcatgggacacttattggggagaagcaggttatttgagattagtacgtggtacaaaccagtgcggtatcaataaagtggccgattatcctctcctataattttaaaaattgtcatgccttacagtttatataatgaaacatgaataaaaatattataactttaaaaa

SEQ ID NO: 701 - DNA, 1197 bp, Diabrotica virgifera
  SmartBlast Evalue=1E-161; Info=Cathepsin L-like proteinase (Fragment) n=1 Tax=Diabrotica virgifera virgifera RepID=Q70EX0_ DIAVI
gatcaagtggcatgataatgttaatacaatcgacaatcaatataaaaaatgacgcaatcaagatgtaaaataccttatataagatagtataaaagagtataaataagtataggggaacataacaccgtatctatcattgtgattaggtgtgaaaggtgtttaaaaatgaggttccttattctacttgccgtattggctgtagctgtgaatgctacatcaatccaccaacaatgggctacatttaaggtaaaccattccaagaagtacggacatcttaaagaagagcaagttcgcttccaagttttctctcaaaatctccgcaaaattgaagaacacaatgcaagataccagaatggtgaagtgtccttctacttgggggttaatcagttcgcagatatgacttcagaggaattcaaggctatgcttgactcccaactcattcacaagcctaaacgaaacattacatcccgatttgtagctgatcctcaattgactgttccagaatcaattgactggagagaaaagggggcagttgctcccataagggaccaagggcaatgtggatcatgttgggcatttagtgcagctggtgctcttgaaggacaaagatttttaaagcagaacgtactagaagtactgagtacccaacagttagtagattgttccggtgattacgacaatgaaggctgcaatggtggttggccccattgggcatataactacattaaagatcatggcctctgtctagagtctgactacaagtatcaaggattagacggtgactgcaaacagtgtaatccggttatcaaaaccatcaatggctatgcatctgtagatcaaaccgaagaagcacttaaggaggctgtaggtactgttggcccaatatcagtatgtgtcaacgctaattgggactggcaactgtatagcgggggtatccttgatagccaaagttgtccaggcgacattttaaaccatgcagttttagctgttggatatggttcagaaaatggtaaagacttttggcttatcaagaattcatgggacacttattggggagaagcaggttatttgagattagtacgtggtacaaaccagtgcggtatcaataaagtggccgattatcctctcctataattttaaaaattgtcatgccttacagtttatataatgaaacatgaataaaaatattataacttt

SEQ ID NO: 702 - DNA, 1208 bp, Diabrotica virgifera
  SmartBlast Evalue=0; Info=Cathepsin L-like proteinase (Fragment) n=1 Tax=Diabrotica virgifera virgifera RepID=Q70EX0_ DIAVI
gatcaagtggcatgataatgttaatacaatcgacaatcaatataaaaaatgacgcaatcaagatgtaaaataccttatataagatagtataaaagagtataaataagtataggggaacataacaccgtatctatcattgtgattaggtgtgaaaggtgtttaaaaatgaggttccttattctacttgccgtattggctgtagctgtgaatgctacatcaatccaccaacaatgggctacatttaaggtaaaccattccaagaagtacggacatcttaaagaagagcaagttcgcttccaagttttctctcaaaatctccgcaaaattgaagaacacaatgcaagataccagaatggtgaagtgtccttctacttgggggttaatcagttcgcagatatgacttcagaggaattcaaggctatgcttgactcccaactcattcacaagcctaagcgagacattacatcccgctttgtagctgatcctcaattgactgttccagaatcaattgactggagagaaaagggggcagttaatcccgtaagggaccaagagcaatgcggatcatgttgggcatttagtgcagctggtgctcttgaaggacaaagatttttaaaggagggcaaactagaagtactgagtactcaacagttagtagattgttcccgtgattacaaaaatgaaggctgcaatggtggttggcctcattgggcatatgactacatcaaagataatggcctctgtctagagtctaagtacaggtatcaaggatatgacggttactactgcaaagagtgtattccggctatcaaaaaaatcaatggctattcatctataaatcaaactgaagaagcacttaaggaggctgtgggtacggctggcccaattgcagtatgtgtcaacgctaatgacgactggcaactgtacagcgggggtatccttgagagccaaagttgcccaggcggcgaaagtataaaccatgcagttttagctgttggatatggttcagaaaatggtaaagacttttggcttatcaagaattcgtggaacacttattggggagaagaaggttatttgagaatagtacgtggtaaaaaccagtgtggtatcaatgaagtggccgattatcccctcctataattttaaaaattgtcatgccttacaatataatgaaacataaaaaaaatattataactttacgtgttaaa

SEQ ID NO: 703 - DNA, 1202 bp, Diabrotica virgifera
  SmartBlast Evalue=1E-161; Info=Cathepsin L-like proteinase (Fragment) n=1 Tax=Diabrotica virgifera virgifera RepID=Q70EX0_ DIAVI
gatcaagtggcatgataatgttaatacaatcgacaatcaatataaaaaatgacgcaatcaagatgtaaaataccttatataagatagtataaaagagtataaataagtataggggaacataacaccgtatctatcattgtgattaggtgtgaaaggtgtttaaaaatgaggttccttattctacttgccgtattggctgtagctgtgaatgctacatcaatccaccaacaatgggctacatttaaggtaaaccattccaagaagtacggacatcttaaagaagagcaagttcgcttccaagttttctctcaaaatctccgcaaaattgaagaacacaatgcaagataccagaatggtgaagtgtccttctacttgggggttaatcagttcgcagatatgacttcagaggaattcaaggctatgcttgactcccaactcattcacaaacctaagcgaaacattacatcccgctttgtagctgatcctcaattgactgttccagaatcaattgactggagagagaaaggggcagttgctcccataagggaccaagggcaatgtggatcatgttgggcatttagtgcagctggtgctcttgaaggacaaagatttttaaagcagaacgtactagaagtactgagtacccaacagttagtagattgttccggtgattacgacaatgaaggctgcaatggtggttggccccattgggcatataactacattaaagatcatggcctctgtctagagtctgactacaagtatcaaggattagacggtgactgcaaacagtgtaatccggttatcaaaaccatcaatggctatgcatctgtagatcaaaccgaagaagcacttaaggaggctgtaggtactgttggcccaatatcagtatgtgtcaacgctaattgggactggcaactgtatagcgggggtatccttgatagccaaagttgtccaggcgacattttaaaccatgcagttttagctgttggatatggttcagaaaatggtaaagacttttggcttatcaagaattcatgggacacttattggggagaagcaggttatttgagattagtacgtggtacaaaccagtgcggtatcaataaagtggccgattatcctctcctataattttaaaaattgtcatgccttacagtttatataatgaaacatgaataaaaatattataactttaaaaa

SEQ ID NO: 704 - DNA, 1199 bp, Diabrotica virgifera
  SmartBlast Evalue=1E-161; Info=Cathepsin L-like proteinase (Fragment) n=1 Tax=Diabrotica virgifera virgifera RepID=Q70EX0_ DIAVI
gatcaagtggcatgataatgttaatacaatcgacaatcaatataaaaaatgacgcaatcaagatgtaaaataccttatataagatagtataaaagagtataaataagtataggggaacataacaccgtatctatcattgtgaaattaggtgtgaaaggtgtttaaaaatgaggttccttattctacttgccgtattggctgtagctgtgaatgctacatcaatccaccaacaatgggctacatttaaggtaaaccattccaagaagtacggacatcttaaagaagagcaagttcgcttccaagttttctctcaaaatctccgcaaaattgaagaacacaatgcaagataccagaatggtgaagtgtccttctacttgggggttaatcagttcgcagatatgacttcagaggaattcaaggctatgcttgactcccaactcattcacaaacctaagcgaaacattacatcccgctttgtagctgatcctcaattgactgttccagaatcaattgactggagagagaaaggggcagttgctcccataagggaccaagggcaatgtggatcatgttgggcatttagtgcagctggtgctcttgaaggacaaagatttttaaagcagaacgtactagaagtactgagtacccaacagttagtagattgttccggtgattacgacaatgaaggctgcaatggtggttggccccattgggcatataactacattaaagatcatggcctctgtctagagtctgactacaagtatcaaggattagacggtgactgcaaacagtgtaatccggttatcaaaaccatcaatggctatgcatctgtagatcaaaccgaagaagcacttaaggaggctgtaggtactgttggcccaatatcagtatgtgtcaacgctaattgggactggcaactgtatagcgggggtatccttgatagccaaagttgtccaggcgacattttaaaccatgcagttttagctgttggatatggttcagaaaatggtaaagacttttggcttatcaagaattcatgggacacttattggggagaagcaggttatttgagattagtacgtggtacaaaccagtgcggtatcaataaagtggccgattatcctctcctataattttaaaaattgtcatgccttacagtttatataatgaaacatgaataaaaatattataacttt

SEQ ID NO: 705 - DNA, 6750 bp, Diabrotica virgifera
  SmartBlast Evalue=1E-165; Info=Iron/zinc purple acid phosphatase-like protein n=1 Tax=Camponotus floridanus RepID= E2AEF0_9HYME
tctatccttagaaaaattcgaaatcatcagatttaagggccggttgttcgaacgctaatcaaaactgatcattatcaaatatttaattacaattatatttgattaagcgtacttctgacagatgtcgcattttgaggttatgttgactgatttattttattattttggttttaatttaaaataaaacataattaaactctttctgatgttaatttattgtttttacttacaaatcaataacaatagtaagcaatttttaataatttaacgactgcggctatattttaattactgctttacctacaatcaatgaatgattagtgttttacatgtatttttgatgtctcgatttgattcccatcaagaaaattgattacaataaactgattgattataatcaacttcttgattagcgttcgaacaaccggcccttaatgttgctgcccttattgatatattaatctaaaaattctcaatttgtggcttaggccactgttgctctaagcgcctcatataggcgtaaatataatatttgaagatttctattaatgtaaacttataggccttgggcccgcatatacaactattattcatgaccacaccgctgaaaccccttgtacttgccatctgggcggagtcggacaaatcctgagcttggcgcaccatggcagtggggcgcttgtccgtcaagcggtgacgaagttgtcaaccccatgcaagaaaaaaattgatcaccacattggtcattctatcccaatcaatagtttccatcatataaacaacgaaaacaatttgtcggacaaaaatactggggcatatgacgcgtcggacacgccaaatatgtcaaattcatgaaaataacaaacaccaccacatggataattttaacggtatctaccataaaacatttttacaacaatgtggcaaccttgtcggacaactttcacggggcacatgcgcagtcggacgcgccgaagatgtcaatttcctgaaatttccctatttacaaccatttttccgacaacattagtaggttataagtaattatattcttaatcaaaaaatcaaagtgtcggacaaaaatattggggcaactcgacagtcggacaaaaaatttaatttttattagtaaagtatactttcaaattatgctgggttcgtgtatcccttatctttacaaccatttttccgacaaaagtagtaggttacaagtaattatattcttaaacaaaaaatataattgtctgacaaaaatgttggggcaaacgaacagaaaacttaattcttttaggctatcgacgaggaggtattatcaaaaaaaaaaatttaaaacagtgtttctcggttacttttgaatcgatttagctgaaaattggtacacacactaagtaaagcatttaaaagggtctgacgtagatcggaacccaaaattttcttaaaaaattttccgacaagagggaaaattttagaaaaattgtgatccgataatttgtgtacatactccttgaacaacgacaaacatcgttctgtatttttttctcgaattaaaaaaaaaattcagcacatgtatcaggttataagtagttatattccaaatcaaaaaatctaagtgtccgacaaaaatattggggcaaatccaaagtcagacaaaaaatttaatttttattgataaactatacttttaaattatgctgggttcgtgtatcccttatctttacaaccattttccgacaaaggtagttagttacaagtaattatatccttaaacaaaaaatgtaattgtttgacaaaaatcttggggcaaacgaagagaaaacttaattcttttaggctatcgacgagaaagtaatatcaaaaaattttaaaagagttttctcggttatttttgaatcgatttagctcaaaattggtacacacgctaagtaaaacatttaaaagggtatgacgtagagctgaaaattttagaaaaattgtgatctgatatttgcttacatactgcttgaacaacgacaaacatcgttctgtagttttttttttccaattaaaaaaaaatttccgacacaagtatcaggttataagtagttatattctaaatcaaaaaatctaatatttatattcaccatttaatgaatttaatattcaccattggcgcgcatacgggtaatatgagccgaaaaatacgtaatttaatatgaagtcaaaaatgtataaaaattaatttttttttaaattgtaccaaaacgccccattatttttgtccgacaagtgatccaatatgcattacacatgtaaaaaaacagtacaaaataaaaataacatctgtggtaataaataaaaaattttcaggaaattgacatcttcggcgcgtccgactgcgcatatgccccgtgaaaattgtccgacaaggttaccacattattgtaaaaaggttttatggtagataccgttaaaattatccatgtggtaataaatttattattttcataaattttaagttattttttgggtgtaactacaatgatattatgctaaaaatgatggtgtatcgcatatttaaaatgcgtttatctcgaaaacggttgagtttaggaagatgaaagaagtataccttttttaagtaaaactaataggaaaataaaaattttaatgtcaaaattatacagagtgagggataaaaaaattaaacgtaataaataagtgctgaaaggcatatgtggcgccctctgggcaatgcataatttttggtaaggaatttagatttctcgactcaagaaacctccagatataaaatttcatgttgttatctcatacctatcaggaaatattcaataataaataaaaaaaaagtttaactttgacaccctgtatctcggctattataaactttgtactaaggtaagttagcttaaatcggcctattttaacctcaggaacctgaggttaagctatggcccattctttaccaaacaccctgtatgcataaaaattactttttcttttaattgtaccaaaacgccccattatttttgtccgacaagtgatccaatatgcattacacatgtaaaagaacagtacaaaataaaaatgacatctgtggtaataaataaaaaattttcaggaaattgacatcttcggcgcgtccgactgcgcatatgccccgcgaaaattgtccgacaaggccaccacaccattgtaaaaaggccccatgatagataccgtcaaaattatcgatgtggcaacaaatttatcattttcacaaatttgacatacttcagcgcgtccgacgcgtcatacgccccaacacttttgtccgacaaaattgttttcgccgtttatatgataaaatccattgattacaatagaatgaccaatgtggtaataaattcccttcttgcataaaattgacaacttcgtcaccgcttgacagacaaacgccccaccaccacaatgcgccaagctcaaaatttgtccgactccacccaaataacaagtacaaaaagtttcaacggtgtggtcacaaataataattgtatatgcgggcccaaggcctattaaagaaatgcaccataacttgtttcatttaatctgtataagtggattacgaagcatatttgtccggatcacaactgtgatcgagcgaaggtgatattttggcataaattggtaacacttatttgacagttgcggtgttgacacttcatatttgtttttattatctactttattgaatattttatacagtgatgagcgcgctaataaccgacaaaatagcacaaaagatcacggaagcccatataaaaattttcagggggtggggcagacgtgaagatgttgcacattatattttgtgttctttggataaccatatatagttaacagcacccgaaaagccaggggggcacggtttgttttgttgtatgcacacttctgaaataattatatattatgatgtatttgatttaaaatgaattcagaatttttttttgtaatttggcaactatgtcaacttagatctctgacgtagataatgacgtgtaacggtatttatactgtaccaaccatatgtaatttactattttatcttggaataaaatagtaaagtatattgttaacgtaaaattttgcaatattatattattttgattaatagaatgatgtattcagcaataacctcacgttttttagctatgctctatctataacaacttctgaatttattattaaagtctagatggcaataaaattgtatttttgatagacttttaattttaaattacaatttaactactttatacaaaatttacttttctaagggccggtttttcagtgctgggttaatcgatttattttttggtcaccgaaatattcatgtttaatcagtttttcagtactagattagagcttaaactcgtttaagttaaccacgattttaaccgatcctcgttagatggtttaactccgaattttgtggttacgcttgcgcattggtgcagtgaatgcatcatgtttattttttgagtacctgccaacctgtctgagagaagggattagttgggttatgttattttcttttatcgcgggaagtattctaatacctccttactattataaggaaattattattattgaaattataaatttttatcgttattatataggaaggaattataaggaaatatatttaaatataactgtaacaggtacctacgtttacacttactgtaacaggatttaatgcattattcctagtaatatttttaaaaagattattttatatttgtctacacagcaaaatacttaattatttaccaaacagtccgacttcttaattgctggtcaatctgttcaaatagtgataagaccgtggtctttgacaaacaaaaccggaaaaaaagtctaaatcgtcccagtaattcgaattattttctgttatgaaaccgagttagacgttatgaactaaacaaagattccgaacttgatattgcattgcattaatcattttttaaatttggttatgaagttgttttttatttatttttctgtcaaattatcattatttctcgaattgtacatgcgctcgtacagttactgctgccaacagaagaaaaaaagtggttagctaaccgagattttcttaacttgatttagagcactgaaaaacgctatgagggttaaaatattggttaaaatttaaactaggttagctaaccaaaattttaaccgctcactgaaaaaccgggcctaaatgtcatgtaaatctttgattttatttagaattatatatactatcacggttcatcgattttaatctcatactgtcaactttcgcccaatccatttttgagtgcgggtataatccgtgtttatccttgactatccagaaggcatcgatcacttccccgcttttatcatcagaaacctgctctagatgcatgtgtgatgaattgtaaaccttgagacggctatatccgtagtcgctacttctgaacgctgaccattcgggtaggtctttaacaaaactgtctgtgccttcatcgcagccggccgagccagtggtgaactgtacaggagcccctggatttacgtaaggctgctcgtagctcccattgtaaacggtgtaattataaacaggccacagcctttcataagaatgctcatgggcccatatagctaaatcgactccataattgtaaagcaagttttccaatccgaagaattgtaagaaaggcaatcctactcttgttatggtttcgtgatgtgtacagtcatcatgatcagtgttggaacagtacatagggcgatgacccatcactataatccatggttgcttttctctgttttcgggtaaattcgccgttgccaagtcttgttccagccactcgtattggaatacgagaggtttaatgccgtagtccaggaaataataaacctctgtagatatagagataatatgcatcggaccaatgttaatgctgtacatgggtgaatttagaccaccaggcatcgagaatctgtatcgatagttactaaaattgtaagcctcttcatgatttccaggcaagtcatatacggaacgtatgctgcaaccggttctatttgtctcataaattcatcaccaatgagagcattgtctgagtccatatcatatgcaaaatctccaacgtgtagaatggcatcatacaaccctctctgagtttcttcttgtagtctagttaaagatttagcattatcattacccatgtctccataaacagctaaatgtggctgccagtctggcgaatttggagccgttttgaaggtaaatatatttgaccatcccaagtcactcccacaatgatacagatatgtacttcctggtgttaagttctttaggacaacagaatgaatgtgttgtgatctctgctctttacccccatctacaaataatgacgacgtcccattagctgtaagaactaaacctcctatgccatattcaactagggactgttttgtgtcatcaaaggtggaccaagttaccacaatatcataaatattatttccataggcgatatggatttgttccggctgataatagtaaactgataaagatacctgtataaaactaaaacaaaagaatattttcccccacattttgctcaaaactaatgttagtatattaggaataaaataaaaccacaaatttcttcatagaaatacactcaatctcaactcaaccaataaaatcttcggtactgggctactggtctggag

SEQ ID NO: 706 - DNA, 5014 bp, Diabrotica virgifera
  SmartBlast Evalue=1E-165; Info=Iron/zinc purple acid phosphatase-like protein n=1 Tax=Camponotus floridanus RepID= E2AEF0_9HYME
ttttaatttcgtggatgtttataattaatttcataagaggtaacttcatgtgactatcctatatgactaacttaaaaactatatatttactgtctaaaaatccaattggtatcacattattttaaataagtattatataataaattatatatatattatataatattatataataatatataataaatttatcaatctcgttagttttcagtaattcaataaaaactctgaaatttaattaacgtaactgataataaagcaaaataaaatcacaacaaaataaaatttcttttctggggaagatgcttcctcgcaaaaggataccagcctttaatattatgtgtaatccccattccacgaatatacgaccctcctggatcatcgcgacaacgaacattttactgtgaaaaatatgaagaacgaaagtaaattgcaaattatattgttgtttattggagtaattattatagcaaagtactttcgtacttcttatgttgcacactaaaatattcgttgtcgcgacaatccaaaacagtctcatattcgtggaatacaccgtatagatactaaagcaaaagaaaaaagagaaaggaacttggaactgagagcttttgagtagcttaacctggttagtaggagctacataaaaataaactgtctgtctaatacggattcaagaattatgacaaattatgattttcgtctttttcaagtgtcttgcattttcttatgataactaaattatcttaattttctattgcatgtaagtatactgttctcaagctatttccttgtggcatcttatggttcgtacagtataaataccgttgcgcgtcatagtaggtaacgtcacacgacaccaacacaaaatatttaagtcgtaggtctgttccttttagaatcgtttagccaagtacactggaattacagccactaggcatattttattacatgaggcgctcagagcaacagtggcctaaccccaaaaacgaagtttcgaaataaatgctctgcattcgtatttccattgtgcttatgggatggcgctacaatttacgtagtgccatttagccaaatatagaggtaggttttgtagacccttattaatctgaagatttagggctagttgttcgaacgctaattagaaatggaatgcactgatcattatcaaatatttcattacaattatatttgattaagcgtacttctgacagatgtcacattttgaggttatgttgacattgttgactgatttattttattattttggttttaatctaaaataaaccataattaaactctttctgatgttaatttattgtttttacttacaaatcaataacaatagtaagcaatttttaataatttaacgactgcggctatattttaattactgctttacctacaatcaatgaatgattagtgttttacatgtatttttgatgtctcgatttgattcccatcaagaaaattgattacaataaactgattgattataatcaacttcttgattagcgttcgaacaaccggcccttaatgttgctgcccttattgatatattaatctaaaaattctcaatttgtggcttaggccactgttgctctaagcgcctcatataggcgtaaatataatatttgaagatttctattaatgtaaacttaaagaaatgcaccataacttgtttcatttaatctgtataagtggattacgaagcatatttgtccggatcacaactgtgatcgagcgaaggtgatattttggcataaattggtaacacttatttgacagttgcggtgttgacacttcatatttgtttttattatctactttattgaatattttatacagtgatgagcgcgctaataaccgacaaaatagcacaaaagatcacggaagcccatataaaaattttcagggggtggggcagacgtgaagatgttgcacattatattttgtgttctttggataaccatatatagttaacagcacccgaaaagccaggggggcacggtttgttttgttgtatgcacacttctgaaataattatatattatgatgtatttgatttaaaatgaattcagaatttttttttgtaatttggcaactatgtcaacttagatctctgacgtagataatgacgtgtaacggtatttatactgtaccaaccatatgtaatttactattttatcttggaataaaaccacaattatttaagattaaaattaggtaaatttatttgacgtttcgacttccacttcggaaatcgttgtattttgatttcgatttccgaagtggacgtcgaaacgtcaaataaatttaattttaaacttaaattgtggttttattctcaaataaaatagtaaagtatattgttaacgtaaaattttgcaatattatattattttgattaatagaatgatgtattcagcaataacctcacgttttttagctatgctctatctataacaacttctgaatttattattaaagtctagatggcaataaaattgtatttttgatagacttttaattttaaattacaatttaactactttatacaaaatttacttttctaagggccggtttttcagtgctgggttaatcgatttattttttggtcaccgaaatattcatgtttaatcagtttttcagtactagattagagcttaaactcgtttaagttaaccacgattttaaccgatcctcgttagatggtttaactccgaattttgtggttacgcttgcgcattggtgcagtgaatgcatcatgtttattttttgagtacctgccaacctgtctgagagaagggattagttgggttatgttattttcttttatcgcgggaagtattctaatacctccttactattataaggaaattattattattgaaattataaatttttatcgttattatataggaaggaattataaggaaatatatttaaatataactgtaacaggtacctacgtttacacttactgtaacaggatttaatgcattattcctagtaatatttttaaaaagattattttatatttgtctacacagcaaaatacttaattatttaccaaacagtccgacttcttaattgctggtcaatctgttcaaatagtgataagaccgtggtctttgacaaacaaaaccggaaaaaaagtctaaatcgtcccagtaattcgaattattttctgttatgaaaccgagttagacgttatgaactaaacaaagattccgaacttgatattgcattgcattaatcattttttaaatttggttatgaagttgttttttatttatttttctgtcaaattatcattatttctcgaattgtacatgcgctcgtacagttactgctgccaacagaagaaaaaaagtggttagctaaccgagattttcttaacttgatttagagcactgaaaaacgctatgagggttaaaatattggttaaaatttaaactaggttagctaaccaaaattttaaccgctcactgaaaaaccgggcctaaatgtcatgtaaatctttgattttatttagaattatatatactatcacggttcatcgattttaatctcatactgtcaactttcgcccaatccatttttgagtgcgggtataatccgtgtttatccttgactatccagaaggcatcgatcacttccccgcttttatcatcagaaacctgctctagatgcatgtgtgatgaattgtaaaccttgagacggctatatccgtagtcgctacttctgaacgctgaccattcgggtaggtctttaacaaaactgtctgtgccttcatcgcagccggccgagccagtggtgaactgtacaggagcccctggatttacgtaaggctgctcgtagctcccattgtaaacggtgtaattataaacaggccacagcctttcataagaatgctcatgggcccatatagctaaatcgactccataattgtaaagcaagttttccaatccgaagaattgtaagaaaggcaatcctactcttgttatggtttcgtgatgtgtacagtcatcatgatcagtgttggaacagtacatagggcgatgacccatcactataatccatggttgcttttctctgttttcgggtaaattcgccgttgccaagtcttgttccagccactcgtattggaatacgagaggtttaatgccgtagtccaggaaataataaacctctgtagatatagagataatatgcatcggaccaatgttaatgctgtacatgggtgaatttagaccaccaggcatcgagaatctgtatcgatagttactaaaattgtaagcctcttcatgatttccaggcaagtcatatacggaacgtatgctgcaaccggttctatttgtctcataaattcatcaccaatgagagcattgtctgagtccatatcatatgcaaaatctccaacgtgtagaatggcatcatacaaccctctctgagtttcttcttgtagtctagttaaagatttagcattatcattacccatgtctccataaacagctaaatgtggctgccagtctggcgaatttggagccgttttgaaggtaaatatatttgaccatcccaagtcactcccacaatgatacagatatgtacttcctggtgttaagttctttaggacaacagaatgaatgtgttgtgatctctgctctttacccccatctacaaataatgacgacgtcccattagctgtaagaactaaacctcctatgccatattcaactagggactgttttgtgtcatcaaaggtggaccaagttaccacaatatcataaatattatttccataggcgatatggatttgttccggctgataatagtaaactgataaagatacctgtataaaactaaaacaaaagaatattttcccccacattttgctcaaaactaatgttagtatattaggaataaaataaaaccacaaatttcttcatagaaatacactcaatctcaactcaaccaataaaatcttcggtactgggctactggtctggag

SEQ ID NO: 707 - DNA, 4971 bp, Diabrotica virgifera
  SmartBlast Evalue=1E-165; Info=Iron/zinc purple acid phosphatase-like protein n=1 Tax=Camponotus floridanus RepID= E2AEF0_9HYME
ttttaatttcgtggatgtttataattaatttcataagaggtaacttcatgtgactatcctatatgactaacttaaaaactatatatttactgtctaaaaatccaattggtatcacattattttaaataagtattatataataaatttatcaatctcgttagttttcagtaattcaataaaaactctgaaatttaattaacgtaactgataataaagcaaaataaaatcacaacaaaataaaatttcttttctggggaagatgcttcctcgcaaaaggataccagcctttaatattatgtgtaatccccattccacgaatatacgaccctcctggatcatcgcgacaacgaacattttactgtgaaaaatatgaagaacgaaagtaaattgcaaattatattgttgtttattggagtaattattatagcaaagtactttcgtacttcttatgttgcacactaaaatattcgttgtcgcgacaatccaaaacagtctcatattcgtggaatacaccgtatagatactaaagcaaaagaaaaaagagaaaggaacttggaactgagagcttttgagtagcttaacctggttagtaggagctacataaaaataaactgtctgtctaatacggattcaagaattatgacaaattatgattttcgtctttttcaagtgtcttgcattttcttatgataactaaattatcttaattttctattgcatgtaagtatactgttctcaagctatttccttgtggcatcttatggttcgtacagtataaataccgttgcgcgtcatagtaggtaacgtcacacgacaccaacacaaaatatttaagtcgtaggtctgttccttttagaatcgtttagccaagtacactggaattacagccactaggcatattttattacatgaggcgctcagagcaacagtggcctaaccccaaaaacgaagtttcgaaataaatgctctgcattcgtatttccattgtgcttatgggatggcgctacaatttacgtagtgccatttagccaaatatagaggtaggttttgtagacccttattaatctgaagatttagggctagttgttcgaacgctaattagaaatggaatgcactgatcattatcaaatatttcattacaattatatttgattaagcgtacttctgacagatgtcacattttgaggttatgttgacattgttgactgatttattttattattttggttttaatctaaaataaaccataattaaactctttctgatgttaatttattgtttttacttacaaatcaataacaatagtaagcaatttttaataatttaacgactgcggctatattttaattactgctttacctacaatcaatgaatgattagtgttttacatgtatttttgatgtctcgatttgattcccatcaagaaaattgattacaataaactgattgattataatcaacttcttgattagcgttcgaacaaccggcccttaatgttgctgcccttattgatatattaatctaaaaattctcaatttgtggcttaggccactgttgctctaagcgcctcatataggcgtaaatataatatttgaagatttctattaatgtaaacttaaagaaatgcaccataacttgtttcatttaatctgtataagtggattacgaagcatatttgtccggatcacaactgtgatcgagcgaaggtgatattttggcataaattggtaacacttatttgacagttgcggtgttgacacttcatatttgtttttattatctactttattgaatattttatacagtgatgagcgcgctaataaccgacaaaatagcacaaaagatcacggaagcccatataaaaattttcagggggtggggcagacgtgaagatgttgcacattatattttgtgttctttggataaccatatatagttaacagcacccgaaaagccaggggggcacggtttgttttgttgtatgcacacttctgaaataattatatattatgatgtatttgatttaaaatgaattcagaatttttttttgtaatttggcaactatgtcaacttagatctctgacgtagataatgacgtgtaacggtatttatactgtaccaaccatatgtaatttactattttatcttggaataaaaccacaattatttaagattaaaattaggtaaatttatttgacgtttcgacttccacttcggaaatcgttgtattttgatttcgatttccgaagtggacgtcgaaacgtcaaataaatttaattttaaacttaaattgtggttttattctcaaataaaatagtaaagtatattgttaacgtaaaattttgcaatattatattattttgattaatagaatgatgtattcagcaataacctcacgttttttagctatgctctatctataacaacttctgaatttattattaaagtctagatggcaataaaattgtatttttgatagacttttaattttaaattacaatttaactactttatacaaaatttacttttctaagggccggtttttcagtgctgggttaatcgatttattttttggtcaccgaaatattcatgtttaatcagtttttcagtactagattagagcttaaactcgtttaagttaaccacgattttaaccgatcctcgttagatggtttaactccgaattttgtggttacgcttgcgcattggtgcagtgaatgcatcatgtttattttttgagtacctgccaacctgtctgagagaagggattagttgggttatgttattttcttttatcgcgggaagtattctaatacctccttactattataaggaaattattattattgaaattataaatttttatcgttattatataggaaggaattataaggaaatatatttaaatataactgtaacaggtacctacgtttacacttactgtaacaggatttaatgcattattcctagtaatatttttaaaaagattattttatatttgtctacacagcaaaatacttaattatttaccaaacagtccgacttcttaattgctggtcaatctgttcaaatagtgataagaccgtggtctttgacaaacaaaaccggaaaaaaagtctaaatcgtcccagtaattcgaattattttctgttatgaaaccgagttagacgttatgaactaaacaaagattccgaacttgatattgcattgcattaatcattttttaaatttggttatgaagttgttttttatttatttttctgtcaaattatcattatttctcgaattgtacatgcgctcgtacagttactgctgccaacagaagaaaaaaagtggttagctaaccgagattttcttaacttgatttagagcactgaaaaacgctatgagggttaaaatattggttaaaatttaaactaggttagctaaccaaaattttaaccgctcactgaaaaaccgggcctaaatgtcatgtaaatctttgattttatttagaattatatatactatcacggttcatcgattttaatctcatactgtcaactttcgcccaatccatttttgagtgcgggtataatccgtgtttatccttgactatccagaaggcatcgatcacttccccgcttttatcatcagaaacctgctctagatgcatgtgtgatgaattgtaaaccttgagacggctatatccgtagtcgctacttctgaacgctgaccattcgggtaggtctttaacaaaactgtctgtgccttcatcgcagccggccgagccagtggtgaactgtacaggagcccctggatttacgtaaggctgctcgtagctcccattgtaaacggtgtaattataaacaggccacagcctttcataagaatgctcatgggcccatatagctaaatcgactccataattgtaaagcaagttttccaatccgaagaattgtaagaaaggcaatcctactcttgttatggtttcgtgatgtgtacagtcatcatgatcagtgttggaacagtacatagggcgatgacccatcactataatccatggttgcttttctctgttttcgggtaaattcgccgttgccaagtcttgttccagccactcgtattggaatacgagaggtttaatgccgtagtccaggaaataataaacctctgtagatatagagataatatgcatcggaccaatgttaatgctgtacatgggtgaatttagaccaccaggcatcgagaatctgtatcgatagttactaaaattgtaagcctcttcatgatttccaggcaagtcatatacggaacgtatgctgcaaccggttctatttgtctcataaattcatcaccaatgagagcattgtctgagtccatatcatatgcaaaatctccaacgtgtagaatggcatcatacaaccctctctgagtttcttcttgtagtctagttaaagatttagcattatcattacccatgtctccataaacagctaaatgtggctgccagtctggcgaatttggagccgttttgaaggtaaatatatttgaccatcccaagtcactcccacaatgatacagatatgtacttcctggtgttaagttctttaggacaacagaatgaatgtgttgtgatctctgctctttacccccatctacaaataatgacgacgtcccattagctgtaagaactaaacctcctatgccatattcaactagggactgttttgtgtcatcaaaggtggaccaagttaccacaatatcataaatattatttccataggcgatatggatttgttccggctgataatagtaaactgataaagatacctgtataaaactaaaacaaaagaatattttcccccacattttgctcaaaactaatgttagtatattaggaataaaataaaaccacaaatttcttcatagaaatacactcaatctcaactcaaccaataaaatcttcggtactgggctactggtctggag

SEQ ID NO: 708 - DNA, 5014 bp, Diabrotica virgifera
  SmartBlast Evalue=1E-165; Info=Iron/zinc purple acid phosphatase-like protein n=1 Tax=Camponotus floridanus RepID= E2AEF0_9HYME
ttttaatttcgtggatgtttataattaatttcataagaggtaacttcatgtgactatcctatatgactaacttaaaaactatatatttactgtctaaaaatccaattggtatcacattattttaaataagtattatataataaattatatatatattatataatattatataataatatataataaatttatcaatctcgttagttttcagtaattcaataaaaactctgaaatttaattaacgtaactgataataaagcaaaataaaatcacaacaaaataaaatttcttttctggggaagatgcttcctcgcaaaaggataccagcctttaatattatgtgtaatccccattccacgaatatacgaccctcctggatcatcgcgacaacgaacattttactgtgcaaaatatgaagaacgaaagtaaattgcaaattatattgttgtttattggagtaattattatagcaaagtactttcgtactttttatgttgcacactaaaatattcgttgtcgcgacaatccaaaacagtctcatattcgtggaatacaccgtatagatactaaagcaaaagaaaaaagggaaaggaacttggaactgagagcttttgagtagcttaacctggttagtaggagctacataaaaataaactgtctgtctaatacggattcaagaattatgacaaattatgattttcgtctttttcaagtgtcttgcattttcttatgataactaaattatcttaattttctattgcatgtaagtatactgttctcaagctatttccttgtggcatcttatggttcgtacagtataaataccgttgcgcgtcatagtaggtaacgtcacacgacaccaacacaaaatatttaagtcgtaggtctgttccttttagaatcgtttagccaagtacactggaattacagccactaggcatattttattacatgaggcgctcagagcaacagtggcctaaccccaaaaacgaagtttcgaaataaatgctctgcattcgtatttccattgtgcttatgggatggcgctacaatttacgtagtgccatttagccaaatatagaggtaggttttgtagacccttattaatctgaagatttagggctagttgttcgaacgctaattagaaatggaatgcactgatcattatcaaatatttcattacaattatatttgattaagcgtacttctgacagatgtcacattttgaggttatgttgacattgttgactgatttattttattattttggttttaatctaaaataaaccataattaaactctttctgatgttaatttattgtttttacttacaaatcaataacaatagtaagcaatttttaataatttaacgactgcggctatattttaattactgctttacctacaatcaatgaatgattagtgttttacatgtatttttgatgtctcgatttgattcccatcaagaaaattgattacaataaactgattgattataatcaacttcttgattagcgttcgaacaaccggcccttaatgttgctgcccttattgatatattaatctaaaaattctcaatttgtggcttaggccactgttgctctaagcgcctcatataggcgtaaatataatatttgaagatttctattaatgtaaacttaaagaaatgcaccataacttgtttcatttaatctgtataagtggattacgaagcatatttgtccggatcacaactgtgatcgagcgaaggtgatattttggcataaattggtaacacttatttgacagttgcggtgttgacacttcatatttgtttttattatctactttattgaatattttatacagtgatgagcgcgctaataaccgacaaaatagcacaaaagatcacggaagcccatataaaaattttcagggggtggggcagacgtgaagatgttgcacattatattttgtgttctttggataaccatatatagttaacagcacccgaaaagccaggggggcacggtttgttttgttgtatgcacacttctgaaataattatatattatgatgtatttgatttaaaatgaattcagaatttttttttgtaatttggcaactatgtcaacttagatctctgacgtagataatgacgtgtaacggtatttatactgtaccaaccatatgtaatttactattttatcttggaataaaaccacaattatttaagattaaaattaggtaaatttatttgacgtttcgacttccacttcggaaatcgttgtattttgatttcgatttccgaagtggacgtcgaaacgtcaaataaatttaattttaaacttaaattgtggttttattctcaaataaaatagtaaagtatattgttaacgtaaaattttgcaatattatattattttgattaatagaatgatgtattcagcaataacctcacgttttttagctatgctctatctataacaacttctgaatttattattaaagtctagatggcaataaaattgtatttttgatagacttttaattttaaattacaatttaactactttatacaaaatttacttttctaagggccggtttttcagtgctgggttaatcgatttattttttggtcaccgaaatattcatgtttaatcagtttttcagtactagattagagcttaaactcgtttaagttaaccacgattttaaccgatcctcgttagatggtttaactccgaattttgtggttacgcttgcgcattggtgcagtgaatgcatcatgtttattttttgagtacctgccaacctgtctgagagaagggattagttgggttatgttattttcttttatcgcgggaagtattctaatacctccttactattataaggaaattattattattgaaattataaatttttatcgttattatataggaaggaattataaggaaatatatttaaatataactgtaacaggtacctacgtttacacttactgtaacaggatttaatgcattattcctagtaatatttttaaaaagattattttatatttgtctacacagcaaaatacttaattatttaccaaacagtccgacttcttaattgctggtcaatctgttcaaatagtgataagaccgtggtctttgacaaacaaaaccggaaaaaaagtctaaatcgtcccagtaattcgaattattttctgttatgaaaccgagttagacgttatgaactaaacaaagattccgaacttgatattgcattgcattaatcattttttaaatttggttatgaagttgttttttatttatttttctgtcaaattatcattatttctcgaattgtacatgcgctcgtacagttactgctgccaacagaagaaaaaaagtggttagctaaccgagattttcttaacttgatttagagcactgaaaaacgctatgagggttaaaatattggttaaaatttaaactaggttagctaaccaaaattttaaccgctcactgaaaaaccgggcctaaatgtcatgtaaatctttgattttatttagaattatatatactatcacggttcatcgattttaatctcatactgtcaactttcgcccaatccatttttgagtgcgggtataatccgtgtttatccttgactatccagaaggcatcgatcacttccccgcttttatcatcagaaacctgctctagatgcatgtgtgatgaattgtaaaccttgagacggctatatccgtagtcgctacttctgaacgctgaccattcgggtaggtctttaacaaaactgtctgtgccttcatcgcagccggccgagccagtggtgaactgtacaggagcccctggatttacgtaaggctgctcgtagctcccattgtaaacggtgtaattataaacaggccacagcctttcataagaatgctcatgggcccatatagctaaatcgactccataattgtaaagcaagttttccaatccgaagaattgtaagaaaggcaatcctactcttgttatggtttcgtgatgtgtacagtcatcatgatcagtgttggaacagtacatagggcgatgacccatcactataatccatggttgcttttctctgttttcgggtaaattcgccgttgccaagtcttgttccagccactcgtattggaatacgagaggtttaatgccgtagtccaggaaataataaacctctgtagatatagagataatatgcatcggaccaatgttaatgctgtacatgggtgaatttagaccaccaggcatcgagaatctgtatcgatagttactaaaattgtaagcctcttcatgatttccaggcaagtcatatacggaacgtatgctgcaaccggttctatttgtctcataaattcatcaccaatgagagcattgtctgagtccatatcatatgcaaaatctccaacgtgtagaatggcatcatacaaccctctctgagtttcttcttgtagtctagttaaagatttagcattatcattacccatgtctccataaacagctaaatgtggctgccagtctggcgaatttggagccgttttgaaggtaaatatatttgaccatcccaagtcactcccacaatgatacagatatgtacttcctggtgttaagttctttaggacaacagaatgaatgtgttgtgatctctgctctttacccccatctacaaataatgacgacgtcccattagctgtaagaactaaacctcctatgccatattcaactagggactgttttgtgtcatcaaaggtggaccaagttaccacaatatcataaatattatttccataggcgatatggatttgttccggctgataatagtaaactgataaagatacctgtataaaactaaaacaaaagaatattttcccccacattttgctcaaaactaatgttagtatattaggaataaaataaaaccacaaatttcttcatagaaatacactcaatctcaactcaaccaataaaatcttcggtactgggctactggtctggag

SEQ ID NO: 709 - DNA, 4971 bp, Diabrotica virgifera
  SmartBlast Evalue=1E-165; Info=Iron/zinc purple acid phosphatase-like protein n=1 Tax=Camponotus floridanus RepID= E2AEF0_9HYME
ttttaatttcgtggatgtttataattaatttcataagaggtaacttcatgtgactatcctatatgactaacttaaaaactatatatttactgtctaaaaatccaattggtatcacattattttaaataagtattatataataaatttatcaatctcgttagttttcagtaattcaataaaaactctgaaatttaattaacgtaactgataataaagcaaaataaaatcacaacaaaataaaatttcttttctggggaagatgcttcctcgcaaaaggataccagcctttaatattatgtgtaatccccattccacgaatatacgaccctcctggatcatcgcgacaacgaacattttactgtgcaaaatatgaagaacgaaagtaaattgcaaattatattgttgtttattggagtaattattatagcaaagtactttcgtactttttatgttgcacactaaaatattcgttgtcgcgacaatccaaaacagtctcatattcgtggaatacaccgtatagatactaaagcaaaagaaaaaagggaaaggaacttggaactgagagcttttgagtagcttaacctggttagtaggagctacataaaaataaactgtctgtctaatacggattcaagaattatgacaaattatgattttcgtctttttcaagtgtcttgcattttcttatgataactaaattatcttaattttctattgcatgtaagtatactgttctcaagctatttccttgtggcatcttatggttcgtacagtataaataccgttgcgcgtcatagtaggtaacgtcacacgacaccaacacaaaatatttaagtcgtaggtctgttccttttagaatcgtttagccaagtacactggaattacagccactaggcatattttattacatgaggcgctcagagcaacagtggcctaaccccaaaaacgaagtttcgaaataaatgctctgcattcgtatttccattgtgcttatgggatggcgctacaatttacgtagtgccatttagccaaatatagaggtaggttttgtagacccttattaatctgaagatttagggctagttgttcgaacgctaattagaaatggaatgcactgatcattatcaaatatttcattacaattatatttgattaagcgtacttctgacagatgtcacattttgaggttatgttgacattgttgactgatttattttattattttggttttaatctaaaataaaccataattaaactctttctgatgttaatttattgtttttacttacaaatcaataacaatagtaagcaatttttaataatttaacgactgcggctatattttaattactgctttacctacaatcaatgaatgattagtgttttacatgtatttttgatgtctcgatttgattcccatcaagaaaattgattacaataaactgattgattataatcaacttcttgattagcgttcgaacaaccggcccttaatgttgctgcccttattgatatattaatctaaaaattctcaatttgtggcttaggccactgttgctctaagcgcctcatataggcgtaaatataatatttgaagatttctattaatgtaaacttaaagaaatgcaccataacttgtttcatttaatctgtataagtggattacgaagcatatttgtccggatcacaactgtgatcgagcgaaggtgatattttggcataaattggtaacacttatttgacagttgcggtgttgacacttcatatttgtttttattatctactttattgaatattttatacagtgatgagcgcgctaataaccgacaaaatagcacaaaagatcacggaagcccatataaaaattttcagggggtggggcagacgtgaagatgttgcacattatattttgtgttctttggataaccatatatagttaacagcacccgaaaagccaggggggcacggtttgttttgttgtatgcacacttctgaaataattatatattatgatgtatttgatttaaaatgaattcagaatttttttttgtaatttggcaactatgtcaacttagatctctgacgtagataatgacgtgtaacggtatttatactgtaccaaccatatgtaatttactattttatcttggaataaaaccacaattatttaagattaaaattaggtaaatttatttgacgtttcgacttccacttcggaaatcgttgtattttgatttcgatttccgaagtggacgtcgaaacgtcaaataaatttaattttaaacttaaattgtggttttattctcaaataaaatagtaaagtatattgttaacgtaaaattttgcaatattatattattttgattaatagaatgatgtattcagcaataacctcacgttttttagctatgctctatctataacaacttctgaatttattattaaagtctagatggcaataaaattgtatttttgatagacttttaattttaaattacaatttaactactttatacaaaatttacttttctaagggccggtttttcagtgctgggttaatcgatttattttttggtcaccgaaatattcatgtttaatcagtttttcagtactagattagagcttaaactcgtttaagttaaccacgattttaaccgatcctcgttagatggtttaactccgaattttgtggttacgcttgcgcattggtgcagtgaatgcatcatgtttattttttgagtacctgccaacctgtctgagagaagggattagttgggttatgttattttcttttatcgcgggaagtattctaatacctccttactattataaggaaattattattattgaaattataaatttttatcgttattatataggaaggaattataaggaaatatatttaaatataactgtaacaggtacctacgtttacacttactgtaacaggatttaatgcattattcctagtaatatttttaaaaagattattttatatttgtctacacagcaaaatacttaattatttaccaaacagtccgacttcttaattgctggtcaatctgttcaaatagtgataagaccgtggtctttgacaaacaaaaccggaaaaaaagtctaaatcgtcccagtaattcgaattattttctgttatgaaaccgagttagacgttatgaactaaacaaagattccgaacttgatattgcattgcattaatcattttttaaatttggttatgaagttgttttttatttatttttctgtcaaattatcattatttctcgaattgtacatgcgctcgtacagttactgctgccaacagaagaaaaaaagtggttagctaaccgagattttcttaacttgatttagagcactgaaaaacgctatgagggttaaaatattggttaaaatttaaactaggttagctaaccaaaattttaaccgctcactgaaaaaccgggcctaaatgtcatgtaaatctttgattttatttagaattatatatactatcacggttcatcgattttaatctcatactgtcaactttcgcccaatccatttttgagtgcgggtataatccgtgtttatccttgactatccagaaggcatcgatcacttccccgcttttatcatcagaaacctgctctagatgcatgtgtgatgaattgtaaaccttgagacggctatatccgtagtcgctacttctgaacgctgaccattcgggtaggtctttaacaaaactgtctgtgccttcatcgcagccggccgagccagtggtgaactgtacaggagcccctggatttacgtaaggctgctcgtagctcccattgtaaacggtgtaattataaacaggccacagcctttcataagaatgctcatgggcccatatagctaaatcgactccataattgtaaagcaagttttccaatccgaagaattgtaagaaaggcaatcctactcttgttatggtttcgtgatgtgtacagtcatcatgatcagtgttggaacagtacatagggcgatgacccatcactataatccatggttgcttttctctgttttcgggtaaattcgccgttgccaagtcttgttccagccactcgtattggaatacgagaggtttaatgccgtagtccaggaaataataaacctctgtagatatagagataatatgcatcggaccaatgttaatgctgtacatgggtgaatttagaccaccaggcatcgagaatctgtatcgatagttactaaaattgtaagcctcttcatgatttccaggcaagtcatatacggaacgtatgctgcaaccggttctatttgtctcataaattcatcaccaatgagagcattgtctgagtccatatcatatgcaaaatctccaacgtgtagaatggcatcatacaaccctctctgagtttcttcttgtagtctagttaaagatttagcattatcattacccatgtctccataaacagctaaatgtggctgccagtctggcgaatttggagccgttttgaaggtaaatatatttgaccatcccaagtcactcccacaatgatacagatatgtacttcctggtgttaagttctttaggacaacagaatgaatgtgttgtgatctctgctctttacccccatctacaaataatgacgacgtcccattagctgtaagaactaaacctcctatgccatattcaactagggactgttttgtgtcatcaaaggtggaccaagttaccacaatatcataaatattatttccataggcgatatggatttgttccggctgataatagtaaactgataaagatacctgtataaaactaaaacaaaagaatattttcccccacattttgctcaaaactaatgttagtatattaggaataaaataaaaccacaaatttcttcatagaaatacactcaatctcaactcaaccaataaaatcttcggtactgggctactggtctggag

SEQ ID NO: 710 - DNA, 4857 bp, Diabrotica virgifera
  SmartBlast Evalue=1E-165; Info=Iron/zinc purple acid phosphatase-like protein n=1 Tax=Camponotus floridanus RepID= E2AEF0_9HYME
ttttaatttcgtggatgtttataattaatttcataagaggtaacttcatgtgactatcctatatgactaacttaaaaactatatatttactgtctaaaaatccaattggtatcacattattttaaataagtattatataataaattatatatatattatataatattatataataatatataataaatttatcaatctcgttagttttcagtaattcaataaaaactctgaaatttaattaacgtaactgataataaagcaaaataaaatcacaacaaaataaaatttcttttctggggaagatgcttcctcgcaaaaggataccagcctttaatattatgtgtaatccccattccacgaatatacgaccctcctggatcatcgcgacaacgaacattttactgtgaaaaatatgaagaacgaaagtaaattgcaaattatattgttgtttattggagtaattattatagcaaagtactttcgtacttcttatgttgcacactaaaatattcgttgtcgcgacaatccaaaacagtctcatattcgtggaatacaccgtatagatactaaagcaaaagaaaaaagagaaaggaacttggaactgagagcttttgagtagcttaacctggttagtaggagctacataaaaataaactgtctgtctaatacggattcaagaattatgacaaattatgattttcgtctttttcaagtgtcttgcattttcttatgataactaaattatcttaattttctattgcatgtaagtatactgttctcaagctatttccttgtggcatcttatggttcgtacagtataaataccgttgcgcgtcatagtaggtaacgtcacacgacaccaacacaaaatatttaagtcgtaggtctgttccttttagaatcgtttagccaagtacactggaattacagccactaggcatattttattacatgaggcgctcagagcaacagtggcctaaccccaaaaacgaagtttcgaaataaatgctctgcattcgtatttccattgtgcttatgggatggcgctacaatttacgtagtgccatttagccaaatatagaggtaggttttgtagacccttattaatctgaagatttagggctagttgttcgaacgctaattagaaatggaatgcactgatcattatcaaatatttcattacaattatatttgattaagcgtacttctgacagatgtcacattttgaggttatgttgacattgttgactgatttattttattattttggttttaatctaaaataaaccataattaaactctttctgatgttaatttattgtttttacttacaaatcaataacaatagtaagcaatttttaataatttaacgactgcggctatattttaattactgctttacctacaatcaatgaatgattagtgttttacatgtatttttgatgtctcgatttgattcccatcaagaaaattgattacaataaactgattgattataatcaacttcttgattagcgttcgaacaaccggcccttaatgttgctgcccttattgatatattaatctaaaaattctcaatttgtggcttaggccactgttgctctaagcgcctcatataggcgtaaatataatatttgaagatttctattaatgtaaacttaaagaaatgcaccataacttgtttcatttaatctgtataagtggattacgaagcatatttgtccggatcacaactgtgatcgagcgaaggtgatattttggcataaattggtaacacttatttgacagttgcggtgttgacacttcatatttgtttttattatctactttattgaatattttatacagtgatgagcgcgctaataaccgacaaaatagcacaaaagatcacggaagcccatataaaaattttcagggggtggggcagacgtgaagatgttgcacattatattttgtgttctttggataaccatatatagttaacagcacccgaaaagccaggggggcacggtttgttttgttgtatgcacacttctgaaataattatatattatgatgtatttgatttaaaatgaattcagaatttttttttgtaatttggcaactatgtcaacttagatctctgacgtagataatgacgtgtaacggtatttatactgtaccaaccatatgtaatttactattttatcttggaataaaatagtaaagtatattgttaacgtaaaattttgcaatattatattattttgattaatagaatgatgtattcagcaataacctcacgttttttagctatgctctatctataacaacttctgaatttattattaaagtctagatggcaataaaattgtatttttgatagacttttaattttaaattacaatttaactactttatacaaaatttacttttctaagggccggtttttcagtgctgggttaatcgatttattttttggtcaccgaaatattcatgtttaatcagtttttcagtactagattagagcttaaactcgtttaagttaaccacgattttaaccgatcctcgttagatggtttaactccgaattttgtggttacgcttgcgcattggtgcagtgaatgcatcatgtttattttttgagtacctgccaacctgtctgagagaagggattagttgggttatgttattttcttttatcgcgggaagtattctaatacctccttactattataaggaaattattattattgaaattataaatttttatcgttattatataggaaggaattataaggaaatatatttaaatataactgtaacaggtacctacgtttacacttactgtaacaggatttaatgcattattcctagtaatatttttaaaaagattattttatatttgtctacacagcaaaatacttaattatttaccaaacagtccgacttcttaattgctggtcaatctgttcaaatagtgataagaccgtggtctttgacaaacaaaaccggaaaaaaagtctaaatcgtcccagtaattcgaattattttctgttatgaaaccgagttagacgttatgaactaaacaaagattccgaacttgatattgcattgcattaatcattttttaaatttggttatgaagttgttttttatttatttttctgtcaaattatcattatttctcgaattgtacatgcgctcgtacagttactgctgccaacagaagaaaaaaagtggttagctaaccgagattttcttaacttgatttagagcactgaaaaacgctatgagggttaaaatattggttaaaatttaaactaggttagctaaccaaaattttaaccgctcactgaaaaaccgggcctaaatgtcatgtaaatctttgattttatttagaattatatatactatcacggttcatcgattttaatctcatactgtcaactttcgcccaatccatttttgagtgcgggtataatccgtgtttatccttgactatccagaaggcatcgatcacttccccgcttttatcatcagaaacctgctctagatgcatgtgtgatgaattgtaaaccttgagacggctatatccgtagtcgctacttctgaacgctgaccattcgggtaggtctttaacaaaactgtctgtgccttcatcgcagccggccgagccagtggtgaactgtacaggagcccctggatttacgtaaggctgctcgtagctcccattgtaaacggtgtaattataaacaggccacagcctttcataagaatgctcatgggcccatatagctaaatcgactccataattgtaaagcaagttttccaatccgaagaattgtaagaaaggcaatcctactcttgttatggtttcgtgatgtgtacagtcatcatgatcagtgttggaacagtacatagggcgatgacccatcactataatccatggttgcttttctctgttttcgggtaaattcgccgttgccaagtcttgttccagccactcgtattggaatacgagaggtttaatgccgtagtccaggaaataataaacctctgtagatatagagataatatgcatcggaccaatgttaatgctgtacatgggtgaatttagaccaccaggcatcgagaatctgtatcgatagttactaaaattgtaagcctcttcatgatttccaggcaagtcatatacggaacgtatgctgcaaccggttctatttgtctcataaattcatcaccaatgagagcattgtctgagtccatatcatatgcaaaatctccaacgtgtagaatggcatcatacaaccctctctgagtttcttcttgtagtctagttaaagatttagcattatcattacccatgtctccataaacagctaaatgtggctgccagtctggcgaatttggagccgttttgaaggtaaatatatttgaccatcccaagtcactcccacaatgatacagatatgtacttcctggtgttaagttctttaggacaacagaatgaatgtgttgtgatctctgctctttacccccatctacaaataatgacgacgtcccattagctgtaagaactaaacctcctatgccatattcaactagggactgttttgtgtcatcaaaggtggaccaagttaccacaatatcataaatattatttccataggcgatatggatttgttccggctgataatagtaaactgataaagatacctgtataaaactaaaacaaaagaatattttcccccacattttgctcaaaactaatgttagtatattaggaataaaataaaaccacaaatttcttcatagaaatacactcaatctcaactcaaccaataaaatcttcggtactgggctactggtctggag

SEQ ID NO: 711 - DNA, 4814 bp, Diabrotica virgifera
  SmartBlast Evalue=1E-165; Info=Iron/zinc purple acid phosphatase-like protein n=1 Tax=Camponotus floridanus RepID= E2AEF0_9HYME
ttttaatttcgtggatgtttataattaatttcataagaggtaacttcatgtgactatcctatatgactaacttaaaaactatatatttactgtctaaaaatccaattggtatcacattattttaaataagtattatataataaatttatcaatctcgttagttttcagtaattcaataaaaactctgaaatttaattaacgtaactgataataaagcaaaataaaatcacaacaaaataaaatttcttttctggggaagatgcttcctcgcaaaaggataccagcctttaatattatgtgtaatccccattccacgaatatacgaccctcctggatcatcgcgacaacgaacattttactgtgaaaaatatgaagaacgaaagtaaattgcaaattatattgttgtttattggagtaattattatagcaaagtactttcgtacttcttatgttgcacactaaaatattcgttgtcgcgacaatccaaaacagtctcatattcgtggaatacaccgtatagatactaaagcaaaagaaaaaagagaaaggaacttggaactgagagcttttgagtagcttaacctggttagtaggagctacataaaaataaactgtctgtctaatacggattcaagaattatgacaaattatgattttcgtctttttcaagtgtcttgcattttcttatgataactaaattatcttaattttctattgcatgtaagtatactgttctcaagctatttccttgtggcatcttatggttcgtacagtataaataccgttgcgcgtcatagtaggtaacgtcacacgacaccaacacaaaatatttaagtcgtaggtctgttccttttagaatcgtttagccaagtacactggaattacagccactaggcatattttattacatgaggcgctcagagcaacagtggcctaaccccaaaaacgaagtttcgaaataaatgctctgcattcgtatttccattgtgcttatgggatggcgctacaatttacgtagtgccatttagccaaatatagaggtaggttttgtagacccttattaatctgaagatttagggctagttgttcgaacgctaattagaaatggaatgcactgatcattatcaaatatttcattacaattatatttgattaagcgtacttctgacagatgtcacattttgaggttatgttgacattgttgactgatttattttattattttggttttaatctaaaataaaccataattaaactctttctgatgttaatttattgtttttacttacaaatcaataacaatagtaagcaatttttaataatttaacgactgcggctatattttaattactgctttacctacaatcaatgaatgattagtgttttacatgtatttttgatgtctcgatttgattcccatcaagaaaattgattacaataaactgattgattataatcaacttcttgattagcgttcgaacaaccggcccttaatgttgctgcccttattgatatattaatctaaaaattctcaatttgtggcttaggccactgttgctctaagcgcctcatataggcgtaaatataatatttgaagatttctattaatgtaaacttaaagaaatgcaccataacttgtttcatttaatctgtataagtggattacgaagcatatttgtccggatcacaactgtgatcgagcgaaggtgatattttggcataaattggtaacacttatttgacagttgcggtgttgacacttcatatttgtttttattatctactttattgaatattttatacagtgatgagcgcgctaataaccgacaaaatagcacaaaagatcacggaagcccatataaaaattttcagggggtggggcagacgtgaagatgttgcacattatattttgtgttctttggataaccatatatagttaacagcacccgaaaagccaggggggcacggtttgttttgttgtatgcacacttctgaaataattatatattatgatgtatttgatttaaaatgaattcagaatttttttttgtaatttggcaactatgtcaacttagatctctgacgtagataatgacgtgtaacggtatttatactgtaccaaccatatgtaatttactattttatcttggaataaaatagtaaagtatattgttaacgtaaaattttgcaatattatattattttgattaatagaatgatgtattcagcaataacctcacgttttttagctatgctctatctataacaacttctgaatttattattaaagtctagatggcaataaaattgtatttttgatagacttttaattttaaattacaatttaactactttatacaaaatttacttttctaagggccggtttttcagtgctgggttaatcgatttattttttggtcaccgaaatattcatgtttaatcagtttttcagtactagattagagcttaaactcgtttaagttaaccacgattttaaccgatcctcgttagatggtttaactccgaattttgtggttacgcttgcgcattggtgcagtgaatgcatcatgtttattttttgagtacctgccaacctgtctgagagaagggattagttgggttatgttattttcttttatcgcgggaagtattctaatacctccttactattataaggaaattattattattgaaattataaatttttatcgttattatataggaaggaattataaggaaatatatttaaatataactgtaacaggtacctacgtttacacttactgtaacaggatttaatgcattattcctagtaatatttttaaaaagattattttatatttgtctacacagcaaaatacttaattatttaccaaacagtccgacttcttaattgctggtcaatctgttcaaatagtgataagaccgtggtctttgacaaacaaaaccggaaaaaaagtctaaatcgtcccagtaattcgaattattttctgttatgaaaccgagttagacgttatgaactaaacaaagattccgaacttgatattgcattgcattaatcattttttaaatttggttatgaagttgttttttatttatttttctgtcaaattatcattatttctcgaattgtacatgcgctcgtacagttactgctgccaacagaagaaaaaaagtggttagctaaccgagattttcttaacttgatttagagcactgaaaaacgctatgagggttaaaatattggttaaaatttaaactaggttagctaaccaaaattttaaccgctcactgaaaaaccgggcctaaatgtcatgtaaatctttgattttatttagaattatatatactatcacggttcatcgattttaatctcatactgtcaactttcgcccaatccatttttgagtgcgggtataatccgtgtttatccttgactatccagaaggcatcgatcacttccccgcttttatcatcagaaacctgctctagatgcatgtgtgatgaattgtaaaccttgagacggctatatccgtagtcgctacttctgaacgctgaccattcgggtaggtctttaacaaaactgtctgtgccttcatcgcagccggccgagccagtggtgaactgtacaggagcccctggatttacgtaaggctgctcgtagctcccattgtaaacggtgtaattataaacaggccacagcctttcataagaatgctcatgggcccatatagctaaatcgactccataattgtaaagcaagttttccaatccgaagaattgtaagaaaggcaatcctactcttgttatggtttcgtgatgtgtacagtcatcatgatcagtgttggaacagtacatagggcgatgacccatcactataatccatggttgcttttctctgttttcgggtaaattcgccgttgccaagtcttgttccagccactcgtattggaatacgagaggtttaatgccgtagtccaggaaataataaacctctgtagatatagagataatatgcatcggaccaatgttaatgctgtacatgggtgaatttagaccaccaggcatcgagaatctgtatcgatagttactaaaattgtaagcctcttcatgatttccaggcaagtcatatacggaacgtatgctgcaaccggttctatttgtctcataaattcatcaccaatgagagcattgtctgagtccatatcatatgcaaaatctccaacgtgtagaatggcatcatacaaccctctctgagtttcttcttgtagtctagttaaagatttagcattatcattacccatgtctccataaacagctaaatgtggctgccagtctggcgaatttggagccgttttgaaggtaaatatatttgaccatcccaagtcactcccacaatgatacagatatgtacttcctggtgttaagttctttaggacaacagaatgaatgtgttgtgatctctgctctttacccccatctacaaataatgacgacgtcccattagctgtaagaactaaacctcctatgccatattcaactagggactgttttgtgtcatcaaaggtggaccaagttaccacaatatcataaatattatttccataggcgatatggatttgttccggctgataatagtaaactgataaagatacctgtataaaactaaaacaaaagaatattttcccccacattttgctcaaaactaatgttagtatattaggaataaaataaaaccacaaatttcttcatagaaatacactcaatctcaactcaaccaataaaatcttcggtactgggctactggtctggag

SEQ ID NO: 712 - DNA, 4857 bp, Diabrotica virgifera
  SmartBlast Evalue=1E-165; Info=Iron/zinc purple acid phosphatase-like protein n=1 Tax=Camponotus floridanus RepID= E2AEF0_9HYME
ttttaatttcgtggatgtttataattaatttcataagaggtaacttcatgtgactatcctatatgactaacttaaaaactatatatttactgtctaaaaatccaattggtatcacattattttaaataagtattatataataaattatatatatattatataatattatataataatatataataaatttatcaatctcgttagttttcagtaattcaataaaaactctgaaatttaattaacgtaactgataataaagcaaaataaaatcacaacaaaataaaatttcttttctggggaagatgcttcctcgcaaaaggataccagcctttaatattatgtgtaatccccattccacgaatatacgaccctcctggatcatcgcgacaacgaacattttactgtgcaaaatatgaagaacgaaagtaaattgcaaattatattgttgtttattggagtaattattatagcaaagtactttcgtactttttatgttgcacactaaaatattcgttgtcgcgacaatccaaaacagtctcatattcgtggaatacaccgtatagatactaaagcaaaagaaaaaagggaaaggaacttggaactgagagcttttgagtagcttaacctggttagtaggagctacataaaaataaactgtctgtctaatacggattcaagaattatgacaaattatgattttcgtctttttcaagtgtcttgcattttcttatgataactaaattatcttaattttctattgcatgtaagtatactgttctcaagctatttccttgtggcatcttatggttcgtacagtataaataccgttgcgcgtcatagtaggtaacgtcacacgacaccaacacaaaatatttaagtcgtaggtctgttccttttagaatcgtttagccaagtacactggaattacagccactaggcatattttattacatgaggcgctcagagcaacagtggcctaaccccaaaaacgaagtttcgaaataaatgctctgcattcgtatttccattgtgcttatgggatggcgctacaatttacgtagtgccatttagccaaatatagaggtaggttttgtagacccttattaatctgaagatttagggctagttgttcgaacgctaattagaaatggaatgcactgatcattatcaaatatttcattacaattatatttgattaagcgtacttctgacagatgtcacattttgaggttatgttgacattgttgactgatttattttattattttggttttaatctaaaataaaccataattaaactctttctgatgttaatttattgtttttacttacaaatcaataacaatagtaagcaatttttaataatttaacgactgcggctatattttaattactgctttacctacaatcaatgaatgattagtgttttacatgtatttttgatgtctcgatttgattcccatcaagaaaattgattacaataaactgattgattataatcaacttcttgattagcgttcgaacaaccggcccttaatgttgctgcccttattgatatattaatctaaaaattctcaatttgtggcttaggccactgttgctctaagcgcctcatataggcgtaaatataatatttgaagatttctattaatgtaaacttaaagaaatgcaccataacttgtttcatttaatctgtataagtggattacgaagcatatttgtccggatcacaactgtgatcgagcgaaggtgatattttggcataaattggtaacacttatttgacagttgcggtgttgacacttcatatttgtttttattatctactttattgaatattttatacagtgatgagcgcgctaataaccgacaaaatagcacaaaagatcacggaagcccatataaaaattttcagggggtggggcagacgtgaagatgttgcacattatattttgtgttctttggataaccatatatagttaacagcacccgaaaagccaggggggcacggtttgttttgttgtatgcacacttctgaaataattatatattatgatgtatttgatttaaaatgaattcagaatttttttttgtaatttggcaactatgtcaacttagatctctgacgtagataatgacgtgtaacggtatttatactgtaccaaccatatgtaatttactattttatcttggaataaaatagtaaagtatattgttaacgtaaaattttgcaatattatattattttgattaatagaatgatgtattcagcaataacctcacgttttttagctatgctctatctataacaacttctgaatttattattaaagtctagatggcaataaaattgtatttttgatagacttttaattttaaattacaatttaactactttatacaaaatttacttttctaagggccggtttttcagtgctgggttaatcgatttattttttggtcaccgaaatattcatgtttaatcagtttttcagtactagattagagcttaaactcgtttaagttaaccacgattttaaccgatcctcgttagatggtttaactccgaattttgtggttacgcttgcgcattggtgcagtgaatgcatcatgtttattttttgagtacctgccaacctgtctgagagaagggattagttgggttatgttattttcttttatcgcgggaagtattctaatacctccttactattataaggaaattattattattgaaattataaatttttatcgttattatataggaaggaattataaggaaatatatttaaatataactgtaacaggtacctacgtttacacttactgtaacaggatttaatgcattattcctagtaatatttttaaaaagattattttatatttgtctacacagcaaaatacttaattatttaccaaacagtccgacttcttaattgctggtcaatctgttcaaatagtgataagaccgtggtctttgacaaacaaaaccggaaaaaaagtctaaatcgtcccagtaattcgaattattttctgttatgaaaccgagttagacgttatgaactaaacaaagattccgaacttgatattgcattgcattaatcattttttaaatttggttatgaagttgttttttatttatttttctgtcaaattatcattatttctcgaattgtacatgcgctcgtacagttactgctgccaacagaagaaaaaaagtggttagctaaccgagattttcttaacttgatttagagcactgaaaaacgctatgagggttaaaatattggttaaaatttaaactaggttagctaaccaaaattttaaccgctcactgaaaaaccgggcctaaatgtcatgtaaatctttgattttatttagaattatatatactatcacggttcatcgattttaatctcatactgtcaactttcgcccaatccatttttgagtgcgggtataatccgtgtttatccttgactatccagaaggcatcgatcacttccccgcttttatcatcagaaacctgctctagatgcatgtgtgatgaattgtaaaccttgagacggctatatccgtagtcgctacttctgaacgctgaccattcgggtaggtctttaacaaaactgtctgtgccttcatcgcagccggccgagccagtggtgaactgtacaggagcccctggatttacgtaaggctgctcgtagctcccattgtaaacggtgtaattataaacaggccacagcctttcataagaatgctcatgggcccatatagctaaatcgactccataattgtaaagcaagttttccaatccgaagaattgtaagaaaggcaatcctactcttgttatggtttcgtgatgtgtacagtcatcatgatcagtgttggaacagtacatagggcgatgacccatcactataatccatggttgcttttctctgttttcgggtaaattcgccgttgccaagtcttgttccagccactcgtattggaatacgagaggtttaatgccgtagtccaggaaataataaacctctgtagatatagagataatatgcatcggaccaatgttaatgctgtacatgggtgaatttagaccaccaggcatcgagaatctgtatcgatagttactaaaattgtaagcctcttcatgatttccaggcaagtcatatacggaacgtatgctgcaaccggttctatttgtctcataaattcatcaccaatgagagcattgtctgagtccatatcatatgcaaaatctccaacgtgtagaatggcatcatacaaccctctctgagtttcttcttgtagtctagttaaagatttagcattatcattacccatgtctccataaacagctaaatgtggctgccagtctggcgaatttggagccgttttgaaggtaaatatatttgaccatcccaagtcactcccacaatgatacagatatgtacttcctggtgttaagttctttaggacaacagaatgaatgtgttgtgatctctgctctttacccccatctacaaataatgacgacgtcccattagctgtaagaactaaacctcctatgccatattcaactagggactgttttgtgtcatcaaaggtggaccaagttaccacaatatcataaatattatttccataggcgatatggatttgttccggctgataatagtaaactgataaagatacctgtataaaactaaaacaaaagaatattttcccccacattttgctcaaaactaatgttagtatattaggaataaaataaaaccacaaatttcttcatagaaatacactcaatctcaactcaaccaataaaatcttcggtactgggctactggtctggag

SEQ ID NO: 713 - DNA, 4814 bp, Diabrotica virgifera
  SmartBlast Evalue=1E-165; Info=Iron/zinc purple acid phosphatase-like protein n=1 Tax=Camponotus floridanus RepID= E2AEF0_9HYME
ttttaatttcgtggatgtttataattaatttcataagaggtaacttcatgtgactatcctatatgactaacttaaaaactatatatttactgtctaaaaatccaattggtatcacattattttaaataagtattatataataaatttatcaatctcgttagttttcagtaattcaataaaaactctgaaatttaattaacgtaactgataataaagcaaaataaaatcacaacaaaataaaatttcttttctggggaagatgcttcctcgcaaaaggataccagcctttaatattatgtgtaatccccattccacgaatatacgaccctcctggatcatcgcgacaacgaacattttactgtgcaaaatatgaagaacgaaagtaaattgcaaattatattgttgtttattggagtaattattatagcaaagtactttcgtactttttatgttgcacactaaaatattcgttgtcgcgacaatccaaaacagtctcatattcgtggaatacaccgtatagatactaaagcaaaagaaaaaagggaaaggaacttggaactgagagcttttgagtagcttaacctggttagtaggagctacataaaaataaactgtctgtctaatacggattcaagaattatgacaaattatgattttcgtctttttcaagtgtcttgcattttcttatgataactaaattatcttaattttctattgcatgtaagtatactgttctcaagctatttccttgtggcatcttatggttcgtacagtataaataccgttgcgcgtcatagtaggtaacgtcacacgacaccaacacaaaatatttaagtcgtaggtctgttccttttagaatcgtttagccaagtacactggaattacagccactaggcatattttattacatgaggcgctcagagcaacagtggcctaaccccaaaaacgaagtttcgaaataaatgctctgcattcgtatttccattgtgcttatgggatggcgctacaatttacgtagtgccatttagccaaatatagaggtaggttttgtagacccttattaatctgaagatttagggctagttgttcgaacgctaattagaaatggaatgcactgatcattatcaaatatttcattacaattatatttgattaagcgtacttctgacagatgtcacattttgaggttatgttgacattgttgactgatttattttattattttggttttaatctaaaataaaccataattaaactctttctgatgttaatttattgtttttacttacaaatcaataacaatagtaagcaatttttaataatttaacgactgcggctatattttaattactgctttacctacaatcaatgaatgattagtgttttacatgtatttttgatgtctcgatttgattcccatcaagaaaattgattacaataaactgattgattataatcaacttcttgattagcgttcgaacaaccggcccttaatgttgctgcccttattgatatattaatctaaaaattctcaatttgtggcttaggccactgttgctctaagcgcctcatataggcgtaaatataatatttgaagatttctattaatgtaaacttaaagaaatgcaccataacttgtttcatttaatctgtataagtggattacgaagcatatttgtccggatcacaactgtgatcgagcgaaggtgatattttggcataaattggtaacacttatttgacagttgcggtgttgacacttcatatttgtttttattatctactttattgaatattttatacagtgatgagcgcgctaataaccgacaaaatagcacaaaagatcacggaagcccatataaaaattttcagggggtggggcagacgtgaagatgttgcacattatattttgtgttctttggataaccatatatagttaacagcacccgaaaagccaggggggcacggtttgttttgttgtatgcacacttctgaaataattatatattatgatgtatttgatttaaaatgaattcagaatttttttttgtaatttggcaactatgtcaacttagatctctgacgtagataatgacgtgtaacggtatttatactgtaccaaccatatgtaatttactattttatcttggaataaaatagtaaagtatattgttaacgtaaaattttgcaatattatattattttgattaatagaatgatgtattcagcaataacctcacgttttttagctatgctctatctataacaacttctgaatttattattaaagtctagatggcaataaaattgtatttttgatagacttttaattttaaattacaatttaactactttatacaaaatttacttttctaagggccggtttttcagtgctgggttaatcgatttattttttggtcaccgaaatattcatgtttaatcagtttttcagtactagattagagcttaaactcgtttaagttaaccacgattttaaccgatcctcgttagatggtttaactccgaattttgtggttacgcttgcgcattggtgcagtgaatgcatcatgtttattttttgagtacctgccaacctgtctgagagaagggattagttgggttatgttattttcttttatcgcgggaagtattctaatacctccttactattataaggaaattattattattgaaattataaatttttatcgttattatataggaaggaattataaggaaatatatttaaatataactgtaacaggtacctacgtttacacttactgtaacaggatttaatgcattattcctagtaatatttttaaaaagattattttatatttgtctacacagcaaaatacttaattatttaccaaacagtccgacttcttaattgctggtcaatctgttcaaatagtgataagaccgtggtctttgacaaacaaaaccggaaaaaaagtctaaatcgtcccagtaattcgaattattttctgttatgaaaccgagttagacgttatgaactaaacaaagattccgaacttgatattgcattgcattaatcattttttaaatttggttatgaagttgttttttatttatttttctgtcaaattatcattatttctcgaattgtacatgcgctcgtacagttactgctgccaacagaagaaaaaaagtggttagctaaccgagattttcttaacttgatttagagcactgaaaaacgctatgagggttaaaatattggttaaaatttaaactaggttagctaaccaaaattttaaccgctcactgaaaaaccgggcctaaatgtcatgtaaatctttgattttatttagaattatatatactatcacggttcatcgattttaatctcatactgtcaactttcgcccaatccatttttgagtgcgggtataatccgtgtttatccttgactatccagaaggcatcgatcacttccccgcttttatcatcagaaacctgctctagatgcatgtgtgatgaattgtaaaccttgagacggctatatccgtagtcgctacttctgaacgctgaccattcgggtaggtctttaacaaaactgtctgtgccttcatcgcagccggccgagccagtggtgaactgtacaggagcccctggatttacgtaaggctgctcgtagctcccattgtaaacggtgtaattataaacaggccacagcctttcataagaatgctcatgggcccatatagctaaatcgactccataattgtaaagcaagttttccaatccgaagaattgtaagaaaggcaatcctactcttgttatggtttcgtgatgtgtacagtcatcatgatcagtgttggaacagtacatagggcgatgacccatcactataatccatggttgcttttctctgttttcgggtaaattcgccgttgccaagtcttgttccagccactcgtattggaatacgagaggtttaatgccgtagtccaggaaataataaacctctgtagatatagagataatatgcatcggaccaatgttaatgctgtacatgggtgaatttagaccaccaggcatcgagaatctgtatcgatagttactaaaattgtaagcctcttcatgatttccaggcaagtcatatacggaacgtatgctgcaaccggttctatttgtctcataaattcatcaccaatgagagcattgtctgagtccatatcatatgcaaaatctccaacgtgtagaatggcatcatacaaccctctctgagtttcttcttgtagtctagttaaagatttagcattatcattacccatgtctccataaacagctaaatgtggctgccagtctggcgaatttggagccgttttgaaggtaaatatatttgaccatcccaagtcactcccacaatgatacagatatgtacttcctggtgttaagttctttaggacaacagaatgaatgtgttgtgatctctgctctttacccccatctacaaataatgacgacgtcccattagctgtaagaactaaacctcctatgccatattcaactagggactgttttgtgtcatcaaaggtggaccaagttaccacaatatcataaatattatttccataggcgatatggatttgttccggctgataatagtaaactgataaagatacctgtataaaactaaaacaaaagaatattttcccccacattttgctcaaaactaatgttagtatattaggaataaaataaaaccacaaatttcttcatagaaatacactcaatctcaactcaaccaataaaatcttcggtactgggctactggtctggag

SEQ ID NO: 714 - DNA, 3912 bp, Diabrotica virgifera
  SmartBlast Evalue=1E-165; Info=Iron/zinc purple acid phosphatase-like protein n=1 Tax=Camponotus floridanus RepID= E2AEF0_9HYME
tctatccttagaaaaattcgaaatcatcagatttaagggccggttgttcgaacgctaatcaaaactgatcattatcaaatatttaattacaattatatttgattaagcgtacttctgacagatgtcgcattttgaggttatgttgactgatttattttattattttggttttaatttaaaataaaacataattaaactctttctgatgttaatttattgtttttacttacaaatcaataacaatagtaagcaatttttaataatttaacgactgcggctatattttaattactgctttacctacaatcaatgaatgattagtgttttacatgtatttttgatgtctcgatttgattcccatcaagaaaattgattacaataaactgattgattataatcaacttcttgattagcgttcgaacaaccggcccttaatgttgctgcccttattgatatattaatctaaaaattctcaatttgtggcttaggccactgttgctctaagcgcctcatataggcgtaaatataatatttgaagatttctattaatgtaaacttaaagaaatgcaccataacttgtttcatttaatctgtataagtggattacgaagcatatttgtccggatcacaactgtgatcgagcgaaggtgatattttggcataaattggtaacacttatttgacagttgcggtgttgacacttcatatttgtttttattatctactttattgaatattttatacagtgatgagcgcgctaataaccgacaaaatagcacaaaagatcacggaagcccatataaaaattttcagggggtggggcagacgtgaagatgttgcacattatattttgtgttctttggataaccatatatagttaacagcacccgaaaagccaggggggcacggtttgttttgttgtatgcacacttctgaaataattatatattatgatgtatttgatttaaaatgaattcagaatttttttttgtaatttggcaactatgtcaacttagatctctgacgtagataatgacgtgtaacggtatttatactgtaccaaccatatgtaatttactattttatcttggaataaaaccacaattatttaagattaaaattaggtaaatttatttgacgtttcgacttccacttcggaaatcgttgtattttgatttcgatttccgaagtggacgtcgaaacgtcaaataaatttaattttaaacttaaattgtggttttattctcaaataaaatagtaaagtatattgttaacgtaaaattttgcaatattatattattttgattaatagaatgatgtattcagcaataacctcacgttttttagctatgctctatctataacaacttctgaatttattattaaagtctagatggcaataaaattgtatttttgatagacttttaattttaaattacaatttaactactttatacaaaatttacttttctaagggccggtttttcagtgctgggttaatcgatttattttttggtcaccgaaatattcatgtttaatcagtttttcagtactagattagagcttaaactcgtttaagttaaccacgattttaaccgatcctcgttagatggtttaactccgaattttgtggttacgcttgcgcattggtgcagtgaatgcatcatgtttattttttgagtacctgccaacctgtctgagagaagggattagttgggttatgttattttcttttatcgcgggaagtattctaatacctccttactattataaggaaattattattattgaaattataaatttttatcgttattatataggaaggaattataaggaaatatatttaaatataactgtaacaggtacctacgtttacacttactgtaacaggatttaatgcattattcctagtaatatttttaaaaagattattttatatttgtctacacagcaaaatacttaattatttaccaaacagtccgacttcttaattgctggtcaatctgttcaaatagtgataagaccgtggtctttgacaaacaaaaccggaaaaaaagtctaaatcgtcccagtaattcgaattattttctgttatgaaaccgagttagacgttatgaactaaacaaagattccgaacttgatattgcattgcattaatcattttttaaatttggttatgaagttgttttttatttatttttctgtcaaattatcattatttctcgaattgtacatgcgctcgtacagttactgctgccaacagaagaaaaaaagtggttagctaaccgagattttcttaacttgatttagagcactgaaaaacgctatgagggttaaaatattggttaaaatttaaactaggttagctaaccaaaattttaaccgctcactgaaaaaccgggcctaaatgtcatgtaaatctttgattttatttagaattatatatactatcacggttcatcgattttaatctcatactgtcaactttcgcccaatccatttttgagtgcgggtataatccgtgtttatccttgactatccagaaggcatcgatcacttccccgcttttatcatcagaaacctgctctagatgcatgtgtgatgaattgtaaaccttgagacggctatatccgtagtcgctacttctgaacgctgaccattcgggtaggtctttaacaaaactgtctgtgccttcatcgcagccggccgagccagtggtgaactgtacaggagcccctggatttacgtaaggctgctcgtagctcccattgtaaacggtgtaattataaacaggccacagcctttcataagaatgctcatgggcccatatagctaaatcgactccataattgtaaagcaagttttccaatccgaagaattgtaagaaaggcaatcctactcttgttatggtttcgtgatgtgtacagtcatcatgatcagtgttggaacagtacatagggcgatgacccatcactataatccatggttgcttttctctgttttcgggtaaattcgccgttgccaagtcttgttccagccactcgtattggaatacgagaggtttaatgccgtagtccaggaaataataaacctctgtagatatagagataatatgcatcggaccaatgttaatgctgtacatgggtgaatttagaccaccaggcatcgagaatctgtatcgatagttactaaaattgtaagcctcttcatgatttccaggcaagtcatatacggaacgtatgctgcaaccggttctatttgtctcataaattcatcaccaatgagagcattgtctgagtccatatcatatgcaaaatctccaacgtgtagaatggcatcatacaaccctctctgagtttcttcttgtagtctagttaaagatttagcattatcattacccatgtctccataaacagctaaatgtggctgccagtctggcgaatttggagccgttttgaaggtaaatatatttgaccatcccaagtcactcccacaatgatacagatatgtacttcctggtgttaagttctttaggacaacagaatgaatgtgttgtgatctctgctctttacccccatctacaaataatgacgacgtcccattagctgtaagaactaaacctcctatgccatattcaactagggactgttttgtgtcatcaaaggtggaccaagttaccacaatatcataaatattatttccataggcgatatggatttgttccggctgataatagtaaactgataaagatacctgtataaaactaaaacaaaagaatattttcccccacattttgctcaaaactaatgttagtatattaggaataaaataaaaccacaaatttcttcatagaaatacactcaatctcaactcaaccaataaaatcttcggtactgggctactggtctggag

SEQ ID NO: 715 - DNA, 8009 bp, Diabrotica virgifera
  SmartBlast Evalue=1E-165; Info=Iron/zinc purple acid phosphatase-like protein n=1 Tax=Camponotus floridanus RepID= E2AEF0_9HYME
ttttaatttcgtggatgtttataattaatttcataagaggtaacttcatgtgactatcctatatgactaacttaaaaactatatatttactgtctaaaaatccaattggtatcacattattttaaataagtattatataataaattatatatatattatataatattatataataatatataataaatttatcaatctcgttagttttcagtaattcaataaaaactctgaaatttaattaacgtaactgataataaagcaaaataaaatcacaacaaaataaaatttcttttctggggaagatgcttcctcgcaaaaggataccagcctttaatattatgtgtaatccccattccacgaatatacgaccctcctggatcatcgcgacaacgaacattttactgtgaaaaatatgaagaacgaaagtaaattgcaaattatattgttgtttattggagtaattattatagcaaagtactttcgtacttcttatgttgcacactaaaatattcgttgtcgcgacaatccaaaacagtctcatattcgtggaatacaccgtatagatactaaagcaaaagaaaaaagagaaaggaacttggaactgagagcttttgagtagcttaacctggttagtaggagctacataaaaataaactgtctgtctaatacggattcaagaattatgacaaattatgattttcgtctttttcaagtgtcttgcattttcttatgataactaaattatcttaattttctattgcatgtaagtatactgttctcaagctatttccttgtggcatcttatggttcgtacagtataaataccgttgcgcgtcatagtaggtaacgtcacacgacaccaacacaaaatatttaagtcgtaggtctgttccttttagaatcgtttagccaagtacactggaattacagccactaggcatattttattacatgaggcgctcagagcaacagtggcctaaccccaaaaacgaagtttcgaaataaatgctctgcattcgtatttccattgtgcttatgggatggcgctacaatttacgtagtgccatttagccaaatatagaggtaggttttgtagacccttattaatctgaagatttagggctagttgttcgaacgctaattagaaatggaatgcactgatcattatcaaatatttcattacaattatatttgattaagcgtacttctgacagatgtcacattttgaggttatgttgacattgttgactgatttattttattattttggttttaatctaaaataaaccataattaaactctttctgatgttaatttattgtttttacttacaaatcaataacaatagtaagcaatttttaataatttaacgactgcggctatattttaattactgctttacctacaatcaatgaatgattagtgttttacatgtatttttgatgtctcgatttgattcccatcaagaaaattgattacaataaactgattgattataatcaacttcttgattagcgttcgaacaaccggcccttaatgttgctgcccttattgatatattaatctaaaaattctcaatttgtggcttaggccactgttgctctaagcgcctcatataggcgtaaatataatatttgaagatttctattaatgtaaacttataggccttgggcccgcatatacaactattattcatgaccacaccgctgaaaccccttgtacttgccatctgggcggagtcggacaaatcctgagcttggcgcaccatggcagtggggcgcttgtccgtcaagcggtgacgaagttgtcaaccccatgcaagaaaaaaattgatcaccacattggtcattctatcccaatcaatagtttccatcatataaacaacgaaaacaatttgtcggacaaaaatactggggcatatgacgcgtcggacacgccaaatatgtcaaattcatgaaaataacaaacaccaccacatggataattttaacggtatctaccataaaacatttttacaacaatgtggcaaccttgtcggacaactttcacggggcacatgcgcagtcggacgcgccgaagatgtcaatttcctgaaatttccctatttacaaccatttttccgacaacattagtaggttataagtaattatattcttaatcaaaaaatcaaagtgtcggacaaaaatattggggcaactcgacagtcggacaaaaaatttaatttttattagtaaagtatactttcaaattatgctgggttcgtgtatcccttatctttacaaccatttttccgacaaaagtagtaggttacaagtaattatattcttaaacaaaaaatataattgtctgacaaaaatgttggggcaaacgaacagaaaacttaattcttttaggctatcgacgaggaggtattatcaaaaaaaaaaatttaaaacagtgtttctcggttacttttgaatcgatttagctgaaaattggtacacacactaagtaaagcatttaaaagggtctgacgtagatcggaacccaaaattttcttaaaaaattttccgacaagagggaaaattttagaaaaattgtgatccgataatttgtgtacatactccttgaacaacgacaaacatcgttctgtatttttttctcgaattaaaaaaaaaattcagcacatgtatcaggttataagtagttatattccaaatcaaaaaatctaagtgtccgacaaaaatattggggcaaatccaaagtcagacaaaaaatttaatttttattgataaactatacttttaaattatgctgggttcgtgtatcccttatctttacaaccattttccgacaaaggtagttagttacaagtaattatatccttaaacaaaaaatgtaattgtttgacaaaaatcttggggcaaacgaagagaaaacttaattcttttaggctatcgacgagaaagtaatatcaaaaaattttaaaagagttttctcggttatttttgaatcgatttagctcaaaattggtacacacgctaagtaaaacatttaaaagggtatgacgtagagctgaaaattttagaaaaattgtgatctgatatttgcttacatactgcttgaacaacgacaaacatcgttctgtagttttttttttccaattaaaaaaaaatttccgacacaagtatcaggttataagtagttatattctaaatcaaaaaatctaatatttatattcaccatttaatgaatttaatattcaccattggcgcgcatacgggtaatatgagccgaaaaatacgtaatttaatatgaagtcaaaaatgtataaaaattaatttttttttaaattgtaccaaaacgccccattatttttgtccgacaagtgatccaatatgcattacacatgtaaaaaaacagtacaaaataaaaataacatctgtggtaataaataaaaaattttcaggaaattgacatcttcggcgcgtccgactgcgcatatgccccgtgaaaattgtccgacaaggttaccacattattgtaaaaaggttttatggtagataccgttaaaattatccatgtggtaataaatttattattttcataaattttaagttattttttgggtgtaactacaatgatattatgctaaaaatgatggtgtatcgcatatttaaaatgcgtttatctcgaaaacggttgagtttaggaagatgaaagaagtataccttttttaagtaaaactaataggaaaataaaaattttaatgtcaaaattatacagagtgagggataaaaaaattaaacgtaataaataagtgctgaaaggcatatgtggcgccctctgggcaatgcataatttttggtaaggaatttagatttctcgactcaagaaacctccagatataaaatttcatgttgttatctcatacctatcaggaaatattcaataataaataaaaaaaaagtttaactttgacaccctgtatctcggctattataaactttgtactaaggtaagttagcttaaatcggcctattttaacctcaggaacctgaggttaagctatggcccattctttaccaaacaccctgtatgcataaaaattactttttcttttaattgtaccaaaacgccccattatttttgtccgacaagtgatccaatatgcattacacatgtaaaagaacagtacaaaataaaaatgacatctgtggtaataaataaaaaattttcaggaaattgacatcttcggcgcgtccgactgcgcatatgccccgcgaaaattgtccgacaaggccaccacaccattgtaaaaaggccccatgatagataccgtcaaaattatcgatgtggcaacaaatttatcattttcacaaatttgacatacttcagcgcgtccgacgcgtcatacgccccaacacttttgtccgacaaaattgttttcgccgtttatatgataaaatccattgattacaatagaatgaccaatgtggtaataaattcccttcttgcataaaattgacaacttcgtcaccgcttgacagacaaacgccccaccaccacaatgcgccaagctcaaaatttgtccgactccacccaaataacaagtacaaaaagtttcaacggtgtggtcacaaataataattgtatatgcgggcccaaggcctattaaagaaatgcaccataacttgtttcatttaatctgtataagtggattacgaagcatatttgtccggatcacaactgtgatcgagcgaaggtgatattttggcataaattggtaacacttatttgacagttgcggtgttgacacttcatatttgtttttattatctactttattgaatattttatacagtgatgagcgcgctaataaccgacaaaatagcacaaaagatcacggaagcccatataaaaattttcagggggtggggcagacgtgaagatgttgcacattatattttgtgttctttggataaccatatatagttaacagcacccgaaaagccaggggggcacggtttgttttgttgtatgcacacttctgaaataattatatattatgatgtatttgatttaaaatgaattcagaatttttttttgtaatttggcaactatgtcaacttagatctctgacgtagataatgacgtgtaacggtatttatactgtaccaaccatatgtaatttactattttatcttggaataaaaccacaattatttaagattaaaattaggtaaatttatttgacgtttcgacttccacttcggaaatcgttgtattttgatttcgatttccgaagtggacgtcgaaacgtcaaataaatttaattttaaacttaaattgtggttttattctcaaataaaatagtaaagtatattgttaacgtaaaattttgcaatattatattattttgattaatagaatgatgtattcagcaataacctcacgttttttagctatgctctatctataacaacttctgaatttattattaaagtctagatggcaataaaattgtatttttgatagacttttaattttaaattacaatttaactactttatacaaaatttacttttctaagggccggtttttcagtgctgggttaatcgatttattttttggtcaccgaaatattcatgtttaatcagtttttcagtactagattagagcttaaactcgtttaagttaaccacgattttaaccgatcctcgttagatggtttaactccgaattttgtggttacgcttgcgcattggtgcagtgaatgcatcatgtttattttttgagtacctgccaacctgtctgagagaagggattagttgggttatgttattttcttttatcgcgggaagtattctaatacctccttactattataaggaaattattattattgaaattataaatttttatcgttattatataggaaggaattataaggaaatatatttaaatataactgtaacaggtacctacgtttacacttactgtaacaggatttaatgcattattcctagtaatatttttaaaaagattattttatatttgtctacacagcaaaatacttaattatttaccaaacagtccgacttcttaattgctggtcaatctgttcaaatagtgataagaccgtggtctttgacaaacaaaaccggaaaaaaagtctaaatcgtcccagtaattcgaattattttctgttatgaaaccgagttagacgttatgaactaaacaaagattccgaacttgatattgcattgcattaatcattttttaaatttggttatgaagttgttttttatttatttttctgtcaaattatcattatttctcgaattgtacatgcgctcgtacagttactgctgccaacagaagaaaaaaagtggttagctaaccgagattttcttaacttgatttagagcactgaaaaacgctatgagggttaaaatattggttaaaatttaaactaggttagctaaccaaaattttaaccgctcactgaaaaaccgggcctaaatgtcatgtaaatctttgattttatttagaattatatatactatcacggttcatcgattttaatctcatactgtcaactttcgcccaatccatttttgagtgcgggtataatccgtgtttatccttgactatccagaaggcatcgatcacttccccgcttttatcatcagaaacctgctctagatgcatgtgtgatgaattgtaaaccttgagacggctatatccgtagtcgctacttctgaacgctgaccattcgggtaggtctttaacaaaactgtctgtgccttcatcgcagccggccgagccagtggtgaactgtacaggagcccctggatttacgtaaggctgctcgtagctcccattgtaaacggtgtaattataaacaggccacagcctttcataagaatgctcatgggcccatatagctaaatcgactccataattgtaaagcaagttttccaatccgaagaattgtaagaaaggcaatcctactcttgttatggtttcgtgatgtgtacagtcatcatgatcagtgttggaacagtacatagggcgatgacccatcactataatccatggttgcttttctctgttttcgggtaaattcgccgttgccaagtcttgttccagccactcgtattggaatacgagaggtttaatgccgtagtccaggaaataataaacctctgtagatatagagataatatgcatcggaccaatgttaatgctgtacatgggtgaatttagaccaccaggcatcgagaatctgtatcgatagttactaaaattgtaagcctcttcatgatttccaggcaagtcatatacggaacgtatgctgcaaccggttctatttgtctcataaattcatcaccaatgagagcattgtctgagtccatatcatatgcaaaatctccaacgtgtagaatggcatcatacaaccctctctgagtttcttcttgtagtctagttaaagatttagcattatcattacccatgtctccataaacagctaaatgtggctgccagtctggcgaatttggagccgttttgaaggtaaatatatttgaccatcccaagtcactcccacaatgatacagatatgtacttcctggtgttaagttctttaggacaacagaatgaatgtgttgtgatctctgctctttacccccatctacaaataatgacgacgtcccattagctgtaagaactaaacctcctatgccatattcaactagggactgttttgtgtcatcaaaggtggaccaagttaccacaatatcataaatattatttccataggcgatatggatttgttccggctgataatagtaaactgataaagatacctgtataaaactaaaacaaaagaatattttcccccacattttgctcaaaactaatgttagtatattaggaataaaataaaaccacaaatttcttcatagaaatacactcaatctcaactcaaccaataaaatcttcggtactgggctactggtctggag

SEQ ID NO: 716 - DNA, 3755 bp, Diabrotica virgifera
  SmartBlast Evalue=1E-165; Info=Iron/zinc purple acid phosphatase-like protein n=1 Tax=Camponotus floridanus RepID= E2AEF0_9HYME
tctatccttagaaaaattcgaaatcatcagatttaagggccggttgttcgaacgctaatcaaaactgatcattatcaaatatttaattacaattatatttgattaagcgtacttctgacagatgtcgcattttgaggttatgttgactgatttattttattattttggttttaatttaaaataaaacataattaaactctttctgatgttaatttattgtttttacttacaaatcaataacaatagtaagcaatttttaataatttaacgactgcggctatattttaattactgctttacctacaatcaatgaatgattagtgttttacatgtatttttgatgtctcgatttgattcccatcaagaaaattgattacaataaactgattgattataatcaacttcttgattagcgttcgaacaaccggcccttaatgttgctgcccttattgatatattaatctaaaaattctcaatttgtggcttaggccactgttgctctaagcgcctcatataggcgtaaatataatatttgaagatttctattaatgtaaacttaaagaaatgcaccataacttgtttcatttaatctgtataagtggattacgaagcatatttgtccggatcacaactgtgatcgagcgaaggtgatattttggcataaattggtaacacttatttgacagttgcggtgttgacacttcatatttgtttttattatctactttattgaatattttatacagtgatgagcgcgctaataaccgacaaaatagcacaaaagatcacggaagcccatataaaaattttcagggggtggggcagacgtgaagatgttgcacattatattttgtgttctttggataaccatatatagttaacagcacccgaaaagccaggggggcacggtttgttttgttgtatgcacacttctgaaataattatatattatgatgtatttgatttaaaatgaattcagaatttttttttgtaatttggcaactatgtcaacttagatctctgacgtagataatgacgtgtaacggtatttatactgtaccaaccatatgtaatttactattttatcttggaataaaatagtaaagtatattgttaacgtaaaattttgcaatattatattattttgattaatagaatgatgtattcagcaataacctcacgttttttagctatgctctatctataacaacttctgaatttattattaaagtctagatggcaataaaattgtatttttgatagacttttaattttaaattacaatttaactactttatacaaaatttacttttctaagggccggtttttcagtgctgggttaatcgatttattttttggtcaccgaaatattcatgtttaatcagtttttcagtactagattagagcttaaactcgtttaagttaaccacgattttaaccgatcctcgttagatggtttaactccgaattttgtggttacgcttgcgcattggtgcagtgaatgcatcatgtttattttttgagtacctgccaacctgtctgagagaagggattagttgggttatgttattttcttttatcgcgggaagtattctaatacctccttactattataaggaaattattattattgaaattataaatttttatcgttattatataggaaggaattataaggaaatatatttaaatataactgtaacaggtacctacgtttacacttactgtaacaggatttaatgcattattcctagtaatatttttaaaaagattattttatatttgtctacacagcaaaatacttaattatttaccaaacagtccgacttcttaattgctggtcaatctgttcaaatagtgataagaccgtggtctttgacaaacaaaaccggaaaaaaagtctaaatcgtcccagtaattcgaattattttctgttatgaaaccgagttagacgttatgaactaaacaaagattccgaacttgatattgcattgcattaatcattttttaaatttggttatgaagttgttttttatttatttttctgtcaaattatcattatttctcgaattgtacatgcgctcgtacagttactgctgccaacagaagaaaaaaagtggttagctaaccgagattttcttaacttgatttagagcactgaaaaacgctatgagggttaaaatattggttaaaatttaaactaggttagctaaccaaaattttaaccgctcactgaaaaaccgggcctaaatgtcatgtaaatctttgattttatttagaattatatatactatcacggttcatcgattttaatctcatactgtcaactttcgcccaatccatttttgagtgcgggtataatccgtgtttatccttgactatccagaaggcatcgatcacttccccgcttttatcatcagaaacctgctctagatgcatgtgtgatgaattgtaaaccttgagacggctatatccgtagtcgctacttctgaacgctgaccattcgggtaggtctttaacaaaactgtctgtgccttcatcgcagccggccgagccagtggtgaactgtacaggagcccctggatttacgtaaggctgctcgtagctcccattgtaaacggtgtaattataaacaggccacagcctttcataagaatgctcatgggcccatatagctaaatcgactccataattgtaaagcaagttttccaatccgaagaattgtaagaaaggcaatcctactcttgttatggtttcgtgatgtgtacagtcatcatgatcagtgttggaacagtacatagggcgatgacccatcactataatccatggttgcttttctctgttttcgggtaaattcgccgttgccaagtcttgttccagccactcgtattggaatacgagaggtttaatgccgtagtccaggaaataataaacctctgtagatatagagataatatgcatcggaccaatgttaatgctgtacatgggtgaatttagaccaccaggcatcgagaatctgtatcgatagttactaaaattgtaagcctcttcatgatttccaggcaagtcatatacggaacgtatgctgcaaccggttctatttgtctcataaattcatcaccaatgagagcattgtctgagtccatatcatatgcaaaatctccaacgtgtagaatggcatcatacaaccctctctgagtttcttcttgtagtctagttaaagatttagcattatcattacccatgtctccataaacagctaaatgtggctgccagtctggcgaatttggagccgttttgaaggtaaatatatttgaccatcccaagtcactcccacaatgatacagatatgtacttcctggtgttaagttctttaggacaacagaatgaatgtgttgtgatctctgctctttacccccatctacaaataatgacgacgtcccattagctgtaagaactaaacctcctatgccatattcaactagggactgttttgtgtcatcaaaggtggaccaagttaccacaatatcataaatattatttccataggcgatatggatttgttccggctgataatagtaaactgataaagatacctgtataaaactaaaacaaaagaatattttcccccacattttgctcaaaactaatgttagtatattaggaataaaataaaaccacaaatttcttcatagaaatacactcaatctcaactcaaccaataaaatcttcggtactgggctactggtctggag

SEQ ID NO: 717 - DNA, 801 bp, Diabrotica virgifera
tttgaacaaccggcccttagtcttttagtttatgatagttaatacacataaaaagcttttaaacgatagactgatacgatttatagaaaatttgacactggacattatttttggtaaggactgttttcttaactttttcaatctaatatttttttactttgtatacattatgaaagatttccgataatatataactcacagaataacaaaatatatctggatcaagaaataccacgtaccactccaggatatattaaaaaatgagtataacatctacattacgtataacaataatttgggaatgagaagactaggtttaacaaaattttataactctaacataaaaaatatatatacaaataatactggaatatttacaaattttcttcacagaaataaaactaacagcaacgacaaagataaaagtaagattagataagtagattattactggtgtgattagagaataatgtgcttcaagccaaactagtttcttatttgttttattttaaagtcttacttttatcctgaccgttcaaaaattctgcctacataaatatggtactatagtccatcccaccttgaccccacagtacaggaacataggaaatgcagtccttcatgagagcttttagcgcggtgatgccgactttatcaaaaggaatttgtaatcgaacatttagtgagattaaaataaaaactgtcttagaaaggcaatctacaatattaggattgatatgcgttaaagtttaattgacatacctactatagttattacgcatatgaatcctaaaattgtag

SEQ ID NO: 718 - DNA, 929 bp, Diabrotica virgifera
ttttagaaaaattgtgatctgataatttgtgtacatactccttgaacaacgacaaacatcgttctgtattttttctcgaaataaaaaaaaaattttcagcacatgtatcaggttataagtagttatattccaaatcaaaaaatctaagtgcccgacataaatagtggggcacatccaaattcggacaaaaaatttaatttttattaataaactatacttttaaactattctgggttcgtgcatcccttatctttacaaccatttttccgacaaaagtagtaggataaaagtaatcatactcttaaacaaaaaatgtaattgtctgacaaaaatgttggggcaaacgaacaggaaacttaattcttttaggctatggacgaggaggtattatccaaaaatattttaaaacagtttttctcggttatttttgaatcgatttagctgaatattggtacacacactaagttaaacatttaaaagggtatgacgtagagctgtacccaaaattttcccaaaaaaatttcggacaagagggaaaattttagaaaaattgtgatctgatatttgcgtacatactccttgaacaacgacaaacaacgttctgtagtttttttttccaattaaaaaaaatttccgacacaagtatcaggttataagtagttatattctaaatcaaaaaatctaagtgtccgacaaaaatattgggtcaaatgcaaagtcggacaaaaaatttaatttttattaataaactgtcttttaaacaatactgggttcgtgcaacccttacctttaaaaccatttttccgacaacattagtagggtataagtaattatattcttaatcaaaaaatcaaagtgtcggacaaaaatattggggcaactcgacagtcggacaaaaaatttaatttttattagtaaagtatactttc

SEQ ID NO: 719 - DNA, 1133 bp, Diabrotica virgifera
aaataaaaaatgtaattgtctgacaaaaatgttggggcaaacgaacagaaaacttaattcttttaggctataaacgaggaggtattatcaaaaaaaaatttaaaagagtgtttctcggttacttttgaatcgatttagctgaaaattagtacacacgctaagtaaagcatttaaaagggtatgacgtagataggaacccaaaattttcttaaaaaattttccgacaagagggaaaattttagaaaaattgtgatctgataatttgtgtacatactccttgaacaacgacaaacatcgttctgtattttttctcgaattaaacaaaaaattttcagcacatgtatcaggttataagtagttatattccaaatcaaaaaatctaagtgcccgacaaaatattggggcaaatccaaattcagacaaaaaatttaatttttattaataaactatacttttaaactattcatttttccgacaaaagtagtaggatacaagtaatcatactcttaaacaaaaaatgtaattgtctgacaaaaatgttggggcaaacgaacaggaaacttaattcttttaggctatggacgaggaggtattatccaaaaatattttaaaacagattttctcggttatttttgaatcgatttagctgaatattggtacacacactaagtaaaagatttaaaagggtatgacgtagagctgtacccaaaattttcccaaaaaaatttcggacaagagggaaaattttagaaaaattgtgatctgatatttgcgtacatactccttgaacaacgacaaacatcgttctgtagttttttttccaattaaaaaaaatttccgacacaagtatcaggttataagtagttatattctaaatcaaaaaatataagtgtccgacaaaaatattgggtcaaatccaaagtcggacaaaaaatttaatttttattaataaactgtcttttaaacaatactgggttcgtgcaacccttacctttaaaaccatttttccgacaacattagtaggttataagtaattatattcttaatcaaaaaatcaaagtgtcggaccaaaatattggggcaactcgacagtcggacaaaaaatttaatttttattagtaaagtatacttcc

SEQ ID NO: 720 - DNA, 7966 bp, Diabrotica virgifera
  SmartBlast Evalue=1E-165; Info=Iron/zinc purple acid phosphatase-like protein n=1 Tax=Camponotus floridanus RepID= E2AEF0_9HYME
ttttaatttcgtggatgtttataattaatttcataagaggtaacttcatgtgactatcctatatgactaacttaaaaactatatatttactgtctaaaaatccaattggtatcacattattttaaataagtattatataataaatttatcaatctcgttagttttcagtaattcaataaaaactctgaaatttaattaacgtaactgataataaagcaaaataaaatcacaacaaaataaaatttcttttctggggaagatgcttcctcgcaaaaggataccagcctttaatattatgtgtaatccccattccacgaatatacgaccctcctggatcatcgcgacaacgaacattttactgtgaaaaatatgaagaacgaaagtaaattgcaaattatattgttgtttattggagtaattattatagcaaagtactttcgtacttcttatgttgcacactaaaatattcgttgtcgcgacaatccaaaacagtctcatattcgtggaatacaccgtatagatactaaagcaaaagaaaaaagagaaaggaacttggaactgagagcttttgagtagcttaacctggttagtaggagctacataaaaataaactgtctgtctaatacggattcaagaattatgacaaattatgattttcgtctttttcaagtgtcttgcattttcttatgataactaaattatcttaattttctattgcatgtaagtatactgttctcaagctatttccttgtggcatcttatggttcgtacagtataaataccgttgcgcgtcatagtaggtaacgtcacacgacaccaacacaaaatatttaagtcgtaggtctgttccttttagaatcgtttagccaagtacactggaattacagccactaggcatattttattacatgaggcgctcagagcaacagtggcctaaccccaaaaacgaagtttcgaaataaatgctctgcattcgtatttccattgtgcttatgggatggcgctacaatttacgtagtgccatttagccaaatatagaggtaggttttgtagacccttattaatctgaagatttagggctagttgttcgaacgctaattagaaatggaatgcactgatcattatcaaatatttcattacaattatatttgattaagcgtacttctgacagatgtcacattttgaggttatgttgacattgttgactgatttattttattattttggttttaatctaaaataaaccataattaaactctttctgatgttaatttattgtttttacttacaaatcaataacaatagtaagcaatttttaataatttaacgactgcggctatattttaattactgctttacctacaatcaatgaatgattagtgttttacatgtatttttgatgtctcgatttgattcccatcaagaaaattgattacaataaactgattgattataatcaacttcttgattagcgttcgaacaaccggcccttaatgttgctgcccttattgatatattaatctaaaaattctcaatttgtggcttaggccactgttgctctaagcgcctcatataggcgtaaatataatatttgaagatttctattaatgtaaacttataggccttgggcccgcatatacaactattattcatgaccacaccgctgaaaccccttgtacttgccatctgggcggagtcggacaaatcctgagcttggcgcaccatggcagtggggcgcttgtccgtcaagcggtgacgaagttgtcaaccccatgcaagaaaaaaattgatcaccacattggtcattctatcccaatcaatagtttccatcatataaacaacgaaaacaatttgtcggacaaaaatactggggcatatgacgcgtcggacacgccaaatatgtcaaattcatgaaaataacaaacaccaccacatggataattttaacggtatctaccataaaacatttttacaacaatgtggcaaccttgtcggacaactttcacggggcacatgcgcagtcggacgcgccgaagatgtcaatttcctgaaatttccctatttacaaccatttttccgacaacattagtaggttataagtaattatattcttaatcaaaaaatcaaagtgtcggacaaaaatattggggcaactcgacagtcggacaaaaaatttaatttttattagtaaagtatactttcaaattatgctgggttcgtgtatcccttatctttacaaccatttttccgacaaaagtagtaggttacaagtaattatattcttaaacaaaaaatataattgtctgacaaaaatgttggggcaaacgaacagaaaacttaattcttttaggctatcgacgaggaggtattatcaaaaaaaaaaatttaaaacagtgtttctcggttacttttgaatcgatttagctgaaaattggtacacacactaagtaaagcatttaaaagggtctgacgtagatcggaacccaaaattttcttaaaaaattttccgacaagagggaaaattttagaaaaattgtgatccgataatttgtgtacatactccttgaacaacgacaaacatcgttctgtatttttttctcgaattaaaaaaaaaattcagcacatgtatcaggttataagtagttatattccaaatcaaaaaatctaagtgtccgacaaaaatattggggcaaatccaaagtcagacaaaaaatttaatttttattgataaactatacttttaaattatgctgggttcgtgtatcccttatctttacaaccattttccgacaaaggtagttagttacaagtaattatatccttaaacaaaaaatgtaattgtttgacaaaaatcttggggcaaacgaagagaaaacttaattcttttaggctatcgacgagaaagtaatatcaaaaaattttaaaagagttttctcggttatttttgaatcgatttagctcaaaattggtacacacgctaagtaaaacatttaaaagggtatgacgtagagctgaaaattttagaaaaattgtgatctgatatttgcttacatactgcttgaacaacgacaaacatcgttctgtagttttttttttccaattaaaaaaaaatttccgacacaagtatcaggttataagtagttatattctaaatcaaaaaatctaatatttatattcaccatttaatgaatttaatattcaccattggcgcgcatacgggtaatatgagccgaaaaatacgtaatttaatatgaagtcaaaaatgtataaaaattaatttttttttaaattgtaccaaaacgccccattatttttgtccgacaagtgatccaatatgcattacacatgtaaaaaaacagtacaaaataaaaataacatctgtggtaataaataaaaaattttcaggaaattgacatcttcggcgcgtccgactgcgcatatgccccgtgaaaattgtccgacaaggttaccacattattgtaaaaaggttttatggtagataccgttaaaattatccatgtggtaataaatttattattttcataaattttaagttattttttgggtgtaactacaatgatattatgctaaaaatgatggtgtatcgcatatttaaaatgcgtttatctcgaaaacggttgagtttaggaagatgaaagaagtataccttttttaagtaaaactaataggaaaataaaaattttaatgtcaaaattatacagagtgagggataaaaaaattaaacgtaataaataagtgctgaaaggcatatgtggcgccctctgggcaatgcataatttttggtaaggaatttagatttctcgactcaagaaacctccagatataaaatttcatgttgttatctcatacctatcaggaaatattcaataataaataaaaaaaaagtttaactttgacaccctgtatctcggctattataaactttgtactaaggtaagttagcttaaatcggcctattttaacctcaggaacctgaggttaagctatggcccattctttaccaaacaccctgtatgcataaaaattactttttcttttaattgtaccaaaacgccccattatttttgtccgacaagtgatccaatatgcattacacatgtaaaagaacagtacaaaataaaaatgacatctgtggtaataaataaaaaattttcaggaaattgacatcttcggcgcgtccgactgcgcatatgccccgcgaaaattgtccgacaaggccaccacaccattgtaaaaaggccccatgatagataccgtcaaaattatcgatgtggcaacaaatttatcattttcacaaatttgacatacttcagcgcgtccgacgcgtcatacgccccaacacttttgtccgacaaaattgttttcgccgtttatatgataaaatccattgattacaatagaatgaccaatgtggtaataaattcccttcttgcataaaattgacaacttcgtcaccgcttgacagacaaacgccccaccaccacaatgcgccaagctcaaaatttgtccgactccacccaaataacaagtacaaaaagtttcaacggtgtggtcacaaataataattgtatatgcgggcccaaggcctattaaagaaatgcaccataacttgtttcatttaatctgtataagtggattacgaagcatatttgtccggatcacaactgtgatcgagcgaaggtgatattttggcataaattggtaacacttatttgacagttgcggtgttgacacttcatatttgtttttattatctactttattgaatattttatacagtgatgagcgcgctaataaccgacaaaatagcacaaaagatcacggaagcccatataaaaattttcagggggtggggcagacgtgaagatgttgcacattatattttgtgttctttggataaccatatatagttaacagcacccgaaaagccaggggggcacggtttgttttgttgtatgcacacttctgaaataattatatattatgatgtatttgatttaaaatgaattcagaatttttttttgtaatttggcaactatgtcaacttagatctctgacgtagataatgacgtgtaacggtatttatactgtaccaaccatatgtaatttactattttatcttggaataaaaccacaattatttaagattaaaattaggtaaatttatttgacgtttcgacttccacttcggaaatcgttgtattttgatttcgatttccgaagtggacgtcgaaacgtcaaataaatttaattttaaacttaaattgtggttttattctcaaataaaatagtaaagtatattgttaacgtaaaattttgcaatattatattattttgattaatagaatgatgtattcagcaataacctcacgttttttagctatgctctatctataacaacttctgaatttattattaaagtctagatggcaataaaattgtatttttgatagacttttaattttaaattacaatttaactactttatacaaaatttacttttctaagggccggtttttcagtgctgggttaatcgatttattttttggtcaccgaaatattcatgtttaatcagtttttcagtactagattagagcttaaactcgtttaagttaaccacgattttaaccgatcctcgttagatggtttaactccgaattttgtggttacgcttgcgcattggtgcagtgaatgcatcatgtttattttttgagtacctgccaacctgtctgagagaagggattagttgggttatgttattttcttttatcgcgggaagtattctaatacctccttactattataaggaaattattattattgaaattataaatttttatcgttattatataggaaggaattataaggaaatatatttaaatataactgtaacaggtacctacgtttacacttactgtaacaggatttaatgcattattcctagtaatatttttaaaaagattattttatatttgtctacacagcaaaatacttaattatttaccaaacagtccgacttcttaattgctggtcaatctgttcaaatagtgataagaccgtggtctttgacaaacaaaaccggaaaaaaagtctaaatcgtcccagtaattcgaattattttctgttatgaaaccgagttagacgttatgaactaaacaaagattccgaacttgatattgcattgcattaatcattttttaaatttggttatgaagttgttttttatttatttttctgtcaaattatcattatttctcgaattgtacatgcgctcgtacagttactgctgccaacagaagaaaaaaagtggttagctaaccgagattttcttaacttgatttagagcactgaaaaacgctatgagggttaaaatattggttaaaatttaaactaggttagctaaccaaaattttaaccgctcactgaaaaaccgggcctaaatgtcatgtaaatctttgattttatttagaattatatatactatcacggttcatcgattttaatctcatactgtcaactttcgcccaatccatttttgagtgcgggtataatccgtgtttatccttgactatccagaaggcatcgatcacttccccgcttttatcatcagaaacctgctctagatgcatgtgtgatgaattgtaaaccttgagacggctatatccgtagtcgctacttctgaacgctgaccattcgggtaggtctttaacaaaactgtctgtgccttcatcgcagccggccgagccagtggtgaactgtacaggagcccctggatttacgtaaggctgctcgtagctcccattgtaaacggtgtaattataaacaggccacagcctttcataagaatgctcatgggcccatatagctaaatcgactccataattgtaaagcaagttttccaatccgaagaattgtaagaaaggcaatcctactcttgttatggtttcgtgatgtgtacagtcatcatgatcagtgttggaacagtacatagggcgatgacccatcactataatccatggttgcttttctctgttttcgggtaaattcgccgttgccaagtcttgttccagccactcgtattggaatacgagaggtttaatgccgtagtccaggaaataataaacctctgtagatatagagataatatgcatcggaccaatgttaatgctgtacatgggtgaatttagaccaccaggcatcgagaatctgtatcgatagttactaaaattgtaagcctcttcatgatttccaggcaagtcatatacggaacgtatgctgcaaccggttctatttgtctcataaattcatcaccaatgagagcattgtctgagtccatatcatatgcaaaatctccaacgtgtagaatggcatcatacaaccctctctgagtttcttcttgtagtctagttaaagatttagcattatcattacccatgtctccataaacagctaaatgtggctgccagtctggcgaatttggagccgttttgaaggtaaatatatttgaccatcccaagtcactcccacaatgatacagatatgtacttcctggtgttaagttctttaggacaacagaatgaatgtgttgtgatctctgctctttacccccatctacaaataatgacgacgtcccattagctgtaagaactaaacctcctatgccatattcaactagggactgttttgtgtcatcaaaggtggaccaagttaccacaatatcataaatattatttccataggcgatatggatttgttccggctgataatagtaaactgataaagatacctgtataaaactaaaacaaaagaatattttcccccacattttgctcaaaactaatgttagtatattaggaataaaataaaaccacaaatttcttcatagaaatacactcaatctcaactcaaccaataaaatcttcggtactgggctactggtctggag

SEQ ID NO: 721 - DNA, 8009 bp, Diabrotica virgifera
  SmartBlast Evalue=1E-165; Info=Iron/zinc purple acid phosphatase-like protein n=1 Tax=Camponotus floridanus RepID= E2AEF0_9HYME
ttttaatttcgtggatgtttataattaatttcataagaggtaacttcatgtgactatcctatatgactaacttaaaaactatatatttactgtctaaaaatccaattggtatcacattattttaaataagtattatataataaattatatatatattatataatattatataataatatataataaatttatcaatctcgttagttttcagtaattcaataaaaactctgaaatttaattaacgtaactgataataaagcaaaataaaatcacaacaaaataaaatttcttttctggggaagatgcttcctcgcaaaaggataccagcctttaatattatgtgtaatccccattccacgaatatacgaccctcctggatcatcgcgacaacgaacattttactgtgcaaaatatgaagaacgaaagtaaattgcaaattatattgttgtttattggagtaattattatagcaaagtactttcgtactttttatgttgcacactaaaatattcgttgtcgcgacaatccaaaacagtctcatattcgtggaatacaccgtatagatactaaagcaaaagaaaaaagggaaaggaacttggaactgagagcttttgagtagcttaacctggttagtaggagctacataaaaataaactgtctgtctaatacggattcaagaattatgacaaattatgattttcgtctttttcaagtgtcttgcattttcttatgataactaaattatcttaattttctattgcatgtaagtatactgttctcaagctatttccttgtggcatcttatggttcgtacagtataaataccgttgcgcgtcatagtaggtaacgtcacacgacaccaacacaaaatatttaagtcgtaggtctgttccttttagaatcgtttagccaagtacactggaattacagccactaggcatattttattacatgaggcgctcagagcaacagtggcctaaccccaaaaacgaagtttcgaaataaatgctctgcattcgtatttccattgtgcttatgggatggcgctacaatttacgtagtgccatttagccaaatatagaggtaggttttgtagacccttattaatctgaagatttagggctagttgttcgaacgctaattagaaatggaatgcactgatcattatcaaatatttcattacaattatatttgattaagcgtacttctgacagatgtcacattttgaggttatgttgacattgttgactgatttattttattattttggttttaatctaaaataaaccataattaaactctttctgatgttaatttattgtttttacttacaaatcaataacaatagtaagcaatttttaataatttaacgactgcggctatattttaattactgctttacctacaatcaatgaatgattagtgttttacatgtatttttgatgtctcgatttgattcccatcaagaaaattgattacaataaactgattgattataatcaacttcttgattagcgttcgaacaaccggcccttaatgttgctgcccttattgatatattaatctaaaaattctcaatttgtggcttaggccactgttgctctaagcgcctcatataggcgtaaatataatatttgaagatttctattaatgtaaacttataggccttgggcccgcatatacaactattattcatgaccacaccgctgaaaccccttgtacttgccatctgggcggagtcggacaaatcctgagcttggcgcaccatggcagtggggcgcttgtccgtcaagcggtgacgaagttgtcaaccccatgcaagaaaaaaattgatcaccacattggtcattctatcccaatcaatagtttccatcatataaacaacgaaaacaatttgtcggacaaaaatactggggcatatgacgcgtcggacacgccaaatatgtcaaattcatgaaaataacaaacaccaccacatggataattttaacggtatctaccataaaacatttttacaacaatgtggcaaccttgtcggacaactttcacggggcacatgcgcagtcggacgcgccgaagatgtcaatttcctgaaatttccctatttacaaccatttttccgacaacattagtaggttataagtaattatattcttaatcaaaaaatcaaagtgtcggacaaaaatattggggcaactcgacagtcggacaaaaaatttaatttttattagtaaagtatactttcaaattatgctgggttcgtgtatcccttatctttacaaccatttttccgacaaaagtagtaggttacaagtaattatattcttaaacaaaaaatataattgtctgacaaaaatgttggggcaaacgaacagaaaacttaattcttttaggctatcgacgaggaggtattatcaaaaaaaaaaatttaaaacagtgtttctcggttacttttgaatcgatttagctgaaaattggtacacacactaagtaaagcatttaaaagggtctgacgtagatcggaacccaaaattttcttaaaaaattttccgacaagagggaaaattttagaaaaattgtgatccgataatttgtgtacatactccttgaacaacgacaaacatcgttctgtatttttttctcgaattaaaaaaaaaattcagcacatgtatcaggttataagtagttatattccaaatcaaaaaatctaagtgtccgacaaaaatattggggcaaatccaaagtcagacaaaaaatttaatttttattgataaactatacttttaaattatgctgggttcgtgtatcccttatctttacaaccattttccgacaaaggtagttagttacaagtaattatatccttaaacaaaaaatgtaattgtttgacaaaaatcttggggcaaacgaagagaaaacttaattcttttaggctatcgacgagaaagtaatatcaaaaaattttaaaagagttttctcggttatttttgaatcgatttagctcaaaattggtacacacgctaagtaaaacatttaaaagggtatgacgtagagctgaaaattttagaaaaattgtgatctgatatttgcttacatactgcttgaacaacgacaaacatcgttctgtagttttttttttccaattaaaaaaaaatttccgacacaagtatcaggttataagtagttatattctaaatcaaaaaatctaatatttatattcaccatttaatgaatttaatattcaccattggcgcgcatacgggtaatatgagccgaaaaatacgtaatttaatatgaagtcaaaaatgtataaaaattaatttttttttaaattgtaccaaaacgccccattatttttgtccgacaagtgatccaatatgcattacacatgtaaaaaaacagtacaaaataaaaataacatctgtggtaataaataaaaaattttcaggaaattgacatcttcggcgcgtccgactgcgcatatgccccgtgaaaattgtccgacaaggttaccacattattgtaaaaaggttttatggtagataccgttaaaattatccatgtggtaataaatttattattttcataaattttaagttattttttgggtgtaactacaatgatattatgctaaaaatgatggtgtatcgcatatttaaaatgcgtttatctcgaaaacggttgagtttaggaagatgaaagaagtataccttttttaagtaaaactaataggaaaataaaaattttaatgtcaaaattatacagagtgagggataaaaaaattaaacgtaataaataagtgctgaaaggcatatgtggcgccctctgggcaatgcataatttttggtaaggaatttagatttctcgactcaagaaacctccagatataaaatttcatgttgttatctcatacctatcaggaaatattcaataataaataaaaaaaaagtttaactttgacaccctgtatctcggctattataaactttgtactaaggtaagttagcttaaatcggcctattttaacctcaggaacctgaggttaagctatggcccattctttaccaaacaccctgtatgcataaaaattactttttcttttaattgtaccaaaacgccccattatttttgtccgacaagtgatccaatatgcattacacatgtaaaagaacagtacaaaataaaaatgacatctgtggtaataaataaaaaattttcaggaaattgacatcttcggcgcgtccgactgcgcatatgccccgcgaaaattgtccgacaaggccaccacaccattgtaaaaaggccccatgatagataccgtcaaaattatcgatgtggcaacaaatttatcattttcacaaatttgacatacttcagcgcgtccgacgcgtcatacgccccaacacttttgtccgacaaaattgttttcgccgtttatatgataaaatccattgattacaatagaatgaccaatgtggtaataaattcccttcttgcataaaattgacaacttcgtcaccgcttgacagacaaacgccccaccaccacaatgcgccaagctcaaaatttgtccgactccacccaaataacaagtacaaaaagtttcaacggtgtggtcacaaataataattgtatatgcgggcccaaggcctattaaagaaatgcaccataacttgtttcatttaatctgtataagtggattacgaagcatatttgtccggatcacaactgtgatcgagcgaaggtgatattttggcataaattggtaacacttatttgacagttgcggtgttgacacttcatatttgtttttattatctactttattgaatattttatacagtgatgagcgcgctaataaccgacaaaatagcacaaaagatcacggaagcccatataaaaattttcagggggtggggcagacgtgaagatgttgcacattatattttgtgttctttggataaccatatatagttaacagcacccgaaaagccaggggggcacggtttgttttgttgtatgcacacttctgaaataattatatattatgatgtatttgatttaaaatgaattcagaatttttttttgtaatttggcaactatgtcaacttagatctctgacgtagataatgacgtgtaacggtatttatactgtaccaaccatatgtaatttactattttatcttggaataaaaccacaattatttaagattaaaattaggtaaatttatttgacgtttcgacttccacttcggaaatcgttgtattttgatttcgatttccgaagtggacgtcgaaacgtcaaataaatttaattttaaacttaaattgtggttttattctcaaataaaatagtaaagtatattgttaacgtaaaattttgcaatattatattattttgattaatagaatgatgtattcagcaataacctcacgttttttagctatgctctatctataacaacttctgaatttattattaaagtctagatggcaataaaattgtatttttgatagacttttaattttaaattacaatttaactactttatacaaaatttacttttctaagggccggtttttcagtgctgggttaatcgatttattttttggtcaccgaaatattcatgtttaatcagtttttcagtactagattagagcttaaactcgtttaagttaaccacgattttaaccgatcctcgttagatggtttaactccgaattttgtggttacgcttgcgcattggtgcagtgaatgcatcatgtttattttttgagtacctgccaacctgtctgagagaagggattagttgggttatgttattttcttttatcgcgggaagtattctaatacctccttactattataaggaaattattattattgaaattataaatttttatcgttattatataggaaggaattataaggaaatatatttaaatataactgtaacaggtacctacgtttacacttactgtaacaggatttaatgcattattcctagtaatatttttaaaaagattattttatatttgtctacacagcaaaatacttaattatttaccaaacagtccgacttcttaattgctggtcaatctgttcaaatagtgataagaccgtggtctttgacaaacaaaaccggaaaaaaagtctaaatcgtcccagtaattcgaattattttctgttatgaaaccgagttagacgttatgaactaaacaaagattccgaacttgatattgcattgcattaatcattttttaaatttggttatgaagttgttttttatttatttttctgtcaaattatcattatttctcgaattgtacatgcgctcgtacagttactgctgccaacagaagaaaaaaagtggttagctaaccgagattttcttaacttgatttagagcactgaaaaacgctatgagggttaaaatattggttaaaatttaaactaggttagctaaccaaaattttaaccgctcactgaaaaaccgggcctaaatgtcatgtaaatctttgattttatttagaattatatatactatcacggttcatcgattttaatctcatactgtcaactttcgcccaatccatttttgagtgcgggtataatccgtgtttatccttgactatccagaaggcatcgatcacttccccgcttttatcatcagaaacctgctctagatgcatgtgtgatgaattgtaaaccttgagacggctatatccgtagtcgctacttctgaacgctgaccattcgggtaggtctttaacaaaactgtctgtgccttcatcgcagccggccgagccagtggtgaactgtacaggagcccctggatttacgtaaggctgctcgtagctcccattgtaaacggtgtaattataaacaggccacagcctttcataagaatgctcatgggcccatatagctaaatcgactccataattgtaaagcaagttttccaatccgaagaattgtaagaaaggcaatcctactcttgttatggtttcgtgatgtgtacagtcatcatgatcagtgttggaacagtacatagggcgatgacccatcactataatccatggttgcttttctctgttttcgggtaaattcgccgttgccaagtcttgttccagccactcgtattggaatacgagaggtttaatgccgtagtccaggaaataataaacctctgtagatatagagataatatgcatcggaccaatgttaatgctgtacatgggtgaatttagaccaccaggcatcgagaatctgtatcgatagttactaaaattgtaagcctcttcatgatttccaggcaagtcatatacggaacgtatgctgcaaccggttctatttgtctcataaattcatcaccaatgagagcattgtctgagtccatatcatatgcaaaatctccaacgtgtagaatggcatcatacaaccctctctgagtttcttcttgtagtctagttaaagatttagcattatcattacccatgtctccataaacagctaaatgtggctgccagtctggcgaatttggagccgttttgaaggtaaatatatttgaccatcccaagtcactcccacaatgatacagatatgtacttcctggtgttaagttctttaggacaacagaatgaatgtgttgtgatctctgctctttacccccatctacaaataatgacgacgtcccattagctgtaagaactaaacctcctatgccatattcaactagggactgttttgtgtcatcaaaggtggaccaagttaccacaatatcataaatattatttccataggcgatatggatttgttccggctgataatagtaaactgataaagatacctgtataaaactaaaacaaaagaatattttcccccacattttgctcaaaactaatgttagtatattaggaataaaataaaaccacaaatttcttcatagaaatacactcaatctcaactcaaccaataaaatcttcggtactgggctactggtctggag

SEQ ID NO: 722 - DNA, 7966 bp, Diabrotica virgifera
  SmartBlast Evalue=1E-165; Info=Iron/zinc purple acid phosphatase-like protein n=1 Tax=Camponotus floridanus RepID= E2AEF0_9HYME
ttttaatttcgtggatgtttataattaatttcataagaggtaacttcatgtgactatcctatatgactaacttaaaaactatatatttactgtctaaaaatccaattggtatcacattattttaaataagtattatataataaatttatcaatctcgttagttttcagtaattcaataaaaactctgaaatttaattaacgtaactgataataaagcaaaataaaatcacaacaaaataaaatttcttttctggggaagatgcttcctcgcaaaaggataccagcctttaatattatgtgtaatccccattccacgaatatacgaccctcctggatcatcgcgacaacgaacattttactgtgcaaaatatgaagaacgaaagtaaattgcaaattatattgttgtttattggagtaattattatagcaaagtactttcgtactttttatgttgcacactaaaatattcgttgtcgcgacaatccaaaacagtctcatattcgtggaatacaccgtatagatactaaagcaaaagaaaaaagggaaaggaacttggaactgagagcttttgagtagcttaacctggttagtaggagctacataaaaataaactgtctgtctaatacggattcaagaattatgacaaattatgattttcgtctttttcaagtgtcttgcattttcttatgataactaaattatcttaattttctattgcatgtaagtatactgttctcaagctatttccttgtggcatcttatggttcgtacagtataaataccgttgcgcgtcatagtaggtaacgtcacacgacaccaacacaaaatatttaagtcgtaggtctgttccttttagaatcgtttagccaagtacactggaattacagccactaggcatattttattacatgaggcgctcagagcaacagtggcctaaccccaaaaacgaagtttcgaaataaatgctctgcattcgtatttccattgtgcttatgggatggcgctacaatttacgtagtgccatttagccaaatatagaggtaggttttgtagacccttattaatctgaagatttagggctagttgttcgaacgctaattagaaatggaatgcactgatcattatcaaatatttcattacaattatatttgattaagcgtacttctgacagatgtcacattttgaggttatgttgacattgttgactgatttattttattattttggttttaatctaaaataaaccataattaaactctttctgatgttaatttattgtttttacttacaaatcaataacaatagtaagcaatttttaataatttaacgactgcggctatattttaattactgctttacctacaatcaatgaatgattagtgttttacatgtatttttgatgtctcgatttgattcccatcaagaaaattgattacaataaactgattgattataatcaacttcttgattagcgttcgaacaaccggcccttaatgttgctgcccttattgatatattaatctaaaaattctcaatttgtggcttaggccactgttgctctaagcgcctcatataggcgtaaatataatatttgaagatttctattaatgtaaacttataggccttgggcccgcatatacaactattattcatgaccacaccgctgaaaccccttgtacttgccatctgggcggagtcggacaaatcctgagcttggcgcaccatggcagtggggcgcttgtccgtcaagcggtgacgaagttgtcaaccccatgcaagaaaaaaattgatcaccacattggtcattctatcccaatcaatagtttccatcatataaacaacgaaaacaatttgtcggacaaaaatactggggcatatgacgcgtcggacacgccaaatatgtcaaattcatgaaaataacaaacaccaccacatggataattttaacggtatctaccataaaacatttttacaacaatgtggcaaccttgtcggacaactttcacggggcacatgcgcagtcggacgcgccgaagatgtcaatttcctgaaatttccctatttacaaccatttttccgacaacattagtaggttataagtaattatattcttaatcaaaaaatcaaagtgtcggacaaaaatattggggcaactcgacagtcggacaaaaaatttaatttttattagtaaagtatactttcaaattatgctgggttcgtgtatcccttatctttacaaccatttttccgacaaaagtagtaggttacaagtaattatattcttaaacaaaaaatataattgtctgacaaaaatgttggggcaaacgaacagaaaacttaattcttttaggctatcgacgaggaggtattatcaaaaaaaaaaatttaaaacagtgtttctcggttacttttgaatcgatttagctgaaaattggtacacacactaagtaaagcatttaaaagggtctgacgtagatcggaacccaaaattttcttaaaaaattttccgacaagagggaaaattttagaaaaattgtgatccgataatttgtgtacatactccttgaacaacgacaaacatcgttctgtatttttttctcgaattaaaaaaaaaattcagcacatgtatcaggttataagtagttatattccaaatcaaaaaatctaagtgtccgacaaaaatattggggcaaatccaaagtcagacaaaaaatttaatttttattgataaactatacttttaaattatgctgggttcgtgtatcccttatctttacaaccattttccgacaaaggtagttagttacaagtaattatatccttaaacaaaaaatgtaattgtttgacaaaaatcttggggcaaacgaagagaaaacttaattcttttaggctatcgacgagaaagtaatatcaaaaaattttaaaagagttttctcggttatttttgaatcgatttagctcaaaattggtacacacgctaagtaaaacatttaaaagggtatgacgtagagctgaaaattttagaaaaattgtgatctgatatttgcttacatactgcttgaacaacgacaaacatcgttctgtagttttttttttccaattaaaaaaaaatttccgacacaagtatcaggttataagtagttatattctaaatcaaaaaatctaatatttatattcaccatttaatgaatttaatattcaccattggcgcgcatacgggtaatatgagccgaaaaatacgtaatttaatatgaagtcaaaaatgtataaaaattaatttttttttaaattgtaccaaaacgccccattatttttgtccgacaagtgatccaatatgcattacacatgtaaaaaaacagtacaaaataaaaataacatctgtggtaataaataaaaaattttcaggaaattgacatcttcggcgcgtccgactgcgcatatgccccgtgaaaattgtccgacaaggttaccacattattgtaaaaaggttttatggtagataccgttaaaattatccatgtggtaataaatttattattttcataaattttaagttattttttgggtgtaactacaatgatattatgctaaaaatgatggtgtatcgcatatttaaaatgcgtttatctcgaaaacggttgagtttaggaagatgaaagaagtataccttttttaagtaaaactaataggaaaataaaaattttaatgtcaaaattatacagagtgagggataaaaaaattaaacgtaataaataagtgctgaaaggcatatgtggcgccctctgggcaatgcataatttttggtaaggaatttagatttctcgactcaagaaacctccagatataaaatttcatgttgttatctcatacctatcaggaaatattcaataataaataaaaaaaaagtttaactttgacaccctgtatctcggctattataaactttgtactaaggtaagttagcttaaatcggcctattttaacctcaggaacctgaggttaagctatggcccattctttaccaaacaccctgtatgcataaaaattactttttcttttaattgtaccaaaacgccccattatttttgtccgacaagtgatccaatatgcattacacatgtaaaagaacagtacaaaataaaaatgacatctgtggtaataaataaaaaattttcaggaaattgacatcttcggcgcgtccgactgcgcatatgccccgcgaaaattgtccgacaaggccaccacaccattgtaaaaaggccccatgatagataccgtcaaaattatcgatgtggcaacaaatttatcattttcacaaatttgacatacttcagcgcgtccgacgcgtcatacgccccaacacttttgtccgacaaaattgttttcgccgtttatatgataaaatccattgattacaatagaatgaccaatgtggtaataaattcccttcttgcataaaattgacaacttcgtcaccgcttgacagacaaacgccccaccaccacaatgcgccaagctcaaaatttgtccgactccacccaaataacaagtacaaaaagtttcaacggtgtggtcacaaataataattgtatatgcgggcccaaggcctattaaagaaatgcaccataacttgtttcatttaatctgtataagtggattacgaagcatatttgtccggatcacaactgtgatcgagcgaaggtgatattttggcataaattggtaacacttatttgacagttgcggtgttgacacttcatatttgtttttattatctactttattgaatattttatacagtgatgagcgcgctaataaccgacaaaatagcacaaaagatcacggaagcccatataaaaattttcagggggtggggcagacgtgaagatgttgcacattatattttgtgttctttggataaccatatatagttaacagcacccgaaaagccaggggggcacggtttgttttgttgtatgcacacttctgaaataattatatattatgatgtatttgatttaaaatgaattcagaatttttttttgtaatttggcaactatgtcaacttagatctctgacgtagataatgacgtgtaacggtatttatactgtaccaaccatatgtaatttactattttatcttggaataaaaccacaattatttaagattaaaattaggtaaatttatttgacgtttcgacttccacttcggaaatcgttgtattttgatttcgatttccgaagtggacgtcgaaacgtcaaataaatttaattttaaacttaaattgtggttttattctcaaataaaatagtaaagtatattgttaacgtaaaattttgcaatattatattattttgattaatagaatgatgtattcagcaataacctcacgttttttagctatgctctatctataacaacttctgaatttattattaaagtctagatggcaataaaattgtatttttgatagacttttaattttaaattacaatttaactactttatacaaaatttacttttctaagggccggtttttcagtgctgggttaatcgatttattttttggtcaccgaaatattcatgtttaatcagtttttcagtactagattagagcttaaactcgtttaagttaaccacgattttaaccgatcctcgttagatggtttaactccgaattttgtggttacgcttgcgcattggtgcagtgaatgcatcatgtttattttttgagtacctgccaacctgtctgagagaagggattagttgggttatgttattttcttttatcgcgggaagtattctaatacctccttactattataaggaaattattattattgaaattataaatttttatcgttattatataggaaggaattataaggaaatatatttaaatataactgtaacaggtacctacgtttacacttactgtaacaggatttaatgcattattcctagtaatatttttaaaaagattattttatatttgtctacacagcaaaatacttaattatttaccaaacagtccgacttcttaattgctggtcaatctgttcaaatagtgataagaccgtggtctttgacaaacaaaaccggaaaaaaagtctaaatcgtcccagtaattcgaattattttctgttatgaaaccgagttagacgttatgaactaaacaaagattccgaacttgatattgcattgcattaatcattttttaaatttggttatgaagttgttttttatttatttttctgtcaaattatcattatttctcgaattgtacatgcgctcgtacagttactgctgccaacagaagaaaaaaagtggttagctaaccgagattttcttaacttgatttagagcactgaaaaacgctatgagggttaaaatattggttaaaatttaaactaggttagctaaccaaaattttaaccgctcactgaaaaaccgggcctaaatgtcatgtaaatctttgattttatttagaattatatatactatcacggttcatcgattttaatctcatactgtcaactttcgcccaatccatttttgagtgcgggtataatccgtgtttatccttgactatccagaaggcatcgatcacttccccgcttttatcatcagaaacctgctctagatgcatgtgtgatgaattgtaaaccttgagacggctatatccgtagtcgctacttctgaacgctgaccattcgggtaggtctttaacaaaactgtctgtgccttcatcgcagccggccgagccagtggtgaactgtacaggagcccctggatttacgtaaggctgctcgtagctcccattgtaaacggtgtaattataaacaggccacagcctttcataagaatgctcatgggcccatatagctaaatcgactccataattgtaaagcaagttttccaatccgaagaattgtaagaaaggcaatcctactcttgttatggtttcgtgatgtgtacagtcatcatgatcagtgttggaacagtacatagggcgatgacccatcactataatccatggttgcttttctctgttttcgggtaaattcgccgttgccaagtcttgttccagccactcgtattggaatacgagaggtttaatgccgtagtccaggaaataataaacctctgtagatatagagataatatgcatcggaccaatgttaatgctgtacatgggtgaatttagaccaccaggcatcgagaatctgtatcgatagttactaaaattgtaagcctcttcatgatttccaggcaagtcatatacggaacgtatgctgcaaccggttctatttgtctcataaattcatcaccaatgagagcattgtctgagtccatatcatatgcaaaatctccaacgtgtagaatggcatcatacaaccctctctgagtttcttcttgtagtctagttaaagatttagcattatcattacccatgtctccataaacagctaaatgtggctgccagtctggcgaatttggagccgttttgaaggtaaatatatttgaccatcccaagtcactcccacaatgatacagatatgtacttcctggtgttaagttctttaggacaacagaatgaatgtgttgtgatctctgctctttacccccatctacaaataatgacgacgtcccattagctgtaagaactaaacctcctatgccatattcaactagggactgttttgtgtcatcaaaggtggaccaagttaccacaatatcataaatattatttccataggcgatatggatttgttccggctgataatagtaaactgataaagatacctgtataaaactaaaacaaaagaatattttcccccacattttgctcaaaactaatgttagtatattaggaataaaataaaaccacaaatttcttcatagaaatacactcaatctcaactcaaccaataaaatcttcggtactgggctactggtctggag

SEQ ID NO: 723 - DNA, 7852 bp, Diabrotica virgifera
  SmartBlast Evalue=1E-165; Info=Iron/zinc purple acid phosphatase-like protein n=1 Tax=Camponotus floridanus RepID= E2AEF0_9HYME
ttttaatttcgtggatgtttataattaatttcataagaggtaacttcatgtgactatcctatatgactaacttaaaaactatatatttactgtctaaaaatccaattggtatcacattattttaaataagtattatataataaattatatatatattatataatattatataataatatataataaatttatcaatctcgttagttttcagtaattcaataaaaactctgaaatttaattaacgtaactgataataaagcaaaataaaatcacaacaaaataaaatttcttttctggggaagatgcttcctcgcaaaaggataccagcctttaatattatgtgtaatccccattccacgaatatacgaccctcctggatcatcgcgacaacgaacattttactgtgaaaaatatgaagaacgaaagtaaattgcaaattatattgttgtttattggagtaattattatagcaaagtactttcgtacttcttatgttgcacactaaaatattcgttgtcgcgacaatccaaaacagtctcatattcgtggaatacaccgtatagatactaaagcaaaagaaaaaagagaaaggaacttggaactgagagcttttgagtagcttaacctggttagtaggagctacataaaaataaactgtctgtctaatacggattcaagaattatgacaaattatgattttcgtctttttcaagtgtcttgcattttcttatgataactaaattatcttaattttctattgcatgtaagtatactgttctcaagctatttccttgtggcatcttatggttcgtacagtataaataccgttgcgcgtcatagtaggtaacgtcacacgacaccaacacaaaatatttaagtcgtaggtctgttccttttagaatcgtttagccaagtacactggaattacagccactaggcatattttattacatgaggcgctcagagcaacagtggcctaaccccaaaaacgaagtttcgaaataaatgctctgcattcgtatttccattgtgcttatgggatggcgctacaatttacgtagtgccatttagccaaatatagaggtaggttttgtagacccttattaatctgaagatttagggctagttgttcgaacgctaattagaaatggaatgcactgatcattatcaaatatttcattacaattatatttgattaagcgtacttctgacagatgtcacattttgaggttatgttgacattgttgactgatttattttattattttggttttaatctaaaataaaccataattaaactctttctgatgttaatttattgtttttacttacaaatcaataacaatagtaagcaatttttaataatttaacgactgcggctatattttaattactgctttacctacaatcaatgaatgattagtgttttacatgtatttttgatgtctcgatttgattcccatcaagaaaattgattacaataaactgattgattataatcaacttcttgattagcgttcgaacaaccggcccttaatgttgctgcccttattgatatattaatctaaaaattctcaatttgtggcttaggccactgttgctctaagcgcctcatataggcgtaaatataatatttgaagatttctattaatgtaaacttataggccttgggcccgcatatacaactattattcatgaccacaccgctgaaaccccttgtacttgccatctgggcggagtcggacaaatcctgagcttggcgcaccatggcagtggggcgcttgtccgtcaagcggtgacgaagttgtcaaccccatgcaagaaaaaaattgatcaccacattggtcattctatcccaatcaatagtttccatcatataaacaacgaaaacaatttgtcggacaaaaatactggggcatatgacgcgtcggacacgccaaatatgtcaaattcatgaaaataacaaacaccaccacatggataattttaacggtatctaccataaaacatttttacaacaatgtggcaaccttgtcggacaactttcacggggcacatgcgcagtcggacgcgccgaagatgtcaatttcctgaaatttccctatttacaaccatttttccgacaacattagtaggttataagtaattatattcttaatcaaaaaatcaaagtgtcggacaaaaatattggggcaactcgacagtcggacaaaaaatttaatttttattagtaaagtatactttcaaattatgctgggttcgtgtatcccttatctttacaaccatttttccgacaaaagtagtaggttacaagtaattatattcttaaacaaaaaatataattgtctgacaaaaatgttggggcaaacgaacagaaaacttaattcttttaggctatcgacgaggaggtattatcaaaaaaaaaaatttaaaacagtgtttctcggttacttttgaatcgatttagctgaaaattggtacacacactaagtaaagcatttaaaagggtctgacgtagatcggaacccaaaattttcttaaaaaattttccgacaagagggaaaattttagaaaaattgtgatccgataatttgtgtacatactccttgaacaacgacaaacatcgttctgtatttttttctcgaattaaaaaaaaaattcagcacatgtatcaggttataagtagttatattccaaatcaaaaaatctaagtgtccgacaaaaatattggggcaaatccaaagtcagacaaaaaatttaatttttattgataaactatacttttaaattatgctgggttcgtgtatcccttatctttacaaccattttccgacaaaggtagttagttacaagtaattatatccttaaacaaaaaatgtaattgtttgacaaaaatcttggggcaaacgaagagaaaacttaattcttttaggctatcgacgagaaagtaatatcaaaaaattttaaaagagttttctcggttatttttgaatcgatttagctcaaaattggtacacacgctaagtaaaacatttaaaagggtatgacgtagagctgaaaattttagaaaaattgtgatctgatatttgcttacatactgcttgaacaacgacaaacatcgttctgtagttttttttttccaattaaaaaaaaatttccgacacaagtatcaggttataagtagttatattctaaatcaaaaaatctaatatttatattcaccatttaatgaatttaatattcaccattggcgcgcatacgggtaatatgagccgaaaaatacgtaatttaatatgaagtcaaaaatgtataaaaattaatttttttttaaattgtaccaaaacgccccattatttttgtccgacaagtgatccaatatgcattacacatgtaaaaaaacagtacaaaataaaaataacatctgtggtaataaataaaaaattttcaggaaattgacatcttcggcgcgtccgactgcgcatatgccccgtgaaaattgtccgacaaggttaccacattattgtaaaaaggttttatggtagataccgttaaaattatccatgtggtaataaatttattattttcataaattttaagttattttttgggtgtaactacaatgatattatgctaaaaatgatggtgtatcgcatatttaaaatgcgtttatctcgaaaacggttgagtttaggaagatgaaagaagtataccttttttaagtaaaactaataggaaaataaaaattttaatgtcaaaattatacagagtgagggataaaaaaattaaacgtaataaataagtgctgaaaggcatatgtggcgccctctgggcaatgcataatttttggtaaggaatttagatttctcgactcaagaaacctccagatataaaatttcatgttgttatctcatacctatcaggaaatattcaataataaataaaaaaaaagtttaactttgacaccctgtatctcggctattataaactttgtactaaggtaagttagcttaaatcggcctattttaacctcaggaacctgaggttaagctatggcccattctttaccaaacaccctgtatgcataaaaattactttttcttttaattgtaccaaaacgccccattatttttgtccgacaagtgatccaatatgcattacacatgtaaaagaacagtacaaaataaaaatgacatctgtggtaataaataaaaaattttcaggaaattgacatcttcggcgcgtccgactgcgcatatgccccgcgaaaattgtccgacaaggccaccacaccattgtaaaaaggccccatgatagataccgtcaaaattatcgatgtggcaacaaatttatcattttcacaaatttgacatacttcagcgcgtccgacgcgtcatacgccccaacacttttgtccgacaaaattgttttcgccgtttatatgataaaatccattgattacaatagaatgaccaatgtggtaataaattcccttcttgcataaaattgacaacttcgtcaccgcttgacagacaaacgccccaccaccacaatgcgccaagctcaaaatttgtccgactccacccaaataacaagtacaaaaagtttcaacggtgtggtcacaaataataattgtatatgcgggcccaaggcctattaaagaaatgcaccataacttgtttcatttaatctgtataagtggattacgaagcatatttgtccggatcacaactgtgatcgagcgaaggtgatattttggcataaattggtaacacttatttgacagttgcggtgttgacacttcatatttgtttttattatctactttattgaatattttatacagtgatgagcgcgctaataaccgacaaaatagcacaaaagatcacggaagcccatataaaaattttcagggggtggggcagacgtgaagatgttgcacattatattttgtgttctttggataaccatatatagttaacagcacccgaaaagccaggggggcacggtttgttttgttgtatgcacacttctgaaataattatatattatgatgtatttgatttaaaatgaattcagaatttttttttgtaatttggcaactatgtcaacttagatctctgacgtagataatgacgtgtaacggtatttatactgtaccaaccatatgtaatttactattttatcttggaataaaatagtaaagtatattgttaacgtaaaattttgcaatattatattattttgattaatagaatgatgtattcagcaataacctcacgttttttagctatgctctatctataacaacttctgaatttattattaaagtctagatggcaataaaattgtatttttgatagacttttaattttaaattacaatttaactactttatacaaaatttacttttctaagggccggtttttcagtgctgggttaatcgatttattttttggtcaccgaaatattcatgtttaatcagtttttcagtactagattagagcttaaactcgtttaagttaaccacgattttaaccgatcctcgttagatggtttaactccgaattttgtggttacgcttgcgcattggtgcagtgaatgcatcatgtttattttttgagtacctgccaacctgtctgagagaagggattagttgggttatgttattttcttttatcgcgggaagtattctaatacctccttactattataaggaaattattattattgaaattataaatttttatcgttattatataggaaggaattataaggaaatatatttaaatataactgtaacaggtacctacgtttacacttactgtaacaggatttaatgcattattcctagtaatatttttaaaaagattattttatatttgtctacacagcaaaatacttaattatttaccaaacagtccgacttcttaattgctggtcaatctgttcaaatagtgataagaccgtggtctttgacaaacaaaaccggaaaaaaagtctaaatcgtcccagtaattcgaattattttctgttatgaaaccgagttagacgttatgaactaaacaaagattccgaacttgatattgcattgcattaatcattttttaaatttggttatgaagttgttttttatttatttttctgtcaaattatcattatttctcgaattgtacatgcgctcgtacagttactgctgccaacagaagaaaaaaagtggttagctaaccgagattttcttaacttgatttagagcactgaaaaacgctatgagggttaaaatattggttaaaatttaaactaggttagctaaccaaaattttaaccgctcactgaaaaaccgggcctaaatgtcatgtaaatctttgattttatttagaattatatatactatcacggttcatcgattttaatctcatactgtcaactttcgcccaatccatttttgagtgcgggtataatccgtgtttatccttgactatccagaaggcatcgatcacttccccgcttttatcatcagaaacctgctctagatgcatgtgtgatgaattgtaaaccttgagacggctatatccgtagtcgctacttctgaacgctgaccattcgggtaggtctttaacaaaactgtctgtgccttcatcgcagccggccgagccagtggtgaactgtacaggagcccctggatttacgtaaggctgctcgtagctcccattgtaaacggtgtaattataaacaggccacagcctttcataagaatgctcatgggcccatatagctaaatcgactccataattgtaaagcaagttttccaatccgaagaattgtaagaaaggcaatcctactcttgttatggtttcgtgatgtgtacagtcatcatgatcagtgttggaacagtacatagggcgatgacccatcactataatccatggttgcttttctctgttttcgggtaaattcgccgttgccaagtcttgttccagccactcgtattggaatacgagaggtttaatgccgtagtccaggaaataataaacctctgtagatatagagataatatgcatcggaccaatgttaatgctgtacatgggtgaatttagaccaccaggcatcgagaatctgtatcgatagttactaaaattgtaagcctcttcatgatttccaggcaagtcatatacggaacgtatgctgcaaccggttctatttgtctcataaattcatcaccaatgagagcattgtctgagtccatatcatatgcaaaatctccaacgtgtagaatggcatcatacaaccctctctgagtttcttcttgtagtctagttaaagatttagcattatcattacccatgtctccataaacagctaaatgtggctgccagtctggcgaatttggagccgttttgaaggtaaatatatttgaccatcccaagtcactcccacaatgatacagatatgtacttcctggtgttaagttctttaggacaacagaatgaatgtgttgtgatctctgctctttacccccatctacaaataatgacgacgtcccattagctgtaagaactaaacctcctatgccatattcaactagggactgttttgtgtcatcaaaggtggaccaagttaccacaatatcataaatattatttccataggcgatatggatttgttccggctgataatagtaaactgataaagatacctgtataaaactaaaacaaaagaatattttcccccacattttgctcaaaactaatgttagtatattaggaataaaataaaaccacaaatttcttcatagaaatacactcaatctcaactcaaccaataaaatcttcggtactgggctactggtctggag

SEQ ID NO: 724 - DNA, 7809 bp, Diabrotica virgifera
  SmartBlast Evalue=1E-165; Info=Iron/zinc purple acid phosphatase-like protein n=1 Tax=Camponotus floridanus RepID= E2AEF0_9HYME
ttttaatttcgtggatgtttataattaatttcataagaggtaacttcatgtgactatcctatatgactaacttaaaaactatatatttactgtctaaaaatccaattggtatcacattattttaaataagtattatataataaatttatcaatctcgttagttttcagtaattcaataaaaactctgaaatttaattaacgtaactgataataaagcaaaataaaatcacaacaaaataaaatttcttttctggggaagatgcttcctcgcaaaaggataccagcctttaatattatgtgtaatccccattccacgaatatacgaccctcctggatcatcgcgacaacgaacattttactgtgaaaaatatgaagaacgaaagtaaattgcaaattatattgttgtttattggagtaattattatagcaaagtactttcgtacttcttatgttgcacactaaaatattcgttgtcgcgacaatccaaaacagtctcatattcgtggaatacaccgtatagatactaaagcaaaagaaaaaagagaaaggaacttggaactgagagcttttgagtagcttaacctggttagtaggagctacataaaaataaactgtctgtctaatacggattcaagaattatgacaaattatgattttcgtctttttcaagtgtcttgcattttcttatgataactaaattatcttaattttctattgcatgtaagtatactgttctcaagctatttccttgtggcatcttatggttcgtacagtataaataccgttgcgcgtcatagtaggtaacgtcacacgacaccaacacaaaatatttaagtcgtaggtctgttccttttagaatcgtttagccaagtacactggaattacagccactaggcatattttattacatgaggcgctcagagcaacagtggcctaaccccaaaaacgaagtttcgaaataaatgctctgcattcgtatttccattgtgcttatgggatggcgctacaatttacgtagtgccatttagccaaatatagaggtaggttttgtagacccttattaatctgaagatttagggctagttgttcgaacgctaattagaaatggaatgcactgatcattatcaaatatttcattacaattatatttgattaagcgtacttctgacagatgtcacattttgaggttatgttgacattgttgactgatttattttattattttggttttaatctaaaataaaccataattaaactctttctgatgttaatttattgtttttacttacaaatcaataacaatagtaagcaatttttaataatttaacgactgcggctatattttaattactgctttacctacaatcaatgaatgattagtgttttacatgtatttttgatgtctcgatttgattcccatcaagaaaattgattacaataaactgattgattataatcaacttcttgattagcgttcgaacaaccggcccttaatgttgctgcccttattgatatattaatctaaaaattctcaatttgtggcttaggccactgttgctctaagcgcctcatataggcgtaaatataatatttgaagatttctattaatgtaaacttataggccttgggcccgcatatacaactattattcatgaccacaccgctgaaaccccttgtacttgccatctgggcggagtcggacaaatcctgagcttggcgcaccatggcagtggggcgcttgtccgtcaagcggtgacgaagttgtcaaccccatgcaagaaaaaaattgatcaccacattggtcattctatcccaatcaatagtttccatcatataaacaacgaaaacaatttgtcggacaaaaatactggggcatatgacgcgtcggacacgccaaatatgtcaaattcatgaaaataacaaacaccaccacatggataattttaacggtatctaccataaaacatttttacaacaatgtggcaaccttgtcggacaactttcacggggcacatgcgcagtcggacgcgccgaagatgtcaatttcctgaaatttccctatttacaaccatttttccgacaacattagtaggttataagtaattatattcttaatcaaaaaatcaaagtgtcggacaaaaatattggggcaactcgacagtcggacaaaaaatttaatttttattagtaaagtatactttcaaattatgctgggttcgtgtatcccttatctttacaaccatttttccgacaaaagtagtaggttacaagtaattatattcttaaacaaaaaatataattgtctgacaaaaatgttggggcaaacgaacagaaaacttaattcttttaggctatcgacgaggaggtattatcaaaaaaaaaaatttaaaacagtgtttctcggttacttttgaatcgatttagctgaaaattggtacacacactaagtaaagcatttaaaagggtctgacgtagatcggaacccaaaattttcttaaaaaattttccgacaagagggaaaattttagaaaaattgtgatccgataatttgtgtacatactccttgaacaacgacaaacatcgttctgtatttttttctcgaattaaaaaaaaaattcagcacatgtatcaggttataagtagttatattccaaatcaaaaaatctaagtgtccgacaaaaatattggggcaaatccaaagtcagacaaaaaatttaatttttattgataaactatacttttaaattatgctgggttcgtgtatcccttatctttacaaccattttccgacaaaggtagttagttacaagtaattatatccttaaacaaaaaatgtaattgtttgacaaaaatcttggggcaaacgaagagaaaacttaattcttttaggctatcgacgagaaagtaatatcaaaaaattttaaaagagttttctcggttatttttgaatcgatttagctcaaaattggtacacacgctaagtaaaacatttaaaagggtatgacgtagagctgaaaattttagaaaaattgtgatctgatatttgcttacatactgcttgaacaacgacaaacatcgttctgtagttttttttttccaattaaaaaaaaatttccgacacaagtatcaggttataagtagttatattctaaatcaaaaaatctaatatttatattcaccatttaatgaatttaatattcaccattggcgcgcatacgggtaatatgagccgaaaaatacgtaatttaatatgaagtcaaaaatgtataaaaattaatttttttttaaattgtaccaaaacgccccattatttttgtccgacaagtgatccaatatgcattacacatgtaaaaaaacagtacaaaataaaaataacatctgtggtaataaataaaaaattttcaggaaattgacatcttcggcgcgtccgactgcgcatatgccccgtgaaaattgtccgacaaggttaccacattattgtaaaaaggttttatggtagataccgttaaaattatccatgtggtaataaatttattattttcataaattttaagttattttttgggtgtaactacaatgatattatgctaaaaatgatggtgtatcgcatatttaaaatgcgtttatctcgaaaacggttgagtttaggaagatgaaagaagtataccttttttaagtaaaactaataggaaaataaaaattttaatgtcaaaattatacagagtgagggataaaaaaattaaacgtaataaataagtgctgaaaggcatatgtggcgccctctgggcaatgcataatttttggtaaggaatttagatttctcgactcaagaaacctccagatataaaatttcatgttgttatctcatacctatcaggaaatattcaataataaataaaaaaaaagtttaactttgacaccctgtatctcggctattataaactttgtactaaggtaagttagcttaaatcggcctattttaacctcaggaacctgaggttaagctatggcccattctttaccaaacaccctgtatgcataaaaattactttttcttttaattgtaccaaaacgccccattatttttgtccgacaagtgatccaatatgcattacacatgtaaaagaacagtacaaaataaaaatgacatctgtggtaataaataaaaaattttcaggaaattgacatcttcggcgcgtccgactgcgcatatgccccgcgaaaattgtccgacaaggccaccacaccattgtaaaaaggccccatgatagataccgtcaaaattatcgatgtggcaacaaatttatcattttcacaaatttgacatacttcagcgcgtccgacgcgtcatacgccccaacacttttgtccgacaaaattgttttcgccgtttatatgataaaatccattgattacaatagaatgaccaatgtggtaataaattcccttcttgcataaaattgacaacttcgtcaccgcttgacagacaaacgccccaccaccacaatgcgccaagctcaaaatttgtccgactccacccaaataacaagtacaaaaagtttcaacggtgtggtcacaaataataattgtatatgcgggcccaaggcctattaaagaaatgcaccataacttgtttcatttaatctgtataagtggattacgaagcatatttgtccggatcacaactgtgatcgagcgaaggtgatattttggcataaattggtaacacttatttgacagttgcggtgttgacacttcatatttgtttttattatctactttattgaatattttatacagtgatgagcgcgctaataaccgacaaaatagcacaaaagatcacggaagcccatataaaaattttcagggggtggggcagacgtgaagatgttgcacattatattttgtgttctttggataaccatatatagttaacagcacccgaaaagccaggggggcacggtttgttttgttgtatgcacacttctgaaataattatatattatgatgtatttgatttaaaatgaattcagaatttttttttgtaatttggcaactatgtcaacttagatctctgacgtagataatgacgtgtaacggtatttatactgtaccaaccatatgtaatttactattttatcttggaataaaatagtaaagtatattgttaacgtaaaattttgcaatattatattattttgattaatagaatgatgtattcagcaataacctcacgttttttagctatgctctatctataacaacttctgaatttattattaaagtctagatggcaataaaattgtatttttgatagacttttaattttaaattacaatttaactactttatacaaaatttacttttctaagggccggtttttcagtgctgggttaatcgatttattttttggtcaccgaaatattcatgtttaatcagtttttcagtactagattagagcttaaactcgtttaagttaaccacgattttaaccgatcctcgttagatggtttaactccgaattttgtggttacgcttgcgcattggtgcagtgaatgcatcatgtttattttttgagtacctgccaacctgtctgagagaagggattagttgggttatgttattttcttttatcgcgggaagtattctaatacctccttactattataaggaaattattattattgaaattataaatttttatcgttattatataggaaggaattataaggaaatatatttaaatataactgtaacaggtacctacgtttacacttactgtaacaggatttaatgcattattcctagtaatatttttaaaaagattattttatatttgtctacacagcaaaatacttaattatttaccaaacagtccgacttcttaattgctggtcaatctgttcaaatagtgataagaccgtggtctttgacaaacaaaaccggaaaaaaagtctaaatcgtcccagtaattcgaattattttctgttatgaaaccgagttagacgttatgaactaaacaaagattccgaacttgatattgcattgcattaatcattttttaaatttggttatgaagttgttttttatttatttttctgtcaaattatcattatttctcgaattgtacatgcgctcgtacagttactgctgccaacagaagaaaaaaagtggttagctaaccgagattttcttaacttgatttagagcactgaaaaacgctatgagggttaaaatattggttaaaatttaaactaggttagctaaccaaaattttaaccgctcactgaaaaaccgggcctaaatgtcatgtaaatctttgattttatttagaattatatatactatcacggttcatcgattttaatctcatactgtcaactttcgcccaatccatttttgagtgcgggtataatccgtgtttatccttgactatccagaaggcatcgatcacttccccgcttttatcatcagaaacctgctctagatgcatgtgtgatgaattgtaaaccttgagacggctatatccgtagtcgctacttctgaacgctgaccattcgggtaggtctttaacaaaactgtctgtgccttcatcgcagccggccgagccagtggtgaactgtacaggagcccctggatttacgtaaggctgctcgtagctcccattgtaaacggtgtaattataaacaggccacagcctttcataagaatgctcatgggcccatatagctaaatcgactccataattgtaaagcaagttttccaatccgaagaattgtaagaaaggcaatcctactcttgttatggtttcgtgatgtgtacagtcatcatgatcagtgttggaacagtacatagggcgatgacccatcactataatccatggttgcttttctctgttttcgggtaaattcgccgttgccaagtcttgttccagccactcgtattggaatacgagaggtttaatgccgtagtccaggaaataataaacctctgtagatatagagataatatgcatcggaccaatgttaatgctgtacatgggtgaatttagaccaccaggcatcgagaatctgtatcgatagttactaaaattgtaagcctcttcatgatttccaggcaagtcatatacggaacgtatgctgcaaccggttctatttgtctcataaattcatcaccaatgagagcattgtctgagtccatatcatatgcaaaatctccaacgtgtagaatggcatcatacaaccctctctgagtttcttcttgtagtctagttaaagatttagcattatcattacccatgtctccataaacagctaaatgtggctgccagtctggcgaatttggagccgttttgaaggtaaatatatttgaccatcccaagtcactcccacaatgatacagatatgtacttcctggtgttaagttctttaggacaacagaatgaatgtgttgtgatctctgctctttacccccatctacaaataatgacgacgtcccattagctgtaagaactaaacctcctatgccatattcaactagggactgttttgtgtcatcaaaggtggaccaagttaccacaatatcataaatattatttccataggcgatatggatttgttccggctgataatagtaaactgataaagatacctgtataaaactaaaacaaaagaatattttcccccacattttgctcaaaactaatgttagtatattaggaataaaataaaaccacaaatttcttcatagaaatacactcaatctcaactcaaccaataaaatcttcggtactgggctactggtctggag

SEQ ID NO: 725 - DNA, 7852 bp, Diabrotica virgifera
  SmartBlast Evalue=1E-165; Info=Iron/zinc purple acid phosphatase-like protein n=1 Tax=Camponotus floridanus RepID= E2AEF0_9HYME
ttttaatttcgtggatgtttataattaatttcataagaggtaacttcatgtgactatcctatatgactaacttaaaaactatatatttactgtctaaaaatccaattggtatcacattattttaaataagtattatataataaattatatatatattatataatattatataataatatataataaatttatcaatctcgttagttttcagtaattcaataaaaactctgaaatttaattaacgtaactgataataaagcaaaataaaatcacaacaaaataaaatttcttttctggggaagatgcttcctcgcaaaaggataccagcctttaatattatgtgtaatccccattccacgaatatacgaccctcctggatcatcgcgacaacgaacattttactgtgcaaaatatgaagaacgaaagtaaattgcaaattatattgttgtttattggagtaattattatagcaaagtactttcgtactttttatgttgcacactaaaatattcgttgtcgcgacaatccaaaacagtctcatattcgtggaatacaccgtatagatactaaagcaaaagaaaaaagggaaaggaacttggaactgagagcttttgagtagcttaacctggttagtaggagctacataaaaataaactgtctgtctaatacggattcaagaattatgacaaattatgattttcgtctttttcaagtgtcttgcattttcttatgataactaaattatcttaattttctattgcatgtaagtatactgttctcaagctatttccttgtggcatcttatggttcgtacagtataaataccgttgcgcgtcatagtaggtaacgtcacacgacaccaacacaaaatatttaagtcgtaggtctgttccttttagaatcgtttagccaagtacactggaattacagccactaggcatattttattacatgaggcgctcagagcaacagtggcctaaccccaaaaacgaagtttcgaaataaatgctctgcattcgtatttccattgtgcttatgggatggcgctacaatttacgtagtgccatttagccaaatatagaggtaggttttgtagacccttattaatctgaagatttagggctagttgttcgaacgctaattagaaatggaatgcactgatcattatcaaatatttcattacaattatatttgattaagcgtacttctgacagatgtcacattttgaggttatgttgacattgttgactgatttattttattattttggttttaatctaaaataaaccataattaaactctttctgatgttaatttattgtttttacttacaaatcaataacaatagtaagcaatttttaataatttaacgactgcggctatattttaattactgctttacctacaatcaatgaatgattagtgttttacatgtatttttgatgtctcgatttgattcccatcaagaaaattgattacaataaactgattgattataatcaacttcttgattagcgttcgaacaaccggcccttaatgttgctgcccttattgatatattaatctaaaaattctcaatttgtggcttaggccactgttgctctaagcgcctcatataggcgtaaatataatatttgaagatttctattaatgtaaacttataggccttgggcccgcatatacaactattattcatgaccacaccgctgaaaccccttgtacttgccatctgggcggagtcggacaaatcctgagcttggcgcaccatggcagtggggcgcttgtccgtcaagcggtgacgaagttgtcaaccccatgcaagaaaaaaattgatcaccacattggtcattctatcccaatcaatagtttccatcatataaacaacgaaaacaatttgtcggacaaaaatactggggcatatgacgcgtcggacacgccaaatatgtcaaattcatgaaaataacaaacaccaccacatggataattttaacggtatctaccataaaacatttttacaacaatgtggcaaccttgtcggacaactttcacggggcacatgcgcagtcggacgcgccgaagatgtcaatttcctgaaatttccctatttacaaccatttttccgacaacattagtaggttataagtaattatattcttaatcaaaaaatcaaagtgtcggacaaaaatattggggcaactcgacagtcggacaaaaaatttaatttttattagtaaagtatactttcaaattatgctgggttcgtgtatcccttatctttacaaccatttttccgacaaaagtagtaggttacaagtaattatattcttaaacaaaaaatataattgtctgacaaaaatgttggggcaaacgaacagaaaacttaattcttttaggctatcgacgaggaggtattatcaaaaaaaaaaatttaaaacagtgtttctcggttacttttgaatcgatttagctgaaaattggtacacacactaagtaaagcatttaaaagggtctgacgtagatcggaacccaaaattttcttaaaaaattttccgacaagagggaaaattttagaaaaattgtgatccgataatttgtgtacatactccttgaacaacgacaaacatcgttctgtatttttttctcgaattaaaaaaaaaattcagcacatgtatcaggttataagtagttatattccaaatcaaaaaatctaagtgtccgacaaaaatattggggcaaatccaaagtcagacaaaaaatttaatttttattgataaactatacttttaaattatgctgggttcgtgtatcccttatctttacaaccattttccgacaaaggtagttagttacaagtaattatatccttaaacaaaaaatgtaattgtttgacaaaaatcttggggcaaacgaagagaaaacttaattcttttaggctatcgacgagaaagtaatatcaaaaaattttaaaagagttttctcggttatttttgaatcgatttagctcaaaattggtacacacgctaagtaaaacatttaaaagggtatgacgtagagctgaaaattttagaaaaattgtgatctgatatttgcttacatactgcttgaacaacgacaaacatcgttctgtagttttttttttccaattaaaaaaaaatttccgacacaagtatcaggttataagtagttatattctaaatcaaaaaatctaatatttatattcaccatttaatgaatttaatattcaccattggcgcgcatacgggtaatatgagccgaaaaatacgtaatttaatatgaagtcaaaaatgtataaaaattaatttttttttaaattgtaccaaaacgccccattatttttgtccgacaagtgatccaatatgcattacacatgtaaaaaaacagtacaaaataaaaataacatctgtggtaataaataaaaaattttcaggaaattgacatcttcggcgcgtccgactgcgcatatgccccgtgaaaattgtccgacaaggttaccacattattgtaaaaaggttttatggtagataccgttaaaattatccatgtggtaataaatttattattttcataaattttaagttattttttgggtgtaactacaatgatattatgctaaaaatgatggtgtatcgcatatttaaaatgcgtttatctcgaaaacggttgagtttaggaagatgaaagaagtataccttttttaagtaaaactaataggaaaataaaaattttaatgtcaaaattatacagagtgagggataaaaaaattaaacgtaataaataagtgctgaaaggcatatgtggcgccctctgggcaatgcataatttttggtaaggaatttagatttctcgactcaagaaacctccagatataaaatttcatgttgttatctcatacctatcaggaaatattcaataataaataaaaaaaaagtttaactttgacaccctgtatctcggctattataaactttgtactaaggtaagttagcttaaatcggcctattttaacctcaggaacctgaggttaagctatggcccattctttaccaaacaccctgtatgcataaaaattactttttcttttaattgtaccaaaacgccccattatttttgtccgacaagtgatccaatatgcattacacatgtaaaagaacagtacaaaataaaaatgacatctgtggtaataaataaaaaattttcaggaaattgacatcttcggcgcgtccgactgcgcatatgccccgcgaaaattgtccgacaaggccaccacaccattgtaaaaaggccccatgatagataccgtcaaaattatcgatgtggcaacaaatttatcattttcacaaatttgacatacttcagcgcgtccgacgcgtcatacgccccaacacttttgtccgacaaaattgttttcgccgtttatatgataaaatccattgattacaatagaatgaccaatgtggtaataaattcccttcttgcataaaattgacaacttcgtcaccgcttgacagacaaacgccccaccaccacaatgcgccaagctcaaaatttgtccgactccacccaaataacaagtacaaaaagtttcaacggtgtggtcacaaataataattgtatatgcgggcccaaggcctattaaagaaatgcaccataacttgtttcatttaatctgtataagtggattacgaagcatatttgtccggatcacaactgtgatcgagcgaaggtgatattttggcataaattggtaacacttatttgacagttgcggtgttgacacttcatatttgtttttattatctactttattgaatattttatacagtgatgagcgcgctaataaccgacaaaatagcacaaaagatcacggaagcccatataaaaattttcagggggtggggcagacgtgaagatgttgcacattatattttgtgttctttggataaccatatatagttaacagcacccgaaaagccaggggggcacggtttgttttgttgtatgcacacttctgaaataattatatattatgatgtatttgatttaaaatgaattcagaatttttttttgtaatttggcaactatgtcaacttagatctctgacgtagataatgacgtgtaacggtatttatactgtaccaaccatatgtaatttactattttatcttggaataaaatagtaaagtatattgttaacgtaaaattttgcaatattatattattttgattaatagaatgatgtattcagcaataacctcacgttttttagctatgctctatctataacaacttctgaatttattattaaagtctagatggcaataaaattgtatttttgatagacttttaattttaaattacaatttaactactttatacaaaatttacttttctaagggccggtttttcagtgctgggttaatcgatttattttttggtcaccgaaatattcatgtttaatcagtttttcagtactagattagagcttaaactcgtttaagttaaccacgattttaaccgatcctcgttagatggtttaactccgaattttgtggttacgcttgcgcattggtgcagtgaatgcatcatgtttattttttgagtacctgccaacctgtctgagagaagggattagttgggttatgttattttcttttatcgcgggaagtattctaatacctccttactattataaggaaattattattattgaaattataaatttttatcgttattatataggaaggaattataaggaaatatatttaaatataactgtaacaggtacctacgtttacacttactgtaacaggatttaatgcattattcctagtaatatttttaaaaagattattttatatttgtctacacagcaaaatacttaattatttaccaaacagtccgacttcttaattgctggtcaatctgttcaaatagtgataagaccgtggtctttgacaaacaaaaccggaaaaaaagtctaaatcgtcccagtaattcgaattattttctgttatgaaaccgagttagacgttatgaactaaacaaagattccgaacttgatattgcattgcattaatcattttttaaatttggttatgaagttgttttttatttatttttctgtcaaattatcattatttctcgaattgtacatgcgctcgtacagttactgctgccaacagaagaaaaaaagtggttagctaaccgagattttcttaacttgatttagagcactgaaaaacgctatgagggttaaaatattggttaaaatttaaactaggttagctaaccaaaattttaaccgctcactgaaaaaccgggcctaaatgtcatgtaaatctttgattttatttagaattatatatactatcacggttcatcgattttaatctcatactgtcaactttcgcccaatccatttttgagtgcgggtataatccgtgtttatccttgactatccagaaggcatcgatcacttccccgcttttatcatcagaaacctgctctagatgcatgtgtgatgaattgtaaaccttgagacggctatatccgtagtcgctacttctgaacgctgaccattcgggtaggtctttaacaaaactgtctgtgccttcatcgcagccggccgagccagtggtgaactgtacaggagcccctggatttacgtaaggctgctcgtagctcccattgtaaacggtgtaattataaacaggccacagcctttcataagaatgctcatgggcccatatagctaaatcgactccataattgtaaagcaagttttccaatccgaagaattgtaagaaaggcaatcctactcttgttatggtttcgtgatgtgtacagtcatcatgatcagtgttggaacagtacatagggcgatgacccatcactataatccatggttgcttttctctgttttcgggtaaattcgccgttgccaagtcttgttccagccactcgtattggaatacgagaggtttaatgccgtagtccaggaaataataaacctctgtagatatagagataatatgcatcggaccaatgttaatgctgtacatgggtgaatttagaccaccaggcatcgagaatctgtatcgatagttactaaaattgtaagcctcttcatgatttccaggcaagtcatatacggaacgtatgctgcaaccggttctatttgtctcataaattcatcaccaatgagagcattgtctgagtccatatcatatgcaaaatctccaacgtgtagaatggcatcatacaaccctctctgagtttcttcttgtagtctagttaaagatttagcattatcattacccatgtctccataaacagctaaatgtggctgccagtctggcgaatttggagccgttttgaaggtaaatatatttgaccatcccaagtcactcccacaatgatacagatatgtacttcctggtgttaagttctttaggacaacagaatgaatgtgttgtgatctctgctctttacccccatctacaaataatgacgacgtcccattagctgtaagaactaaacctcctatgccatattcaactagggactgttttgtgtcatcaaaggtggaccaagttaccacaatatcataaatattatttccataggcgatatggatttgttccggctgataatagtaaactgataaagatacctgtataaaactaaaacaaaagaatattttcccccacattttgctcaaaactaatgttagtatattaggaataaaataaaaccacaaatttcttcatagaaatacactcaatctcaactcaaccaataaaatcttcggtactgggctactggtctggag

SEQ ID NO: 726 - DNA, 7809 bp, Diabrotica virgifera
  SmartBlast Evalue=1E-165; Info=Iron/zinc purple acid phosphatase-like protein n=1 Tax=Camponotus floridanus RepID= E2AEF0_9HYME
ttttaatttcgtggatgtttataattaatttcataagaggtaacttcatgtgactatcctatatgactaacttaaaaactatatatttactgtctaaaaatccaattggtatcacattattttaaataagtattatataataaatttatcaatctcgttagttttcagtaattcaataaaaactctgaaatttaattaacgtaactgataataaagcaaaataaaatcacaacaaaataaaatttcttttctggggaagatgcttcctcgcaaaaggataccagcctttaatattatgtgtaatccccattccacgaatatacgaccctcctggatcatcgcgacaacgaacattttactgtgcaaaatatgaagaacgaaagtaaattgcaaattatattgttgtttattggagtaattattatagcaaagtactttcgtactttttatgttgcacactaaaatattcgttgtcgcgacaatccaaaacagtctcatattcgtggaatacaccgtatagatactaaagcaaaagaaaaaagggaaaggaacttggaactgagagcttttgagtagcttaacctggttagtaggagctacataaaaataaactgtctgtctaatacggattcaagaattatgacaaattatgattttcgtctttttcaagtgtcttgcattttcttatgataactaaattatcttaattttctattgcatgtaagtatactgttctcaagctatttccttgtggcatcttatggttcgtacagtataaataccgttgcgcgtcatagtaggtaacgtcacacgacaccaacacaaaatatttaagtcgtaggtctgttccttttagaatcgtttagccaagtacactggaattacagccactaggcatattttattacatgaggcgctcagagcaacagtggcctaaccccaaaaacgaagtttcgaaataaatgctctgcattcgtatttccattgtgcttatgggatggcgctacaatttacgtagtgccatttagccaaatatagaggtaggttttgtagacccttattaatctgaagatttagggctagttgttcgaacgctaattagaaatggaatgcactgatcattatcaaatatttcattacaattatatttgattaagcgtacttctgacagatgtcacattttgaggttatgttgacattgttgactgatttattttattattttggttttaatctaaaataaaccataattaaactctttctgatgttaatttattgtttttacttacaaatcaataacaatagtaagcaatttttaataatttaacgactgcggctatattttaattactgctttacctacaatcaatgaatgattagtgttttacatgtatttttgatgtctcgatttgattcccatcaagaaaattgattacaataaactgattgattataatcaacttcttgattagcgttcgaacaaccggcccttaatgttgctgcccttattgatatattaatctaaaaattctcaatttgtggcttaggccactgttgctctaagcgcctcatataggcgtaaatataatatttgaagatttctattaatgtaaacttataggccttgggcccgcatatacaactattattcatgaccacaccgctgaaaccccttgtacttgccatctgggcggagtcggacaaatcctgagcttggcgcaccatggcagtggggcgcttgtccgtcaagcggtgacgaagttgtcaaccccatgcaagaaaaaaattgatcaccacattggtcattctatcccaatcaatagtttccatcatataaacaacgaaaacaatttgtcggacaaaaatactggggcatatgacgcgtcggacacgccaaatatgtcaaattcatgaaaataacaaacaccaccacatggataattttaacggtatctaccataaaacatttttacaacaatgtggcaaccttgtcggacaactttcacggggcacatgcgcagtcggacgcgccgaagatgtcaatttcctgaaatttccctatttacaaccatttttccgacaacattagtaggttataagtaattatattcttaatcaaaaaatcaaagtgtcggacaaaaatattggggcaactcgacagtcggacaaaaaatttaatttttattagtaaagtatactttcaaattatgctgggttcgtgtatcccttatctttacaaccatttttccgacaaaagtagtaggttacaagtaattatattcttaaacaaaaaatataattgtctgacaaaaatgttggggcaaacgaacagaaaacttaattcttttaggctatcgacgaggaggtattatcaaaaaaaaaaatttaaaacagtgtttctcggttacttttgaatcgatttagctgaaaattggtacacacactaagtaaagcatttaaaagggtctgacgtagatcggaacccaaaattttcttaaaaaattttccgacaagagggaaaattttagaaaaattgtgatccgataatttgtgtacatactccttgaacaacgacaaacatcgttctgtatttttttctcgaattaaaaaaaaaattcagcacatgtatcaggttataagtagttatattccaaatcaaaaaatctaagtgtccgacaaaaatattggggcaaatccaaagtcagacaaaaaatttaatttttattgataaactatacttttaaattatgctgggttcgtgtatcccttatctttacaaccattttccgacaaaggtagttagttacaagtaattatatccttaaacaaaaaatgtaattgtttgacaaaaatcttggggcaaacgaagagaaaacttaattcttttaggctatcgacgagaaagtaatatcaaaaaattttaaaagagttttctcggttatttttgaatcgatttagctcaaaattggtacacacgctaagtaaaacatttaaaagggtatgacgtagagctgaaaattttagaaaaattgtgatctgatatttgcttacatactgcttgaacaacgacaaacatcgttctgtagttttttttttccaattaaaaaaaaatttccgacacaagtatcaggttataagtagttatattctaaatcaaaaaatctaatatttatattcaccatttaatgaatttaatattcaccattggcgcgcatacgggtaatatgagccgaaaaatacgtaatttaatatgaagtcaaaaatgtataaaaattaatttttttttaaattgtaccaaaacgccccattatttttgtccgacaagtgatccaatatgcattacacatgtaaaaaaacagtacaaaataaaaataacatctgtggtaataaataaaaaattttcaggaaattgacatcttcggcgcgtccgactgcgcatatgccccgtgaaaattgtccgacaaggttaccacattattgtaaaaaggttttatggtagataccgttaaaattatccatgtggtaataaatttattattttcataaattttaagttattttttgggtgtaactacaatgatattatgctaaaaatgatggtgtatcgcatatttaaaatgcgtttatctcgaaaacggttgagtttaggaagatgaaagaagtataccttttttaagtaaaactaataggaaaataaaaattttaatgtcaaaattatacagagtgagggataaaaaaattaaacgtaataaataagtgctgaaaggcatatgtggcgccctctgggcaatgcataatttttggtaaggaatttagatttctcgactcaagaaacctccagatataaaatttcatgttgttatctcatacctatcaggaaatattcaataataaataaaaaaaaagtttaactttgacaccctgtatctcggctattataaactttgtactaaggtaagttagcttaaatcggcctattttaacctcaggaacctgaggttaagctatggcccattctttaccaaacaccctgtatgcataaaaattactttttcttttaattgtaccaaaacgccccattatttttgtccgacaagtgatccaatatgcattacacatgtaaaagaacagtacaaaataaaaatgacatctgtggtaataaataaaaaattttcaggaaattgacatcttcggcgcgtccgactgcgcatatgccccgcgaaaattgtccgacaaggccaccacaccattgtaaaaaggccccatgatagataccgtcaaaattatcgatgtggcaacaaatttatcattttcacaaatttgacatacttcagcgcgtccgacgcgtcatacgccccaacacttttgtccgacaaaattgttttcgccgtttatatgataaaatccattgattacaatagaatgaccaatgtggtaataaattcccttcttgcataaaattgacaacttcgtcaccgcttgacagacaaacgccccaccaccacaatgcgccaagctcaaaatttgtccgactccacccaaataacaagtacaaaaagtttcaacggtgtggtcacaaataataattgtatatgcgggcccaaggcctattaaagaaatgcaccataacttgtttcatttaatctgtataagtggattacgaagcatatttgtccggatcacaactgtgatcgagcgaaggtgatattttggcataaattggtaacacttatttgacagttgcggtgttgacacttcatatttgtttttattatctactttattgaatattttatacagtgatgagcgcgctaataaccgacaaaatagcacaaaagatcacggaagcccatataaaaattttcagggggtggggcagacgtgaagatgttgcacattatattttgtgttctttggataaccatatatagttaacagcacccgaaaagccaggggggcacggtttgttttgttgtatgcacacttctgaaataattatatattatgatgtatttgatttaaaatgaattcagaatttttttttgtaatttggcaactatgtcaacttagatctctgacgtagataatgacgtgtaacggtatttatactgtaccaaccatatgtaatttactattttatcttggaataaaatagtaaagtatattgttaacgtaaaattttgcaatattatattattttgattaatagaatgatgtattcagcaataacctcacgttttttagctatgctctatctataacaacttctgaatttattattaaagtctagatggcaataaaattgtatttttgatagacttttaattttaaattacaatttaactactttatacaaaatttacttttctaagggccggtttttcagtgctgggttaatcgatttattttttggtcaccgaaatattcatgtttaatcagtttttcagtactagattagagcttaaactcgtttaagttaaccacgattttaaccgatcctcgttagatggtttaactccgaattttgtggttacgcttgcgcattggtgcagtgaatgcatcatgtttattttttgagtacctgccaacctgtctgagagaagggattagttgggttatgttattttcttttatcgcgggaagtattctaatacctccttactattataaggaaattattattattgaaattataaatttttatcgttattatataggaaggaattataaggaaatatatttaaatataactgtaacaggtacctacgtttacacttactgtaacaggatttaatgcattattcctagtaatatttttaaaaagattattttatatttgtctacacagcaaaatacttaattatttaccaaacagtccgacttcttaattgctggtcaatctgttcaaatagtgataagaccgtggtctttgacaaacaaaaccggaaaaaaagtctaaatcgtcccagtaattcgaattattttctgttatgaaaccgagttagacgttatgaactaaacaaagattccgaacttgatattgcattgcattaatcattttttaaatttggttatgaagttgttttttatttatttttctgtcaaattatcattatttctcgaattgtacatgcgctcgtacagttactgctgccaacagaagaaaaaaagtggttagctaaccgagattttcttaacttgatttagagcactgaaaaacgctatgagggttaaaatattggttaaaatttaaactaggttagctaaccaaaattttaaccgctcactgaaaaaccgggcctaaatgtcatgtaaatctttgattttatttagaattatatatactatcacggttcatcgattttaatctcatactgtcaactttcgcccaatccatttttgagtgcgggtataatccgtgtttatccttgactatccagaaggcatcgatcacttccccgcttttatcatcagaaacctgctctagatgcatgtgtgatgaattgtaaaccttgagacggctatatccgtagtcgctacttctgaacgctgaccattcgggtaggtctttaacaaaactgtctgtgccttcatcgcagccggccgagccagtggtgaactgtacaggagcccctggatttacgtaaggctgctcgtagctcccattgtaaacggtgtaattataaacaggccacagcctttcataagaatgctcatgggcccatatagctaaatcgactccataattgtaaagcaagttttccaatccgaagaattgtaagaaaggcaatcctactcttgttatggtttcgtgatgtgtacagtcatcatgatcagtgttggaacagtacatagggcgatgacccatcactataatccatggttgcttttctctgttttcgggtaaattcgccgttgccaagtcttgttccagccactcgtattggaatacgagaggtttaatgccgtagtccaggaaataataaacctctgtagatatagagataatatgcatcggaccaatgttaatgctgtacatgggtgaatttagaccaccaggcatcgagaatctgtatcgatagttactaaaattgtaagcctcttcatgatttccaggcaagtcatatacggaacgtatgctgcaaccggttctatttgtctcataaattcatcaccaatgagagcattgtctgagtccatatcatatgcaaaatctccaacgtgtagaatggcatcatacaaccctctctgagtttcttcttgtagtctagttaaagatttagcattatcattacccatgtctccataaacagctaaatgtggctgccagtctggcgaatttggagccgttttgaaggtaaatatatttgaccatcccaagtcactcccacaatgatacagatatgtacttcctggtgttaagttctttaggacaacagaatgaatgtgttgtgatctctgctctttacccccatctacaaataatgacgacgtcccattagctgtaagaactaaacctcctatgccatattcaactagggactgttttgtgtcatcaaaggtggaccaagttaccacaatatcataaatattatttccataggcgatatggatttgttccggctgataatagtaaactgataaagatacctgtataaaactaaaacaaaagaatattttcccccacattttgctcaaaactaatgttagtatattaggaataaaataaaaccacaaatttcttcatagaaatacactcaatctcaactcaaccaataaaatcttcggtactgggctactggtctggag

SEQ ID NO: 727 - DNA, 6907 bp, Diabrotica virgifera
  SmartBlast Evalue=1E-165; Info=Iron/zinc purple acid phosphatase-like protein n=1 Tax=Camponotus floridanus RepID= E2AEF0_9HYME
tctatccttagaaaaattcgaaatcatcagatttaagggccggttgttcgaacgctaatcaaaactgatcattatcaaatatttaattacaattatatttgattaagcgtacttctgacagatgtcgcattttgaggttatgttgactgatttattttattattttggttttaatttaaaataaaacataattaaactctttctgatgttaatttattgtttttacttacaaatcaataacaatagtaagcaatttttaataatttaacgactgcggctatattttaattactgctttacctacaatcaatgaatgattagtgttttacatgtatttttgatgtctcgatttgattcccatcaagaaaattgattacaataaactgattgattataatcaacttcttgattagcgttcgaacaaccggcccttaatgttgctgcccttattgatatattaatctaaaaattctcaatttgtggcttaggccactgttgctctaagcgcctcatataggcgtaaatataatatttgaagatttctattaatgtaaacttataggccttgggcccgcatatacaactattattcatgaccacaccgctgaaaccccttgtacttgccatctgggcggagtcggacaaatcctgagcttggcgcaccatggcagtggggcgcttgtccgtcaagcggtgacgaagttgtcaaccccatgcaagaaaaaaattgatcaccacattggtcattctatcccaatcaatagtttccatcatataaacaacgaaaacaatttgtcggacaaaaatactggggcatatgacgcgtcggacacgccaaatatgtcaaattcatgaaaataacaaacaccaccacatggataattttaacggtatctaccataaaacatttttacaacaatgtggcaaccttgtcggacaactttcacggggcacatgcgcagtcggacgcgccgaagatgtcaatttcctgaaatttccctatttacaaccatttttccgacaacattagtaggttataagtaattatattcttaatcaaaaaatcaaagtgtcggacaaaaatattggggcaactcgacagtcggacaaaaaatttaatttttattagtaaagtatactttcaaattatgctgggttcgtgtatcccttatctttacaaccatttttccgacaaaagtagtaggttacaagtaattatattcttaaacaaaaaatataattgtctgacaaaaatgttggggcaaacgaacagaaaacttaattcttttaggctatcgacgaggaggtattatcaaaaaaaaaaatttaaaacagtgtttctcggttacttttgaatcgatttagctgaaaattggtacacacactaagtaaagcatttaaaagggtctgacgtagatcggaacccaaaattttcttaaaaaattttccgacaagagggaaaattttagaaaaattgtgatccgataatttgtgtacatactccttgaacaacgacaaacatcgttctgtatttttttctcgaattaaaaaaaaaattcagcacatgtatcaggttataagtagttatattccaaatcaaaaaatctaagtgtccgacaaaaatattggggcaaatccaaagtcagacaaaaaatttaatttttattgataaactatacttttaaattatgctgggttcgtgtatcccttatctttacaaccattttccgacaaaggtagttagttacaagtaattatatccttaaacaaaaaatgtaattgtttgacaaaaatcttggggcaaacgaagagaaaacttaattcttttaggctatcgacgagaaagtaatatcaaaaaattttaaaagagttttctcggttatttttgaatcgatttagctcaaaattggtacacacgctaagtaaaacatttaaaagggtatgacgtagagctgaaaattttagaaaaattgtgatctgatatttgcttacatactgcttgaacaacgacaaacatcgttctgtagttttttttttccaattaaaaaaaaatttccgacacaagtatcaggttataagtagttatattctaaatcaaaaaatctaatatttatattcaccatttaatgaatttaatattcaccattggcgcgcatacgggtaatatgagccgaaaaatacgtaatttaatatgaagtcaaaaatgtataaaaattaatttttttttaaattgtaccaaaacgccccattatttttgtccgacaagtgatccaatatgcattacacatgtaaaaaaacagtacaaaataaaaataacatctgtggtaataaataaaaaattttcaggaaattgacatcttcggcgcgtccgactgcgcatatgccccgtgaaaattgtccgacaaggttaccacattattgtaaaaaggttttatggtagataccgttaaaattatccatgtggtaataaatttattattttcataaattttaagttattttttgggtgtaactacaatgatattatgctaaaaatgatggtgtatcgcatatttaaaatgcgtttatctcgaaaacggttgagtttaggaagatgaaagaagtataccttttttaagtaaaactaataggaaaataaaaattttaatgtcaaaattatacagagtgagggataaaaaaattaaacgtaataaataagtgctgaaaggcatatgtggcgccctctgggcaatgcataatttttggtaaggaatttagatttctcgactcaagaaacctccagatataaaatttcatgttgttatctcatacctatcaggaaatattcaataataaataaaaaaaaagtttaactttgacaccctgtatctcggctattataaactttgtactaaggtaagttagcttaaatcggcctattttaacctcaggaacctgaggttaagctatggcccattctttaccaaacaccctgtatgcataaaaattactttttcttttaattgtaccaaaacgccccattatttttgtccgacaagtgatccaatatgcattacacatgtaaaagaacagtacaaaataaaaatgacatctgtggtaataaataaaaaattttcaggaaattgacatcttcggcgcgtccgactgcgcatatgccccgcgaaaattgtccgacaaggccaccacaccattgtaaaaaggccccatgatagataccgtcaaaattatcgatgtggcaacaaatttatcattttcacaaatttgacatacttcagcgcgtccgacgcgtcatacgccccaacacttttgtccgacaaaattgttttcgccgtttatatgataaaatccattgattacaatagaatgaccaatgtggtaataaattcccttcttgcataaaattgacaacttcgtcaccgcttgacagacaaacgccccaccaccacaatgcgccaagctcaaaatttgtccgactccacccaaataacaagtacaaaaagtttcaacggtgtggtcacaaataataattgtatatgcgggcccaaggcctattaaagaaatgcaccataacttgtttcatttaatctgtataagtggattacgaagcatatttgtccggatcacaactgtgatcgagcgaaggtgatattttggcataaattggtaacacttatttgacagttgcggtgttgacacttcatatttgtttttattatctactttattgaatattttatacagtgatgagcgcgctaataaccgacaaaatagcacaaaagatcacggaagcccatataaaaattttcagggggtggggcagacgtgaagatgttgcacattatattttgtgttctttggataaccatatatagttaacagcacccgaaaagccaggggggcacggtttgttttgttgtatgcacacttctgaaataattatatattatgatgtatttgatttaaaatgaattcagaatttttttttgtaatttggcaactatgtcaacttagatctctgacgtagataatgacgtgtaacggtatttatactgtaccaaccatatgtaatttactattttatcttggaataaaaccacaattatttaagattaaaattaggtaaatttatttgacgtttcgacttccacttcggaaatcgttgtattttgatttcgatttccgaagtggacgtcgaaacgtcaaataaatttaattttaaacttaaattgtggttttattctcaaataaaatagtaaagtatattgttaacgtaaaattttgcaatattatattattttgattaatagaatgatgtattcagcaataacctcacgttttttagctatgctctatctataacaacttctgaatttattattaaagtctagatggcaataaaattgtatttttgatagacttttaattttaaattacaatttaactactttatacaaaatttacttttctaagggccggtttttcagtgctgggttaatcgatttattttttggtcaccgaaatattcatgtttaatcagtttttcagtactagattagagcttaaactcgtttaagttaaccacgattttaaccgatcctcgttagatggtttaactccgaattttgtggttacgcttgcgcattggtgcagtgaatgcatcatgtttattttttgagtacctgccaacctgtctgagagaagggattagttgggttatgttattttcttttatcgcgggaagtattctaatacctccttactattataaggaaattattattattgaaattataaatttttatcgttattatataggaaggaattataaggaaatatatttaaatataactgtaacaggtacctacgtttacacttactgtaacaggatttaatgcattattcctagtaatatttttaaaaagattattttatatttgtctacacagcaaaatacttaattatttaccaaacagtccgacttcttaattgctggtcaatctgttcaaatagtgataagaccgtggtctttgacaaacaaaaccggaaaaaaagtctaaatcgtcccagtaattcgaattattttctgttatgaaaccgagttagacgttatgaactaaacaaagattccgaacttgatattgcattgcattaatcattttttaaatttggttatgaagttgttttttatttatttttctgtcaaattatcattatttctcgaattgtacatgcgctcgtacagttactgctgccaacagaagaaaaaaagtggttagctaaccgagattttcttaacttgatttagagcactgaaaaacgctatgagggttaaaatattggttaaaatttaaactaggttagctaaccaaaattttaaccgctcactgaaaaaccgggcctaaatgtcatgtaaatctttgattttatttagaattatatatactatcacggttcatcgattttaatctcatactgtcaactttcgcccaatccatttttgagtgcgggtataatccgtgtttatccttgactatccagaaggcatcgatcacttccccgcttttatcatcagaaacctgctctagatgcatgtgtgatgaattgtaaaccttgagacggctatatccgtagtcgctacttctgaacgctgaccattcgggtaggtctttaacaaaactgtctgtgccttcatcgcagccggccgagccagtggtgaactgtacaggagcccctggatttacgtaaggctgctcgtagctcccattgtaaacggtgtaattataaacaggccacagcctttcataagaatgctcatgggcccatatagctaaatcgactccataattgtaaagcaagttttccaatccgaagaattgtaagaaaggcaatcctactcttgttatggtttcgtgatgtgtacagtcatcatgatcagtgttggaacagtacatagggcgatgacccatcactataatccatggttgcttttctctgttttcgggtaaattcgccgttgccaagtcttgttccagccactcgtattggaatacgagaggtttaatgccgtagtccaggaaataataaacctctgtagatatagagataatatgcatcggaccaatgttaatgctgtacatgggtgaatttagaccaccaggcatcgagaatctgtatcgatagttactaaaattgtaagcctcttcatgatttccaggcaagtcatatacggaacgtatgctgcaaccggttctatttgtctcataaattcatcaccaatgagagcattgtctgagtccatatcatatgcaaaatctccaacgtgtagaatggcatcatacaaccctctctgagtttcttcttgtagtctagttaaagatttagcattatcattacccatgtctccataaacagctaaatgtggctgccagtctggcgaatttggagccgttttgaaggtaaatatatttgaccatcccaagtcactcccacaatgatacagatatgtacttcctggtgttaagttctttaggacaacagaatgaatgtgttgtgatctctgctctttacccccatctacaaataatgacgacgtcccattagctgtaagaactaaacctcctatgccatattcaactagggactgttttgtgtcatcaaaggtggaccaagttaccacaatatcataaatattatttccataggcgatatggatttgttccggctgataatagtaaactgataaagatacctgtataaaactaaaacaaaagaatattttcccccacattttgctcaaaactaatgttagtatattaggaataaaataaaaccacaaatttcttcatagaaatacactcaatctcaactcaaccaataaaatcttcggtactgggctactggtctggag

SEQ ID NO: 728 - DNA, 3391 bp, Diabrotica virgifera
tacttatatggttcttttcatgagcattttcagtgcgtcacagtttttcgatttctctctaacgcattaaattgtatgtgacagaaaaaaacgcacgtcgctgattacatttcgtcggtgacatttataacatttaatctagttgtcaatagatggcgctaataatataatattaataatattatattattctatataaaaaaatttaatctgtacaatttataagactatacaaatcaaagaaaataccattttataaatgcaataaacacaattgatttgtttttatgccaaattgcaaataaaatgtgacaactgtcagatttaactaaaatgtcatgtcactaaaatgtatattatcacggacttacctttttttctatcatttgtgacgcactgaaaaatgctcatgaaaagaagcatataaacgatatttatgcaattaatattcaggggattttattcgtaatattgatgatgaagtcatcaaacattagctaataagtcccattgctaacagtttgtttgttcaattaaaaaaatattagaaaaatcgtattaaaaagtcatatcgacggcggaagggcaggatctcgtaactagaaaatttgtataaaatgattaaaatgttttcgctttagaatagtgtatcggcacctattgaacagcggttccagctgggaaaatttccggaaggcttccagaaggctttcccagctgtaaccgctgtttaatagtgccgatacacttgttctaaagctaaagccgaagtaactcattttatacaaatttttcggttatgtggtcttgcctttccgccgtcgatatatgatatttacgctaacaaaattttgtatcactctcctaaatttttatgttataatcgatttccaagaaaaaaactctagacggtgagtaagattaaaaaatttgttgcataaatattaatttaatcaatggtactggtatctattctattatattttttgttaaattttgcctatcaattttgttcacatttcaatatttattcagctctattgaaaagttttagtacatatacatatacatatatccatttcttgtggtggtatcaattcggtgattatcagaaattaaaaacaatcagggaaaattcttgataaagaaagtttgacaaatttgacagactcatccagtctcatatatcgagactatttcgttcttttaatgccgcatatataggtactactaccatctttctaaaccactcattaatattcatctgagcggagtgctatattcgaggtgtgaacatcagtaaacaaatcatttggatacggattattccataaagcaggtagatcccttgtttatggaatctcacacctcgaaaattaccactctcttgagctgaatattaataagtctcttagaaagatggtagtaatatatatcttaacgcttaatttttttttgatatctaattgtgtcttttccaacagttcttattttaattaaagctaactacgcttttgttaattaaatgttatttaaaacaaaaggaattacctaattccattaaaatagttaacccgtaaatattggtgatttaaaatattgtgatttatctttataccattgtttaatgttattattattattagagattatagaattattattattagaaagttagtgaaccatagtttacgttattgtatctctcatagtgttcagcatgactacatttccaactatctttagaatagtattatcatatctatcatacctatcagaagagttttctttatttctgatatcggccttctttgattagttttatttggccacttggtcttttcttcgcacctgcggtaaaatggagtactaccaccgtttaaccaacaaacagaaataaatctttttgaaaacattatattcaacctgggctaaatttttgatgattaaatcctgcaataacaaaaccttctcctacaacttattcactcatttacaacttaaccaatattaccaacaactgaatcaaaaagtgagcttcggattatattcttagttattagatacacatatttagaaaaagtttcgttttgtttcatgtgaacttccgcataatgttagattttttcttgttcccctactggcgaagcgtccatgtaaccaccgttaccattggtaacagttaaaaatcttgcaaataaatatttaatgactactatgaaataattccatttatattttttaccaacagaaatatttgttaatagtacctaattcagtaaatctaaatagctaaataaaactagatctaaatataaatctaactagacgcacgaaaatattggcgagaatatgtgaatccgttgcacgttattattatgttgttaccacttaccacttctgctagctcgtttctgaaaattttgaaggagcgacggctctagagacggtgcgtggacactctgtgtatatcagtattgtaaccattttttggtttggtaacgttggtttagtacaacctattacagattacagtgtgcgtgcatttaaacatggaaaagtgttgctgcgtattgcgtattgcatggaaaagtttgctgaaaagtcattcttcttgtatatttttttatatatataattttgaagaaaaaaatgagattattgaaaatggaagaattcaaatataaacaatagttttcaaaatctgttctttttcctacttgttcattttttatgttaattttatggtagaataatatgtttaatttgtttattatttattgttatacctattacatatacataattgcatacatatacaattttgcaatagtgatttgtttaattttatcccacaggattgaaaataaaaacttatatttgggaggttcaaaataatttttttaaataagatttttttacatctggttttggtaacactttagaaaaagtcatgcgtcgccactgtgttcctctttgtttaactggagtcaaataaacacatgtgtgtgactttagttttatttagcatataactctttggaacgctcaatgtttaaataactttaataagcttactgttttttggtgtactgtggaagtacaacattatttcgacaatttgttaccattatcttattctcagtgtgttgtgagtacacaatatattattattgtttttgtgtttaatttttgacagatttgccttgaaagttggtcttaggtggtcttaggatgtaagtttaagataatcgacatgtaaataaagaaatgtgtgataaaagtatatttttatattgtatatatttttataaccaagtattacaataatttaatgtcaagaatttttaattattttgtttcgcatattgttacgattagtaaatataat

SEQ ID NO: 729 - DNA, 3182 bp, Diabrotica virgifera
gtacaatttataagactatacaaatcaaagaaaataccattttataaatgcaataaacacaattgatttgtttttatgccaaattgcaaataaaatgtgacaactgtcagatttaactaaaatgtcatgtcactaaaatgtatattatcacggacttacctttttttctatcatttgtgacgcactgaaaaatgctcatgaaaagaagcatataaacgatatttatgcaattaatattcaggggattttattcgtaatattgatgatgaagtcatcaaacattagctaataagtcccattgctaacagtttgtttgttcaattaaaaaaatattagaaaaatcgtattaaaaagtcatatcgacggcggaagggcaggatctcgtaactagaaaatttgtataaaatgattaaaatgttttcgctttagaatagtgtatcggcacctattgaacagcggttccagctgggaaaatttccggaaggcttccagaaggctttcccagctgtaaccgctgtttaatagtgccgatacacttgttctaaagctaaagccgaagtaactcattttatacaaatttttcggttatgtggtcttgcctttccgccgtcgatatatgatatttacgctaacaaaattttgtatcactctcctaaatttttatgttataatcgatttccaagaaaaaaactagacggtgggtaagattaaaaaattggttgcatgaatattaatttaatcaatggtactggtatctattctgttatattttttgttcaattacgcctatcaattttgtttacatttcaatatttattcagatcttttaaaaagttttagtacatatacatatatccatttcttgtggtggtatcaattcggtaattatcagaaattaaaaacaatcagggaaaattcttgataaagaaagtttgacaaatttgacagactcatccagtcccgtatatcgagactgtttcgttctttgaatgccgcatatatactactatcatctttctaaaacactcattaatattcatctgagcggagtgctatattcgaggtgtgaaacatttggaacattttcgaggtgtgtaaacaaatcatttggatacggattattccataaaacaggtagatctcttgtttatggaatctcacacctcgaaaaataccactctcttgagctgaatattaatgagtctcttagaaagatggtagtaatatatcttaacgcttaatttttttgatatctaattgtgtcttttacaacagttcttattttaattaatgctaactacccttttgctaattaaatgttatttaaaacaaaaggaattacctaattccattaaaatagttaacccgtaaatattggtgatttaaaatattgtgatttatctttataccattgtttaatgttattattattattagagattatagaattattattattagaaagttagtgaaccatagtttacgttattgtatctctcatagtgttcagcatgactacatttccaactatctttagaatagtattatcatatctatcatacctatcagaagagttttctttatttctgatatcggccttctttgattagttttatttggccacttggtcttttcttcgcacctgcggtaaaatggagtactaccaccgtttaaccaacaaacagaaataaatctttttgaaaacattatattcaacctgggctaaatttttgatgattaaatcctgcaataacaaaaccttctcctacaacttattcactcatttacaacttaaccaatattaccaacaactgaatcaaaaagtgagcttcggattatattcttagttattagatacacatatttagaaaaagtttcgttttgtttcatgtgaacttccgcataatgttagattttttcttgttcccctactggcgaagcgtccatgtaaccaccgttaccattggtaacagttaaaaatcttgcaaataaatatttaatgactactatgaaataattccatttatattttttaccaacagaaatatttgttaatagtacctaattcagtaaatctaaatagctaaataaaactagatctaaatataaatctaactagacgcacgaaaatattggcgagaatatgtgaatccgttgcacgttattattatgttgttaccacttaccacttctgctagctcgtttctgaaaattttgaaggagcgacggctctagagacggtgcgtggacactctgtgtatatcagtattgtaaccattttttggtttggtaacgttggtttagtacaacctattacagattacagtgtgcgtgcatttaaacatggaaaagtgttgctgcgtattgcgtattgcatggaaaagtttgctgaaaagtcattcttcttgtatatttttttatatatataattttgaagaaaaaaatgagattattgaaaatggaagaattcaaatataaacaatagttttcaaaatctgttctttttcctacttgttcattttttatgttaattttatggtagaataatatgtttaatttgtttattatttattgttatacctattacatatacataattgcatacatatacaattttgcaatagtgatttgtttaattttatcccacaggattgaaaataaaaacttatatttgggaggttcaaaataatttttttaaataagatttttttacatctggttttggtaacactttagaaaaagtcatgcgtcgccactgtgttcctctttgtttaactggagtcaaataaacacatgtgtgtgactttagttttatttagcatataactctttggaacgctcaatgtttaaataactttaataagcttactgttttttggtgtactgtggaagtacaacattatttcgacaatttgttaccattatcttattctcagtgtgttgtgagtacacaatatattattattgtttttgtgtttaatttttgacagatttgccttgaaagttggtcttaggtggtcttaggatgtaagtttaagataatcgacatgtaaataaagaaatgtgtgataaaagtatatttttatattgtatatatttttataaccaagtattacaataatttaatgtcaagaatttttaattattttgtttcgcatattgttacgattagtaaatataat

SEQ ID NO: 730 - DNA, 3179 bp, Diabrotica virgifera
gtacaatttataagactatacaaatcaaagaaaataccattttataaatgcaataaacacaattgatttgtttttatgccaaattgcaaataaaatgtgacaactgtcagatttaactaaaatgtcatgtcactaaaatgtatattatcacggacttacctttttttctatcatttgtgacgcactgaaaaatgctcatgaaaagaagcatataaacgatatttatgcaattaatattcaggggattttattcgtaatattgatgatgaagtcatcaaacattagctaataagtcccattgctaacagtttgtttgttcaattaaaaaaatattagaaaaatcgtattaaaaagtcatatcgacggcggaagggcaggatctcgtaactagaaaatttgtataaaatgattaaaatgttttcgctttagaatagtgtatcggcacctattgaacagcggttccagctgggaaaatttccggaaggcttccagaaggctttcccagctgtaaccgctgtttaatagtgccgatacacttgttctaaagctaaagccgaagtaactcattttatacaaatttttcggttatgtggtcttgcctttccgccgtcgatatatgatatttacgctaacaaaattttgtatcactctcctaaatttttatgttataatcgatttccaagaaaaaaactctagacggtgagtaagattaaaaaatttgttgcataaatattaatttaatcaatggtactggtatctattctattatattttttgttaaattttgcctatcaattttgttcacatttcaatatttattcagctctattgaaaagttttagtacatatacatatacatatatccatttcttgtggtggtatcaattcggtgattatcagaaattaaaaacaatcagggaaaattcttgataaagaaagtttgacaaatttgacagactcatccagtctcatatatcgagactatttcgttcttttaatgccgcatatataggtactactaccatctttctaaaccactcattaatattcatctgagcggagtgctatattcgaggtgtgaacatcagtaaacaaatcatttggatacggattattccataaagcaggtagatcccttgtttatggaatctcacacctcgaaaattaccactctcttgagctgaatattaataagtctcttagaaagatggtagtaatatatatcttaacgcttaatttttttttgatatctaattgtgtcttttccaacagttcttattttaattaaagctaactacgcttttgttaattaaatgttatttaaaacaaaaggaattacctaattccattaaaatagttaacccgtaaatattggtgatttaaaatattgtgatttatctttataccattgtttaatgttattattattattagagattatagaattattattattagaaagttagtgaaccatagtttacgttattgtatctctcatagtgttcagcatgactacatttccaactatctttagaatagtattatcatatctatcatacctatcagaagagttttctttatttctgatatcggccttctttgattagttttatttggccacttggtcttttcttcgcacctgcggtaaaatggagtactaccaccgtttaaccaacaaacagaaataaatctttttgaaaacattatattcaacctgggctaaatttttgatgattaaatcctgcaataacaaaaccttctcctacaacttattcactcatttacaacttaaccaatattaccaacaactgaatcaaaaagtgagcttcggattatattcttagttattagatacacatatttagaaaaagtttcgttttgtttcatgtgaacttccgcataatgttagattttttcttgttcccctactggcgaagcgtccatgtaaccaccgttaccattggtaacagttaaaaatcttgcaaataaatatttaatgactactatgaaataattccatttatattttttaccaacagaaatatttgttaatagtacctaattcagtaaatctaaatagctaaataaaactagatctaaatataaatctaactagacgcacgaaaatattggcgagaatatgtgaatccgttgcacgttattattatgttgttaccacttaccacttctgctagctcgtttctgaaaattttgaaggagcgacggctctagagacggtgcgtggacactctgtgtatatcagtattgtaaccattttttggtttggtaacgttggtttagtacaacctattacagattacagtgtgcgtgcatttaaacatggaaaagtgttgctgcgtattgcgtattgcatggaaaagtttgctgaaaagtcattcttcttgtatatttttttatatatataattttgaagaaaaaaatgagattattgaaaatggaagaattcaaatataaacaatagttttcaaaatctgttctttttcctacttgttcattttttatgttaattttatggtagaataatatgtttaatttgtttattatttattgttatacctattacatatacataattgcatacatatacaattttgcaatagtgatttgtttaattttatcccacaggattgaaaataaaaacttatatttgggaggttcaaaataatttttttaaataagatttttttacatctggttttggtaacactttagaaaaagtcatgcgtcgccactgtgttcctctttgtttaactggagtcaaataaacacatgtgtgtgactttagttttatttagcatataactctttggaacgctcaatgtttaaataactttaataagcttactgttttttggtgtactgtggaagtacaacattatttcgacaatttgttaccattatcttattctcagtgtgttgtgagtacacaatatattattattgtttttgtgtttaatttttgacagatttgccttgaaagttggtcttaggtggtcttaggatgtaagtttaagataatcgacatgtaaataaagaaatgtgtgataaaagtatatttttatattgtatatatttttataaccaagtattacaataatttaatgtcaagaatttttaattattttgtttcgcatattgttacgattagtaaatataat

SEQ ID NO: 731 - DNA, 3143 bp, Diabrotica virgifera
cgggaataaaaaagtctctagctcaaaaattatgtgacttataataaaaaaaagaatgtcagtccctattttttttcagcgaaaaagtgatcggaagcaacctcctaatcaccaccctatttaaaattagtcattgaccttatttggccttctttatttatgtattgttctgaagctatttccttgtggcatttttatgattaactattttgatgggaaataagccacaattaaattgaaaaaataattttattaacgtttcgagcccaaatcgggtttgttgtcaaaatacaaaatactactaaattaaacaaaaatgttgttgctaaataaaaaaattcttctatttatattggcaattcagacgtgtattatatatacattttaaagtagaagactttaaaatgatatcgccaatatttatgagttgcgttcctgggacgactttactaaaagatagttcattcgattacatgaaatcaatcccaactcaagaatattcgtcacaaaaaaaatcatagcatgtgatatgtctttaaaaagacaaccaaatgccacgatgacagtaaaattctcgcgttagagattccatagtaaatcccgagggaaaaccaggcaaaaacctcgtgataatatcccgacatcgtaagtatttgatcttacatttaatttactttcaaaaaactaataccaaattctgactttaatatgtttaaattataaataatattaataatacatagatatacaataagtaatactaaaatataaaatatgtactaactcgatatgttattgacttactaatcgtggtattttctttctattgacttcctctttcagtatgggtaaccacatcctactgcattctaccgaggaatttgcgacacaattggtttcatttagcataattatgtatattatattatatcctcaagtaaaatgtatgtagttgtaaccgcgcgttaagcgcttgtcatgagaacgaggtctaacagccacaaaactaaggatataaacgatatttatgcaattaatattcaggggattttattcgtaatattgatgatgaagtcatcaaacattagctaataagtcccattgctaacagtttgtttgttcaattaaaaaaatattagaaaaatcgtattaaaaagtcatatcgacggcggaagggcaggatctcgtaactagaaaatttgtataaaatgattaaaatgttttcgctttagaatagtgtatcggcacctattgaacagcggttccagctgggaaaatttccggaaggcttccagaaggctttcccagctgtaaccgctgtttaatagtgccgatacacttgttctaaagctaaagccgaagtaactcattttatacaaatttttcggttatgtggtcttgcctttccgccgtcgatatatgatatttacgctaacaaaattttgtatcactctcctaaatttttatgttataatcgatttccaagaaaaaaactagacggtgggtaagattaaaaaattggttgcatgaatattaatttaatcaatggtactggtatctattctgttatattttttgttcaattacgcctatcaattttgtttacatttcaatatttattcagatcttttaaaaagttttagtacatatacatatatccatttcttgtggtggtatcaattcggtaattatcagaaattaaaaacaatcagggaaaattcttgataaagaaagtttgacaaatttgacagactcatccagtcccgtatatcgagactgtttcgttctttgaatgccgcatatatactactatcatctttctaaaacactcattaatattcatctgagcggagtgctatattcgaggtgtgaaacatttggaacattttcgaggtgtgtaaacaaatcatttggatacggattattccataaaacaggtagatctcttgtttatggaatctcacacctcgaaaaataccactctcttgagctgaatattaatgagtctcttagaaagatggtagtaatatatcttaacgcttaatttttttgatatctaattgtgtcttttacaacagttcttattttaattaatgctaactacccttttgctaattaaatgttatttaaaacaaaaggaattacctaattccattaaaatagttaacccgtaaatattggtgatttaaaatattgtgatttatctttataccattgtttaatgttattattattattagagattatagaattattattattagaaagttagtgaaccatagtttacgttattgtatctctcatagtgttcagcatgactacatttccaactatctttagaatagtattatcatatctatcatacctatcagaagagttttctttatttctgatatcggccttctttgattagttttatttggccacttggtcttttcttcgcacctgcggtaaaatggagtactaccaccgtataaccaacaaacagaaataaatctttttgaaaacattatatgtaacctgggctaaatttttgattatgattaaatcctgcaataacaaaatcttctcttacaacttattcactcatttacaacttagccaacattgccaacaactgaatcaaatagtgagcttcggattatattctaaattattattggatacaaatatacaaatatgtagaaaaagtttaattttgtttcatgtgaattttttcttgtttccctttgtttaactggagtaaactaaacacatttgtgtgacttcagttttatttagaatataactttttgcaatgctcaatgtttgcgcaacttgaacaagcctgctgttttttggtatactgtggaagtacaacattatttggacaatttgttaccattttctcattctcagtgtgttgtgagtaggtacacattattattgtttttgtgtttaatttttgacagatttgccttgaaagttggtcttaggtggtcttaggatgtaagtttaagataatcgacatgtaaataaagaaatgtgtgataaaagtatatttttatattgtatatatttttataaccaagtattacaataatttaatgtcaagaatttttaattattttgtttcgcatattgttacgattagtaaatataat

SEQ ID NO: 732 - DNA, 3140 bp, Diabrotica virgifera
cgggaataaaaaagtctctagctcaaaaattatgtgacttataataaaaaaaagaatgtcagtccctattttttttcagcgaaaaagtgatcggaagcaacctcctaatcaccaccctatttaaaattagtcattgaccttatttggccttctttatttatgtattgttctgaagctatttccttgtggcatttttatgattaactattttgatgggaaataagccacaattaaattgaaaaaataattttattaacgtttcgagcccaaatcgggtttgttgtcaaaatacaaaatactactaaattaaacaaaaatgttgttgctaaataaaaaaattcttctatttatattggcaattcagacgtgtattatatatacattttaaagtagaagactttaaaatgatatcgccaatatttatgagttgcgttcctgggacgactttactaaaagatagttcattcgattacatgaaatcaatcccaactcaagaatattcgtcacaaaaaaaatcatagcatgtgatatgtctttaaaaagacaaccaaatgccacgatgacagtaaaattctcgcgttagagattccatagtaaatcccgagggaaaaccaggcaaaaacctcgtgataatatcccgacatcgtaagtatttgatcttacatttaatttactttcaaaaaactaataccaaattctgactttaatatgtttaaattataaataatattaataatacatagatatacaataagtaatactaaaatataaaatatgtactaactcgatatgttattgacttactaatcgtggtattttctttctattgacttcctctttcagtatgggtaaccacatcctactgcattctaccgaggaatttgcgacacaattggtttcatttagcataattatgtatattatattatatcctcaagtaaaatgtatgtagttgtaaccgcgcgttaagcgcttgtcatgagaacgaggtctaacagccacaaaactaaggatataaacgatatttatgcaattaatattcaggggattttattcgtaatattgatgatgaagtcatcaaacattagctaataagtcccattgctaacagtttgtttgttcaattaaaaaaatattagaaaaatcgtattaaaaagtcatatcgacggcggaagggcaggatctcgtaactagaaaatttgtataaaatgattaaaatgttttcgctttagaatagtgtatcggcacctattgaacagcggttccagctgggaaaatttccggaaggcttccagaaggctttcccagctgtaaccgctgtttaatagtgccgatacacttgttctaaagctaaagccgaagtaactcattttatacaaatttttcggttatgtggtcttgcctttccgccgtcgatatatgatatttacgctaacaaaattttgtatcactctcctaaatttttatgttataatcgatttccaagaaaaaaactctagacggtgagtaagattaaaaaatttgttgcataaatattaatttaatcaatggtactggtatctattctattatattttttgttaaattttgcctatcaattttgttcacatttcaatatttattcagctctattgaaaagttttagtacatatacatatacatatatccatttcttgtggtggtatcaattcggtgattatcagaaattaaaaacaatcagggaaaattcttgataaagaaagtttgacaaatttgacagactcatccagtctcatatatcgagactatttcgttcttttaatgccgcatatataggtactactaccatctttctaaaccactcattaatattcatctgagcggagtgctatattcgaggtgtgaacatcagtaaacaaatcatttggatacggattattccataaagcaggtagatcccttgtttatggaatctcacacctcgaaaattaccactctcttgagctgaatattaataagtctcttagaaagatggtagtaatatatatcttaacgcttaatttttttttgatatctaattgtgtcttttccaacagttcttattttaattaaagctaactacgcttttgttaattaaatgttatttaaaacaaaaggaattacctaattccattaaaatagttaacccgtaaatattggtgatttaaaatattgtgatttatctttataccattgtttaatgttattattattattagagattatagaattattattattagaaagttagtgaaccatagtttacgttattgtatctctcatagtgttcagcatgactacatttccaactatctttagaatagtattatcatatctatcatacctatcagaagagttttctttatttctgatatcggccttctttgattagttttatttggccacttggtcttttcttcgcacctgcggtaaaatggagtactaccaccgtataaccaacaaacagaaataaatctttttgaaaacattatatgtaacctgggctaaatttttgattatgattaaatcctgcaataacaaaatcttctcttacaacttattcactcatttacaacttagccaacattgccaacaactgaatcaaatagtgagcttcggattatattctaaattattattggatacaaatatacaaatatgtagaaaaagtttaattttgtttcatgtgaattttttcttgtttccctttgtttaactggagtaaactaaacacatttgtgtgacttcagttttatttagaatataactttttgcaatgctcaatgtttgcgcaacttgaacaagcctgctgttttttggtatactgtggaagtacaacattatttggacaatttgttaccattttctcattctcagtgtgttgtgagtaggtacacattattattgtttttgtgtttaatttttgacagatttgccttgaaagttggtcttaggtggtcttaggatgtaagtttaagataatcgacatgtaaataaagaaatgtgtgataaaagtatatttttatattgtatatatttttataaccaagtattacaataatttaatgtcaagaatttttaattattttgtttcgcatattgttacgattagtaaatataat

SEQ ID NO: 733 - DNA, 3096 bp, Diabrotica virgifera
ctttggatgatgacgcacgggtacagattcccggactcaactgtacatacattttacttgaaaccgttcacatgctaacgcgcgttagcatgtgaacgatctcaagtaaaattaatgttgttctgaagctatttccttgtggcatttttatgattaactattttgatgggaaataagccacaattaaattgaaaaaataattttattaacgtttcgagcccaaatcgggtttgttgtcaaaatacaaaatactactaaattaaacaaaaatgttgttgctaaataaaaaaattcttctatttatattggcaattcagacgtgtattatatatacattttaaagtagaagactttaaaatgatatcgccaatatttatgagttgcgttcctgggacgactttactaaaagatagttcattcgattacatgaaatcaatcccaactcaagaatattcgtcacaaaaaaaatcatagcatgtgatatgtctttaaaaagacaaccaaatgccacgatgacagtaaaattctcgcgttagagattccatagtaaatcccgagggaaaaccaggcaaaaacctcgtgataatatcccgacatcgtaagtatttgatcttacatttaatttactttcaaaaaactaataccaaattctgactttaatatgtttaaattataaataatattaataatacatagatatacaataagtaatactaaaatataaaatatgtactaactcgatatgttattgacttactaatcgtggtattttctttctattgacttcctctttcagtatgggtaaccacatcctactgcattctaccgaggaatttgcgacacaattggtttcatttagcataattatgtatattatattatatcctcaagtaaaatgtatgtagttgtaaccgcgcgttaagcgcttgtcatgagaacgaggtctaacagccacaaaactaaggatataaacgatatttatgcaattaatattcaggggattttattcgtaatattgatgatgaagtcatcaaacattagctaataagtcccattgctaacagtttgtttgttcaattaaaaaaatattagaaaaatcgtattaaaaagtcatatcgacggcggaagggcaggatctcgtaactagaaaatttgtataaaatgattaaaatgttttcgctttagaatagtgtatcggcacctattgaacagcggttccagctgggaaaatttccggaaggcttccagaaggctttcccagctgtaaccgctgtttaatagtgccgatacacttgttctaaagctaaagccgaagtaactcattttatacaaatttttcggttatgtggtcttgcctttccgccgtcgatatatgatatttacgctaacaaaattttgtatcactctcctaaatttttatgttataatcgatttccaagaaaaaaactagacggtgggtaagattaaaaaattggttgcatgaatattaatttaatcaatggtactggtatctattctgttatattttttgttcaattacgcctatcaattttgtttacatttcaatatttattcagatcttttaaaaagttttagtacatatacatatatccatttcttgtggtggtatcaattcggtaattatcagaaattaaaaacaatcagggaaaattcttgataaagaaagtttgacaaatttgacagactcatccagtcccgtatatcgagactgtttcgttctttgaatgccgcatatatactactatcatctttctaaaacactcattaatattcatctgagcggagtgctatattcgaggtgtgaaacatttggaacattttcgaggtgtgtaaacaaatcatttggatacggattattccataaaacaggtagatctcttgtttatggaatctcacacctcgaaaaataccactctcttgagctgaatattaatgagtctcttagaaagatggtagtaatatatcttaacgcttaatttttttgatatctaattgtgtcttttacaacagttcttattttaattaatgctaactacccttttgctaattaaatgttatttaaaacaaaaggaattacctaattccattaaaatagttaacccgtaaatattggtgatttaaaatattgtgatttatctttataccattgtttaatgttattattattattagagattatagaattattattattagaaagttagtgaaccatagtttacgttattgtatctctcatagtgttcagcatgactacatttccaactatctttagaatagtattatcatatctatcatacctatcagaagagttttctttatttctgatatcggccttctttgattagttttatttggccacttggtcttttcttcgcacctgcggtaaaatggagtactaccaccgtataaccaacaaacagaaataaatctttttgaaaacattatatgtaacctgggctaaatttttgattatgattaaatcctgcaataacaaaatcttctcttacaacttattcactcatttacaacttagccaacattgccaacaactgaatcaaatagtgagcttcggattatattctaaattattattggatacaaatatacaaatatgtagaaaaagtttaattttgtttcatgtgaattttttcttgtttccctttgtttaactggagtaaactaaacacatttgtgtgacttcagttttatttagaatataactttttgcaatgctcaatgtttgcgcaacttgaacaagcctgctgttttttggtatactgtggaagtacaacattatttggacaatttgttaccattttctcattctcagtgtgttgtgagtaggtacacattattattgtttttgtgtttaatttttgacagatttgccttgaaagttggtcttaggtggtcttaggatgtaagtttaagataatcgacatgtaaataaagaaatgtgtgataaaagtatatttttatattgtatatatttttataaccaagtattacaataatttaatgtcaagaatttttaattattttgtttcgcatattgttacgattagtaaatataat

SEQ ID NO: 734 - DNA, 3093 bp, Diabrotica virgifera
ctttggatgatgacgcacgggtacagattcccggactcaactgtacatacattttacttgaaaccgttcacatgctaacgcgcgttagcatgtgaacgatctcaagtaaaattaatgttgttctgaagctatttccttgtggcatttttatgattaactattttgatgggaaataagccacaattaaattgaaaaaataattttattaacgtttcgagcccaaatcgggtttgttgtcaaaatacaaaatactactaaattaaacaaaaatgttgttgctaaataaaaaaattcttctatttatattggcaattcagacgtgtattatatatacattttaaagtagaagactttaaaatgatatcgccaatatttatgagttgcgttcctgggacgactttactaaaagatagttcattcgattacatgaaatcaatcccaactcaagaatattcgtcacaaaaaaaatcatagcatgtgatatgtctttaaaaagacaaccaaatgccacgatgacagtaaaattctcgcgttagagattccatagtaaatcccgagggaaaaccaggcaaaaacctcgtgataatatcccgacatcgtaagtatttgatcttacatttaatttactttcaaaaaactaataccaaattctgactttaatatgtttaaattataaataatattaataatacatagatatacaataagtaatactaaaatataaaatatgtactaactcgatatgttattgacttactaatcgtggtattttctttctattgacttcctctttcagtatgggtaaccacatcctactgcattctaccgaggaatttgcgacacaattggtttcatttagcataattatgtatattatattatatcctcaagtaaaatgtatgtagttgtaaccgcgcgttaagcgcttgtcatgagaacgaggtctaacagccacaaaactaaggatataaacgatatttatgcaattaatattcaggggattttattcgtaatattgatgatgaagtcatcaaacattagctaataagtcccattgctaacagtttgtttgttcaattaaaaaaatattagaaaaatcgtattaaaaagtcatatcgacggcggaagggcaggatctcgtaactagaaaatttgtataaaatgattaaaatgttttcgctttagaatagtgtatcggcacctattgaacagcggttccagctgggaaaatttccggaaggcttccagaaggctttcccagctgtaaccgctgtttaatagtgccgatacacttgttctaaagctaaagccgaagtaactcattttatacaaatttttcggttatgtggtcttgcctttccgccgtcgatatatgatatttacgctaacaaaattttgtatcactctcctaaatttttatgttataatcgatttccaagaaaaaaactctagacggtgagtaagattaaaaaatttgttgcataaatattaatttaatcaatggtactggtatctattctattatattttttgttaaattttgcctatcaattttgttcacatttcaatatttattcagctctattgaaaagttttagtacatatacatatacatatatccatttcttgtggtggtatcaattcggtgattatcagaaattaaaaacaatcagggaaaattcttgataaagaaagtttgacaaatttgacagactcatccagtctcatatatcgagactatttcgttcttttaatgccgcatatataggtactactaccatctttctaaaccactcattaatattcatctgagcggagtgctatattcgaggtgtgaacatcagtaaacaaatcatttggatacggattattccataaagcaggtagatcccttgtttatggaatctcacacctcgaaaattaccactctcttgagctgaatattaataagtctcttagaaagatggtagtaatatatatcttaacgcttaatttttttttgatatctaattgtgtcttttccaacagttcttattttaattaaagctaactacgcttttgttaattaaatgttatttaaaacaaaaggaattacctaattccattaaaatagttaacccgtaaatattggtgatttaaaatattgtgatttatctttataccattgtttaatgttattattattattagagattatagaattattattattagaaagttagtgaaccatagtttacgttattgtatctctcatagtgttcagcatgactacatttccaactatctttagaatagtattatcatatctatcatacctatcagaagagttttctttatttctgatatcggccttctttgattagttttatttggccacttggtcttttcttcgcacctgcggtaaaatggagtactaccaccgtataaccaacaaacagaaataaatctttttgaaaacattatatgtaacctgggctaaatttttgattatgattaaatcctgcaataacaaaatcttctcttacaacttattcactcatttacaacttagccaacattgccaacaactgaatcaaatagtgagcttcggattatattctaaattattattggatacaaatatacaaatatgtagaaaaagtttaattttgtttcatgtgaattttttcttgtttccctttgtttaactggagtaaactaaacacatttgtgtgacttcagttttatttagaatataactttttgcaatgctcaatgtttgcgcaacttgaacaagcctgctgttttttggtatactgtggaagtacaacattatttggacaatttgttaccattttctcattctcagtgtgttgtgagtaggtacacattattattgtttttgtgtttaatttttgacagatttgccttgaaagttggtcttaggtggtcttaggatgtaagtttaagataatcgacatgtaaataaagaaatgtgtgataaaagtatatttttatattgtatatatttttataaccaagtattacaataatttaatgtcaagaatttttaattattttgtttcgcatattgttacgattagtaaatataat

SEQ ID NO: 735 - DNA, 2963 bp, Diabrotica virgifera
gtggccttgagtgttagtatagatagaataatatagatttatatttataaaaatatatatttctttttattaatataactctaatggccaaattaataataataaaccagttggttgttaacaactgagaatatgctttattgaaaaacgttacaaaataatcaaatttctctgacttacagctttgaacttctgtactatacctagatatttttgcattatccgtttgacggtttatcttctatacattcttaaactcttgtacgtaagactttcctcataaaaattctatcgttttaatattagagttcgaaactacgatcatgattttctgctgaaggtgctttagtctgttataagagagtttgaggaacgtattaacgatcaaattccaagtgtttaagtggcacatgacacaaaactaatattctttttctcatgggcatctttcagtgcgtcacagtttttcgatttctttctaatgcattaaattgtatgtgacagaaaaaaggcacgtctgtgattagagacatttataacatttattctagttgtcgatagatggcgctataatcgaaaaaaaaatatttacgaattatataatatatctacgaatataatctgtacaatttataagactatacaaatcaaagaaaataccattttataaatgcaataaacacaattgatttgtttttatgccaaattgcaaataaaatgtgacaactgtcagatttaactaaaatgtcatgtcactaaaatgtatattatcacggacttacctttttttctatcatttgtgacgcactgaaaaatgctcatgaaaagaagcatataaacgatatttatgcaattaatattcaggggattttattcgtaatattgatgatgaagtcatcaaacattagctaataagtcccattgctaacagtttgtttgttcaattaaaaaaatattagaaaaatcgtattaaaaagtcatatcgacggcggaagggcaggatctcgtaactagaaaatttgtataaaatgattaaaatgttttcgctttagaatagtgtatcggcacctattgaacagcggttccagctgggaaaatttccggaaggcttccagaaggctttcccagctgtaaccgctgtttaatagtgccgatacacttgttctaaagctaaagccgaagtaactcattttatacaaatttttcggttatgtggtcttgcctttccgccgtcgatatatgatatttacgctaacaaaattttgtatcactctcctaaatttttatgttataatcgatttccaagaaaaaaactagacggtgggtaagattaaaaaattggttgcatgaatattaatttaatcaatggtactggtatctattctgttatattttttgttcaattacgcctatcaattttgtttacatttcaatatttattcagatcttttaaaaagttttagtacatatacatatatccatttcttgtggtggtatcaattcggtaattatcagaaattaaaaacaatcagggaaaattcttgataaagaaagtttgacaaatttgacagactcatccagtcccgtatatcgagactgtttcgttctttgaatgccgcatatatactactatcatctttctaaaacactcattaatattcatctgagcggagtgctatattcgaggtgtgaaacatttggaacattttcgaggtgtgtaaacaaatcatttggatacggattattccataaaacaggtagatctcttgtttatggaatctcacacctcgaaaaataccactctcttgagctgaatattaatgagtctcttagaaagatggtagtaatatatcttaacgcttaatttttttgatatctaattgtgtcttttacaacagttcttattttaattaatgctaactacccttttgctaattaaatgttatttaaaacaaaaggaattacctaattccattaaaatagttaacccgtaaatattggtgatttaaaatattgtgatttatctttataccattgtttaatgttattattattattagagattatagaattattattattagaaagttagtgaaccatagtttacgttattgtatctctcatagtgttcagcatgactacatttccaactatctttagaatagtattatcatatctatcatacctatcagaagagttttctttatttctgatatcggccttctttgattagttttatttggccacttggtcttttcttcgcacctgcggtaaaatggagtactaccaccgtataaccaacaaacagaaataaatctttttgaaaacattatatgtaacctgggctaaatttttgattatgattaaatcctgcaataacaaaatcttctcttacaacttattcactcatttacaacttagccaacattgccaacaactgaatcaaatagtgagcttcggattatattctaaattattattggatacaaatatacaaatatgtagaaaaagtttaattttgtttcatgtgaattttttcttgtttccctttgtttaactggagtaaactaaacacatttgtgtgacttcagttttatttagaatataactttttgcaatgctcaatgtttgcgcaacttgaacaagcctgctgttttttggtatactgtggaagtacaacattatttggacaatttgttaccattttctcattctcagtgtgttgtgagtaggtacacattattattgtttttgtgtttaatttttgacagatttgccttgaaagttggtcttaggtggtcttaggatgtaagtttaagataatcgacatgtaaataaagaaatgtgtgataaaagtatatttttatattgtatatatttttataaccaagtattacaataatttaatgtcaagaatttttaattattttgtttcgcatattgttacgattagtaaatataat

SEQ ID NO: 736 - DNA, 2960 bp, Diabrotica virgifera
gtggccttgagtgttagtatagatagaataatatagatttatatttataaaaatatatatttctttttattaatataactctaatggccaaattaataataataaaccagttggttgttaacaactgagaatatgctttattgaaaaacgttacaaaataatcaaatttctctgacttacagctttgaacttctgtactatacctagatatttttgcattatccgtttgacggtttatcttctatacattcttaaactcttgtacgtaagactttcctcataaaaattctatcgttttaatattagagttcgaaactacgatcatgattttctgctgaaggtgctttagtctgttataagagagtttgaggaacgtattaacgatcaaattccaagtgtttaagtggcacatgacacaaaactaatattctttttctcatgggcatctttcagtgcgtcacagtttttcgatttctttctaatgcattaaattgtatgtgacagaaaaaaggcacgtctgtgattagagacatttataacatttattctagttgtcgatagatggcgctataatcgaaaaaaaaatatttacgaattatataatatatctacgaatataatctgtacaatttataagactatacaaatcaaagaaaataccattttataaatgcaataaacacaattgatttgtttttatgccaaattgcaaataaaatgtgacaactgtcagatttaactaaaatgtcatgtcactaaaatgtatattatcacggacttacctttttttctatcatttgtgacgcactgaaaaatgctcatgaaaagaagcatataaacgatatttatgcaattaatattcaggggattttattcgtaatattgatgatgaagtcatcaaacattagctaataagtcccattgctaacagtttgtttgttcaattaaaaaaatattagaaaaatcgtattaaaaagtcatatcgacggcggaagggcaggatctcgtaactagaaaatttgtataaaatgattaaaatgttttcgctttagaatagtgtatcggcacctattgaacagcggttccagctgggaaaatttccggaaggcttccagaaggctttcccagctgtaaccgctgtttaatagtgccgatacacttgttctaaagctaaagccgaagtaactcattttatacaaatttttcggttatgtggtcttgcctttccgccgtcgatatatgatatttacgctaacaaaattttgtatcactctcctaaatttttatgttataatcgatttccaagaaaaaaactctagacggtgagtaagattaaaaaatttgttgcataaatattaatttaatcaatggtactggtatctattctattatattttttgttaaattttgcctatcaattttgttcacatttcaatatttattcagctctattgaaaagttttagtacatatacatatacatatatccatttcttgtggtggtatcaattcggtgattatcagaaattaaaaacaatcagggaaaattcttgataaagaaagtttgacaaatttgacagactcatccagtctcatatatcgagactatttcgttcttttaatgccgcatatataggtactactaccatctttctaaaccactcattaatattcatctgagcggagtgctatattcgaggtgtgaacatcagtaaacaaatcatttggatacggattattccataaagcaggtagatcccttgtttatggaatctcacacctcgaaaattaccactctcttgagctgaatattaataagtctcttagaaagatggtagtaatatatatcttaacgcttaatttttttttgatatctaattgtgtcttttccaacagttcttattttaattaaagctaactacgcttttgttaattaaatgttatttaaaacaaaaggaattacctaattccattaaaatagttaacccgtaaatattggtgatttaaaatattgtgatttatctttataccattgtttaatgttattattattattagagattatagaattattattattagaaagttagtgaaccatagtttacgttattgtatctctcatagtgttcagcatgactacatttccaactatctttagaatagtattatcatatctatcatacctatcagaagagttttctttatttctgatatcggccttctttgattagttttatttggccacttggtcttttcttcgcacctgcggtaaaatggagtactaccaccgtataaccaacaaacagaaataaatctttttgaaaacattatatgtaacctgggctaaatttttgattatgattaaatcctgcaataacaaaatcttctcttacaacttattcactcatttacaacttagccaacattgccaacaactgaatcaaatagtgagcttcggattatattctaaattattattggatacaaatatacaaatatgtagaaaaagtttaattttgtttcatgtgaattttttcttgtttccctttgtttaactggagtaaactaaacacatttgtgtgacttcagttttatttagaatataactttttgcaatgctcaatgtttgcgcaacttgaacaagcctgctgttttttggtatactgtggaagtacaacattatttggacaatttgttaccattttctcattctcagtgtgttgtgagtaggtacacattattattgtttttgtgtttaatttttgacagatttgccttgaaagttggtcttaggtggtcttaggatgtaagtttaagataatcgacatgtaaataaagaaatgtgtgataaaagtatatttttatattgtatatatttttataaccaagtattacaataatttaatgtcaagaatttttaattattttgtttcgcatattgttacgattagtaaatataat

SEQ ID NO: 737 - DNA, 2561 bp, Diabrotica virgifera
atattgtaatgtatgctttttctcatgagcatccttcagtgtgtcacagtttttcgatttcattctaacgcattaaattgtatgtgacagaaaaaaacgcacgtcggtgattacatttcgtcggtgacatttataacatttattctagttgtcaatagatggcgctataatcgaaaataaaataatttgcgaattatataatatatctacgaatataatctgaacaatttataagactatacaaatcaaagaaaataccattttataaatgcaataaacacaattgatttgtttttatgccaaattgcaaataaaatgtgacaactgtcagatttaactaaaatgtcatgtcactaaaatgtatattatcacggacttacctttttttctatcatttgtgacgcactgaaaaatgctcatgaaaagaagcatataaacgatatttatgcaattaatattcaggggattttattcgtaatattgatgatgaagtcatcaaacattagctaataagtcccattgctaacagtttgtttgttcaattaaaaaaatattagaaaaatcgtattaaaaagtcatatcgacggcggaagggcaggatctcgtaactagaaaatttgtataaaatgattaaaatgttttcgctttagaatagtgtatcggcacctattgaacagcggttccagctgggaaaatttccggaaggcttccagaaggctttcccagctgtaaccgctgtttaatagtgccgatacacttgttctaaagctaaagccgaagtaactcattttatacaaatttttcggttatgtggtcttgcctttccgccgtcgatatatgatatttacgctaacaaaattttgtatcactctcctaaatttttatgttataatcgatttccaagaaaaaaactagacggtgggtaagattaaaaaattggttgcatgaatattaatttaatcaatggtactggtatctattctgttatattttttgttcaattacgcctatcaattttgtttacatttcaatatttattcagatcttttaaaaagttttagtacatatacatatatccatttcttgtggtggtatcaattcggtaattatcagaaattaaaaacaatcagggaaaattcttgataaagaaagtttgacaaatttgacagactcatccagtcccgtatatcgagactgtttcgttctttgaatgccgcatatatactactatcatctttctaaaacactcattaatattcatctgagcggagtgctatattcgaggtgtgaaacatttggaacattttcgaggtgtgtaaacaaatcatttggatacggattattccataaaacaggtagatctcttgtttatggaatctcacacctcgaaaaataccactctcttgagctgaatattaatgagtctcttagaaagatggtagtaatatatcttaacgcttaatttttttgatatctaattgtgtcttttacaacagttcttattttaattaatgctaactacccttttgctaattaaatgttatttaaaacaaaaggaattacctaattccattaaaatagttaacccgtaaatattggtgatttaaaatattgtgatttatctttataccattgtttaatgttattattattattagagattatagaattattattattagaaagttagtgaaccatagtttacgttattgtatctctcatagtgttcagcatgactacatttccaactatctttagaatagtattatcatatctatcatacctatcagaagagttttctttatttctgatatcggccttctttgattagttttatttggccacttggtcttttcttcgcacctgcggtaaaatggagtactaccaccgtataaccaacaaacagaaataaatctttttgaaaacattatatgtaacctgggctaaatttttgattatgattaaatcctgcaataacaaaatcttctcttacaacttattcactcatttacaacttagccaacattgccaacaactgaatcaaatagtgagcttcggattatattctaaattattattggatacaaatatacaaatatgtagaaaaagtttaattttgtttcatgtgaattttttcttgtttccctttgtttaactggagtaaactaaacacatttgtgtgacttcagttttatttagaatataactttttgcaatgctcaatgtttgcgcaacttgaacaagcctgctgttttttggtatactgtggaagtacaacattatttggacaatttgttaccattttctcattctcagtgtgttgtgagtaggtacacattattattgtttttgtgtttaatttttgacagatttgccttgaaagttggtcttaggtggtcttaggatgtaagtttaagataatcgacatgtaaataaagaaatgtgtgataaaagtatatttttatattgtatatatttttataaccaagtattacaataatttaatgtcaagaatttttaattattttgtttcgcatattgttacgattagtaaatataat

SEQ ID NO: 738 - DNA, 3985 bp, Diabrotica virgifera
cgggaataaaaaagtctctagctcaaaaattatgtgacttataataaaaaaaagaatgtcagtccctattttttttcagcgaaaaagtgatcggaagcaacctcctaatcaccaccctatttaaaattagtcattgaccttatttggccttctttatttatgtattgttctgaagctatttccttgtggcatttttatgattaactattttgatgggaaataagccacaattaaattgaaaaaataattttattaacgtttcgagcccaaatcgggtttgttgtcaaaatacaaaatactactaaattaaacaaaaatgttgttgctaaataaaaaaattcttctatttatattggcaattcagacgtgtattatatatacattttaaagtagaagactttaaaatgatatcgccaatatttatgagttgcgttcctgggacgactttactaaaagatagttcattcgattacatgaaatcaatcccaactcaagaatattcgtcacaaaaaaaatcatagcatgtgatatgtctttaaaaagacaaccaaatgccacgatgacagtaaaattctcgcgttagagattccatagtaaatcccgagggaaaaccaggcaaaaacctcgtgataatatcccgacatcgtaagtatttgatcttacatttaatttactttcaaaaaactaataccaaattctgactttaatatgtttaaattataaataatattaataatacatagatatacaataagtaatactaaaatataaaatatgtactaactcgatatgttattgacttactaatcgtggtattttctttctattgacttcctctttcagtatgggtaaccacatcctactgcattctaccgaggaatttgcgacacaattggtttcatttagcataattatgtatattatattatatcctcaagtaaaatgtatgtagttgtaaccgcgcgttaagcgcttgtcatgagaacgaggtctaacagccacaaaactaaggatataaacgatatttatgcaattaatattcaggggattttattcgtaatattgatgatgaagtcatcaaacattagctaataagtcccattgctaacagtttgtttgttcaattaaaaaaatattagaaaaatcgtattaaaaagtcatatcgacggcggaagggcaggatctcgtaactagaaaatttgtataaaatgattaaaatgttttcgctttagaatagtgtatcggcacctattgaacagcggttccagctgggaaaatttccggaaggcttccagaaggctttcccagctgtaaccgctgtttaatagtgccgatacacttgttctaaagctaaagccgaagtaactcattttatacaaatttttcggttatgtggtcttgcctttccgccgtcgatatatgatatttacgctaacaaaattttgtatcactctcctaaatttttatgttataatcgatttccaagaaaaaaactagacggtgggtaagattaaaaaattggttgcatgaatattaatttaatcaatggtactggtatctattctgttatattttttgttcaattacgcctatcaattttgtttacatttcaatatttattcagatcttttaaaaagttttagtacatatacatatatccatttcttgtggtggtatcaattcggtaattatcagaaattaaaaacaatcagggaaaattcttgataaagaaagtttgacaaatttgacagactcatccagtcccgtatatcgagactgtttcgttctttgaatgccgcatatatactactatcatctttctaaaacactcattaatattcatctgagcggagtgctatattcgaggtgtgaaacatttggaacattttcgaggtgtgtaaacaaatcatttggatacggattattccataaaacaggtagatctcttgtttatggaatctcacacctcgaaaaataccactctcttgagctgaatattaatgagtctcttagaaagatggtagtaatatatcttaacgcttaatttttttgatatctaattgtgtcttttacaacagttcttattttaattaatgctaactacccttttgctaattaaatgttatttaaaacaaaaggaattacctaattccattaaaatagttaacccgtaaatattggtgatttaaaatattgtgatttatctttataccattgtttaatgttattattattattagagattatagaattattattattagaaagttagtgaaccatagtttacgttattgtatctctcatagtgttcagcatgactacatttccaactatctttagaatagtattatcatatctatcatacctatcagaagagttttctttatttctgatatcggccttctttgattagttttatttggccacttggtcttttcttcgcacctgcggtaaaatggagtactaccaccgtttaaccaacaaacagaaataaatctttttgaaaacattatattcaacctgggctaaatttttgatgattaaatcctgcaataacaaaaccttctcctacaacttattcactcatttacaacttaaccaatattaccaacaactgaatcaaaaagtgagcttcggattatattcttagttattagatacacatatttagaaaaagtttcgttttgtttcatgtgaacttccgcataatgttagattttttcttgttcccctactggcgaagcgtccatgtaaccaccgttaccattggtaacagttaaaaatcttgcaaataaatatttaatgactactatgaaataattccatttatattttttaccaacagaaatatttgttaatagtacctaattcagtaaatctaaatagctaaataaaactagatctaaatataaatctaactagacgcacgaaaatattggcgagaatatgtgaatccgttgcacgttattattatgttgttaccacttaccacttctgctagctcgtttctgaaaattttgaaggagcgacggctctagagacggtgcgtggacactctgtgtatatcagtattgtaaccattttttggtttggtaacgttggtttagtacaacctattacagattacagtgtgcgtgcatttaaacatggaaaagtgttgctgcgtattgcgtattgcatggaaaagtttgctgaaaagtcattcttcttgtatatttttttatatatataattttgaagaaaaaaatgagattattgaaaatggaagaattcaaatataaacaatagttttcaaaatctgttctttttcctacttgttcattttttatgttaattttatggtagaataatatgtttaatttgtttattatttattgttatacctattacatatacataattgcatacatatacaattttgcaatagtgatttgtttaattttatcccacaggattgaaaataaaaacttatatttgggaggttcaaaataatttttttaaataagatttttttacatctggttttggtaacactttagaaaaagtcatgcgtcgccactgtgttcctctttgtttaactggagtcaaataaacacatgtgtgtgactttagttttatttagcatataactctttggaacgctcaatgtttaaataactttaataagcttactgttttttggtgtactgtggaagtacaacattatttcgacaatttgttaccattatcttattctcagtgtgttgtgagtacacaatatattattattgtttttgtgtttaatttttgacagatttgccttgaaagttggtcttaggtggtcttaggatgtaagtttaagataatcgacatgtaaataaagaaatgtgtgataaaagtatatttttatattgtatatatttttataaccaagtattacaataatttaatgtcaagaatttttaattattttgtttcgcatattgttacgattagtaaatataat

SEQ ID NO: 739 - DNA, 2558 bp, Diabrotica virgifera
atattgtaatgtatgctttttctcatgagcatccttcagtgtgtcacagtttttcgatttcattctaacgcattaaattgtatgtgacagaaaaaaacgcacgtcggtgattacatttcgtcggtgacatttataacatttattctagttgtcaatagatggcgctataatcgaaaataaaataatttgcgaattatataatatatctacgaatataatctgaacaatttataagactatacaaatcaaagaaaataccattttataaatgcaataaacacaattgatttgtttttatgccaaattgcaaataaaatgtgacaactgtcagatttaactaaaatgtcatgtcactaaaatgtatattatcacggacttacctttttttctatcatttgtgacgcactgaaaaatgctcatgaaaagaagcatataaacgatatttatgcaattaatattcaggggattttattcgtaatattgatgatgaagtcatcaaacattagctaataagtcccattgctaacagtttgtttgttcaattaaaaaaatattagaaaaatcgtattaaaaagtcatatcgacggcggaagggcaggatctcgtaactagaaaatttgtataaaatgattaaaatgttttcgctttagaatagtgtatcggcacctattgaacagcggttccagctgggaaaatttccggaaggcttccagaaggctttcccagctgtaaccgctgtttaatagtgccgatacacttgttctaaagctaaagccgaagtaactcattttatacaaatttttcggttatgtggtcttgcctttccgccgtcgatatatgatatttacgctaacaaaattttgtatcactctcctaaatttttatgttataatcgatttccaagaaaaaaactctagacggtgagtaagattaaaaaatttgttgcataaatattaatttaatcaatggtactggtatctattctattatattttttgttaaattttgcctatcaattttgttcacatttcaatatttattcagctctattgaaaagttttagtacatatacatatacatatatccatttcttgtggtggtatcaattcggtgattatcagaaattaaaaacaatcagggaaaattcttgataaagaaagtttgacaaatttgacagactcatccagtctcatatatcgagactatttcgttcttttaatgccgcatatataggtactactaccatctttctaaaccactcattaatattcatctgagcggagtgctatattcgaggtgtgaacatcagtaaacaaatcatttggatacggattattccataaagcaggtagatcccttgtttatggaatctcacacctcgaaaattaccactctcttgagctgaatattaataagtctcttagaaagatggtagtaatatatatcttaacgcttaatttttttttgatatctaattgtgtcttttccaacagttcttattttaattaaagctaactacgcttttgttaattaaatgttatttaaaacaaaaggaattacctaattccattaaaatagttaacccgtaaatattggtgatttaaaatattgtgatttatctttataccattgtttaatgttattattattattagagattatagaattattattattagaaagttagtgaaccatagtttacgttattgtatctctcatagtgttcagcatgactacatttccaactatctttagaatagtattatcatatctatcatacctatcagaagagttttctttatttctgatatcggccttctttgattagttttatttggccacttggtcttttcttcgcacctgcggtaaaatggagtactaccaccgtataaccaacaaacagaaataaatctttttgaaaacattatatgtaacctgggctaaatttttgattatgattaaatcctgcaataacaaaatcttctcttacaacttattcactcatttacaacttagccaacattgccaacaactgaatcaaatagtgagcttcggattatattctaaattattattggatacaaatatacaaatatgtagaaaaagtttaattttgtttcatgtgaattttttcttgtttccctttgtttaactggagtaaactaaacacatttgtgtgacttcagttttatttagaatataactttttgcaatgctcaatgtttgcgcaacttgaacaagcctgctgttttttggtatactgtggaagtacaacattatttggacaatttgttaccattttctcattctcagtgtgttgtgagtaggtacacattattattgtttttgtgtttaatttttgacagatttgccttgaaagttggtcttaggtggtcttaggatgtaagtttaagataatcgacatgtaaataaagaaatgtgtgataaaagtatatttttatattgtatatatttttataaccaagtattacaataatttaatgtcaagaatttttaattattttgtttcgcatattgttacgattagtaaatataat

SEQ ID NO: 740 - DNA, 2552 bp, Diabrotica virgifera
tacttatatggttcttttcatgagcattttcagtgcgtcacagtttttcgatttctctctaacgcattaaattgtatgtgacagaaaaaaacgcacgtcgctgattacatttcgtcggtgacatttataacatttaatctagttgtcaatagatggcgctaataatataatattaataatattatattattctatataaaaaaatttaatctgtacaatttataagactatacaaatcaaagaaaataccattttataaatgcaataaacacaattgatttgtttttatgccaaattgcaaataaaatgtgacaactgtcagatttaactaaaatgtcatgtcactaaaatgtatattatcacggacttacctttttttctatcatttgtgacgcactgaaaaatgctcatgaaaagaagcatataaacgatatttatgcaattaatattcaggggattttattcgtaatattgatgatgaagtcatcaaacattagctaataagtcccattgctaacagtttgtttgttcaattaaaaaaatattagaaaaatcgtattaaaaagtcatatcgacggcggaagggcaggatctcgtaactagaaaatttgtataaaatgattaaaatgttttcgctttagaatagtgtatcggcacctattgaacagcggttccagctgggaaaatttccggaaggcttccagaaggctttcccagctgtaaccgctgtttaatagtgccgatacacttgttctaaagctaaagccgaagtaactcattttatacaaatttttcggttatgtggtcttgcctttccgccgtcgatatatgatatttacgctaacaaaattttgtatcactctcctaaatttttatgttataatcgatttccaagaaaaaaactagacggtgggtaagattaaaaaattggttgcatgaatattaatttaatcaatggtactggtatctattctgttatattttttgttcaattacgcctatcaattttgtttacatttcaatatttattcagatcttttaaaaagttttagtacatatacatatatccatttcttgtggtggtatcaattcggtaattatcagaaattaaaaacaatcagggaaaattcttgataaagaaagtttgacaaatttgacagactcatccagtcccgtatatcgagactgtttcgttctttgaatgccgcatatatactactatcatctttctaaaacactcattaatattcatctgagcggagtgctatattcgaggtgtgaaacatttggaacattttcgaggtgtgtaaacaaatcatttggatacggattattccataaaacaggtagatctcttgtttatggaatctcacacctcgaaaaataccactctcttgagctgaatattaatgagtctcttagaaagatggtagtaatatatcttaacgcttaatttttttgatatctaattgtgtcttttacaacagttcttattttaattaatgctaactacccttttgctaattaaatgttatttaaaacaaaaggaattacctaattccattaaaatagttaacccgtaaatattggtgatttaaaatattgtgatttatctttataccattgtttaatgttattattattattagagattatagaattattattattagaaagttagtgaaccatagtttacgttattgtatctctcatagtgttcagcatgactacatttccaactatctttagaatagtattatcatatctatcatacctatcagaagagttttctttatttctgatatcggccttctttgattagttttatttggccacttggtcttttcttcgcacctgcggtaaaatggagtactaccaccgtataaccaacaaacagaaataaatctttttgaaaacattatatgtaacctgggctaaatttttgattatgattaaatcctgcaataacaaaatcttctcttacaacttattcactcatttacaacttagccaacattgccaacaactgaatcaaatagtgagcttcggattatattctaaattattattggatacaaatatacaaatatgtagaaaaagtttaattttgtttcatgtgaattttttcttgtttccctttgtttaactggagtaaactaaacacatttgtgtgacttcagttttatttagaatataactttttgcaatgctcaatgtttgcgcaacttgaacaagcctgctgttttttggtatactgtggaagtacaacattatttggacaatttgttaccattttctcattctcagtgtgttgtgagtaggtacacattattattgtttttgtgtttaatttttgacagatttgccttgaaagttggtcttaggtggtcttaggatgtaagtttaagataatcgacatgtaaataaagaaatgtgtgataaaagtatatttttatattgtatatatttttataaccaagtattacaataatttaatgtcaagaatttttaattattttgtttcgcatattgttacgattagtaaatataat

SEQ ID NO: 741 - DNA, 2549 bp, Diabrotica virgifera
tacttatatggttcttttcatgagcattttcagtgcgtcacagtttttcgatttctctctaacgcattaaattgtatgtgacagaaaaaaacgcacgtcgctgattacatttcgtcggtgacatttataacatttaatctagttgtcaatagatggcgctaataatataatattaataatattatattattctatataaaaaaatttaatctgtacaatttataagactatacaaatcaaagaaaataccattttataaatgcaataaacacaattgatttgtttttatgccaaattgcaaataaaatgtgacaactgtcagatttaactaaaatgtcatgtcactaaaatgtatattatcacggacttacctttttttctatcatttgtgacgcactgaaaaatgctcatgaaaagaagcatataaacgatatttatgcaattaatattcaggggattttattcgtaatattgatgatgaagtcatcaaacattagctaataagtcccattgctaacagtttgtttgttcaattaaaaaaatattagaaaaatcgtattaaaaagtcatatcgacggcggaagggcaggatctcgtaactagaaaatttgtataaaatgattaaaatgttttcgctttagaatagtgtatcggcacctattgaacagcggttccagctgggaaaatttccggaaggcttccagaaggctttcccagctgtaaccgctgtttaatagtgccgatacacttgttctaaagctaaagccgaagtaactcattttatacaaatttttcggttatgtggtcttgcctttccgccgtcgatatatgatatttacgctaacaaaattttgtatcactctcctaaatttttatgttataatcgatttccaagaaaaaaactctagacggtgagtaagattaaaaaatttgttgcataaatattaatttaatcaatggtactggtatctattctattatattttttgttaaattttgcctatcaattttgttcacatttcaatatttattcagctctattgaaaagttttagtacatatacatatacatatatccatttcttgtggtggtatcaattcggtgattatcagaaattaaaaacaatcagggaaaattcttgataaagaaagtttgacaaatttgacagactcatccagtctcatatatcgagactatttcgttcttttaatgccgcatatataggtactactaccatctttctaaaccactcattaatattcatctgagcggagtgctatattcgaggtgtgaacatcagtaaacaaatcatttggatacggattattccataaagcaggtagatcccttgtttatggaatctcacacctcgaaaattaccactctcttgagctgaatattaataagtctcttagaaagatggtagtaatatatatcttaacgcttaatttttttttgatatctaattgtgtcttttccaacagttcttattttaattaaagctaactacgcttttgttaattaaatgttatttaaaacaaaaggaattacctaattccattaaaatagttaacccgtaaatattggtgatttaaaatattgtgatttatctttataccattgtttaatgttattattattattagagattatagaattattattattagaaagttagtgaaccatagtttacgttattgtatctctcatagtgttcagcatgactacatttccaactatctttagaatagtattatcatatctatcatacctatcagaagagttttctttatttctgatatcggccttctttgattagttttatttggccacttggtcttttcttcgcacctgcggtaaaatggagtactaccaccgtataaccaacaaacagaaataaatctttttgaaaacattatatgtaacctgggctaaatttttgattatgattaaatcctgcaataacaaaatcttctcttacaacttattcactcatttacaacttagccaacattgccaacaactgaatcaaatagtgagcttcggattatattctaaattattattggatacaaatatacaaatatgtagaaaaagtttaattttgtttcatgtgaattttttcttgtttccctttgtttaactggagtaaactaaacacatttgtgtgacttcagttttatttagaatataactttttgcaatgctcaatgtttgcgcaacttgaacaagcctgctgttttttggtatactgtggaagtacaacattatttggacaatttgttaccattttctcattctcagtgtgttgtgagtaggtacacattattattgtttttgtgtttaatttttgacagatttgccttgaaagttggtcttaggtggtcttaggatgtaagtttaagataatcgacatgtaaataaagaaatgtgtgataaaagtatatttttatattgtatatatttttataaccaagtattacaataatttaatgtcaagaatttttaattattttgtttcgcatattgttacgattagtaaatataat

SEQ ID NO: 742 - DNA, 2340 bp, Diabrotica virgifera
gtacaatttataagactatacaaatcaaagaaaataccattttataaatgcaataaacacaattgatttgtttttatgccaaattgcaaataaaatgtgacaactgtcagatttaactaaaatgtcatgtcactaaaatgtatattatcacggacttacctttttttctatcatttgtgacgcactgaaaaatgctcatgaaaagaagcatataaacgatatttatgcaattaatattcaggggattttattcgtaatattgatgatgaagtcatcaaacattagctaataagtcccattgctaacagtttgtttgttcaattaaaaaaatattagaaaaatcgtattaaaaagtcatatcgacggcggaagggcaggatctcgtaactagaaaatttgtataaaatgattaaaatgttttcgctttagaatagtgtatcggcacctattgaacagcggttccagctgggaaaatttccggaaggcttccagaaggctttcccagctgtaaccgctgtttaatagtgccgatacacttgttctaaagctaaagccgaagtaactcattttatacaaatttttcggttatgtggtcttgcctttccgccgtcgatatatgatatttacgctaacaaaattttgtatcactctcctaaatttttatgttataatcgatttccaagaaaaaaactagacggtgggtaagattaaaaaattggttgcatgaatattaatttaatcaatggtactggtatctattctgttatattttttgttcaattacgcctatcaattttgtttacatttcaatatttattcagatcttttaaaaagttttagtacatatacatatatccatttcttgtggtggtatcaattcggtaattatcagaaattaaaaacaatcagggaaaattcttgataaagaaagtttgacaaatttgacagactcatccagtcccgtatatcgagactgtttcgttctttgaatgccgcatatatactactatcatctttctaaaacactcattaatattcatctgagcggagtgctatattcgaggtgtgaaacatttggaacattttcgaggtgtgtaaacaaatcatttggatacggattattccataaaacaggtagatctcttgtttatggaatctcacacctcgaaaaataccactctcttgagctgaatattaatgagtctcttagaaagatggtagtaatatatcttaacgcttaatttttttgatatctaattgtgtcttttacaacagttcttattttaattaatgctaactacccttttgctaattaaatgttatttaaaacaaaaggaattacctaattccattaaaatagttaacccgtaaatattggtgatttaaaatattgtgatttatctttataccattgtttaatgttattattattattagagattatagaattattattattagaaagttagtgaaccatagtttacgttattgtatctctcatagtgttcagcatgactacatttccaactatctttagaatagtattatcatatctatcatacctatcagaagagttttctttatttctgatatcggccttctttgattagttttatttggccacttggtcttttcttcgcacctgcggtaaaatggagtactaccaccgtataaccaacaaacagaaataaatctttttgaaaacattatatgtaacctgggctaaatttttgattatgattaaatcctgcaataacaaaatcttctcttacaacttattcactcatttacaacttagccaacattgccaacaactgaatcaaatagtgagcttcggattatattctaaattattattggatacaaatatacaaatatgtagaaaaagtttaattttgtttcatgtgaattttttcttgtttccctttgtttaactggagtaaactaaacacatttgtgtgacttcagttttatttagaatataactttttgcaatgctcaatgtttgcgcaacttgaacaagcctgctgttttttggtatactgtggaagtacaacattatttggacaatttgttaccattttctcattctcagtgtgttgtgagtaggtacacattattattgtttttgtgtttaatttttgacagatttgccttgaaagttggtcttaggtggtcttaggatgtaagtttaagataatcgacatgtaaataaagaaatgtgtgataaaagtatatttttatattgtatatatttttataaccaagtattacaataatttaatgtcaagaatttttaattattttgtttcgcatattgttacgattagtaaatataat

SEQ ID NO: 743 - DNA, 2337 bp, Diabrotica virgifera
gtacaatttataagactatacaaatcaaagaaaataccattttataaatgcaataaacacaattgatttgtttttatgccaaattgcaaataaaatgtgacaactgtcagatttaactaaaatgtcatgtcactaaaatgtatattatcacggacttacctttttttctatcatttgtgacgcactgaaaaatgctcatgaaaagaagcatataaacgatatttatgcaattaatattcaggggattttattcgtaatattgatgatgaagtcatcaaacattagctaataagtcccattgctaacagtttgtttgttcaattaaaaaaatattagaaaaatcgtattaaaaagtcatatcgacggcggaagggcaggatctcgtaactagaaaatttgtataaaatgattaaaatgttttcgctttagaatagtgtatcggcacctattgaacagcggttccagctgggaaaatttccggaaggcttccagaaggctttcccagctgtaaccgctgtttaatagtgccgatacacttgttctaaagctaaagccgaagtaactcattttatacaaatttttcggttatgtggtcttgcctttccgccgtcgatatatgatatttacgctaacaaaattttgtatcactctcctaaatttttatgttataatcgatttccaagaaaaaaactctagacggtgagtaagattaaaaaatttgttgcataaatattaatttaatcaatggtactggtatctattctattatattttttgttaaattttgcctatcaattttgttcacatttcaatatttattcagctctattgaaaagttttagtacatatacatatacatatatccatttcttgtggtggtatcaattcggtgattatcagaaattaaaaacaatcagggaaaattcttgataaagaaagtttgacaaatttgacagactcatccagtctcatatatcgagactatttcgttcttttaatgccgcatatataggtactactaccatctttctaaaccactcattaatattcatctgagcggagtgctatattcgaggtgtgaacatcagtaaacaaatcatttggatacggattattccataaagcaggtagatcccttgtttatggaatctcacacctcgaaaattaccactctcttgagctgaatattaataagtctcttagaaagatggtagtaatatatatcttaacgcttaatttttttttgatatctaattgtgtcttttccaacagttcttattttaattaaagctaactacgcttttgttaattaaatgttatttaaaacaaaaggaattacctaattccattaaaatagttaacccgtaaatattggtgatttaaaatattgtgatttatctttataccattgtttaatgttattattattattagagattatagaattattattattagaaagttagtgaaccatagtttacgttattgtatctctcatagtgttcagcatgactacatttccaactatctttagaatagtattatcatatctatcatacctatcagaagagttttctttatttctgatatcggccttctttgattagttttatttggccacttggtcttttcttcgcacctgcggtaaaatggagtactaccaccgtataaccaacaaacagaaataaatctttttgaaaacattatatgtaacctgggctaaatttttgattatgattaaatcctgcaataacaaaatcttctcttacaacttattcactcatttacaacttagccaacattgccaacaactgaatcaaatagtgagcttcggattatattctaaattattattggatacaaatatacaaatatgtagaaaaagtttaattttgtttcatgtgaattttttcttgtttccctttgtttaactggagtaaactaaacacatttgtgtgacttcagttttatttagaatataactttttgcaatgctcaatgtttgcgcaacttgaacaagcctgctgttttttggtatactgtggaagtacaacattatttggacaatttgttaccattttctcattctcagtgtgttgtgagtaggtacacattattattgtttttgtgtttaatttttgacagatttgccttgaaagttggtcttaggtggtcttaggatgtaagtttaagataatcgacatgtaaataaagaaatgtgtgataaaagtatatttttatattgtatatatttttataaccaagtattacaataatttaatgtcaagaatttttaattattttgtttcgcatattgttacgattagtaaatataat

SEQ ID NO: 744 - DNA, 1026 bp, Diabrotica virgifera
gtggccttgagtgttagtatagatagaataatatagatttatatttataaaaatatatatttctttttattaatataactctaatggccaaattaataataataaaccagttggttgttaacaactgagaatatgctttattgaaaaacgttacaaaataatcaaatttctctgacttacagctttgaacttctgtactatacctagatatttttgcattatccgtttgacggtttatcttctatacattcttaaactcttgtacgtaagactttcctcataaaaattctatcgttttaatattagagttcgaaactacgatcatgattttctgctgaaggtgctttagtctgttataagagagtttgaggaacgtattaacgatcaaattccaagtgtttaagtggcacatgacacaaaactaatattctttttctcatgggcatctttcagtgcgtcacagtttttcgatttctttctaatgcattaaattgtatgtgacagaaaaaaggcacgtctgtgattagagacatttataacatttattctagttgtcgatagatggcgctataatcgaaaaaaaaatatttacgaattatataatatatctacgaatataatctgtacaatttataagactatacaaatcaaagaaaataccattttataaatgcaataaacacaattgatttgtttttatgccaaattgcaaataaaatgtgacaactgtcagatttaactaaaatgtcatgtcactaaaatgtatattatcacggacttacctttttttctatcatttgtgacgcactgaaaaatgctcatgaaaagaagcatctaatccagtcaatgatcattttcctacataattttctgagcctgtaccgatttccaccaaaatttggctgtaggttccagttacactgaactttaaagttgaccctgtgccgtagggtgcttttacttttacaactttacataggtacactttaataatgtatttagtacactctagtcattagagtctag

SEQ ID NO: 745 - DNA, 837 bp, Diabrotica virgifera
gtggccttgagtgttagtatagatagaataatatagatttatatttataaaaatatatatttctttttattaatataactctaatggccaaattaataataataaaccagttggttgttaacaactgagaatatgctttattgaaaaacgttacaaaataatcaaatttctctgacttacagctttgaacttctgtactatacctagatatttttgcattatccgtttgacggtttatcttctatacattcttaaactcttgtacgtaagactttcctcataaaaattctatcgttttaatattagagttcgaaactacgatcatgattttctgctgaaggtgctttagtctgttataagagagtttgaggaacgtattaacgatcaaattccaagtgtttaagtggcacatgacacaaaactaatattctttttctcatgggcatctttcagtgcgtcacagtttttcgatttctttctaatgcattaaattgtatgtgacagaaaaaaggcacgtctgtgattagagacatttataacatttattctagttgtcgatagatggcgctataatcgaaaaaaaaatatttacgaattatataatatatctacgaatataatctgtacaatttataagactatacaaatcaaagaaaataccattttataaatgcaataaacacaattgatttgtttttatgccaaattgcaaataaaatgtgacaactgtcagatttaactaaaatgtcatgttagaataaatgtcataaatgtgtattatcacggacttacctttttttctatcatttgtgacgcactgaaaaatgttcatgaaaa

SEQ ID NO: 746 - DNA, 719 bp, Diabrotica virgifera
cgggaataaaaaagtctctagctcaaaaattatgtgacttataataaaaaaaagaatgtcagtccctattttttttcagcgaaaaagtgatcggaagcaacctcctaatcaccaccctatttaaaattagtcattgaccttatttggccttctttatttatgtattgttctgaagctatttccttgtggcatttttatgattaactattttgatgggaaataagccacaattaaattgaaaaaataattttattaacgtttcgagcccaaatcgggtttgttgtcaaaatacaaaatactactaaattaaacaaaaatgttgttgctaagtaaaaaaattcttctaataatttatttaatctgactcatttatattggcaattcagacgtatattatacattttaaagtagaagactttaaaatgatatcgccaatatttatgagttgcgttcctgggacgactttactaaaagatagttcattcgattacatgaaatcaatcccaactcaagaacatccgtcgcaaaaaaaaccaagcatgcgatccgtccttcaaaaagacaaccaaatgcaacgatgacagtaaaactctcgcgtcagagactccatagcaaatcacgagggaaaaccaggaaaaaacctcgtgataccatcccgacgtggtaactatttggtcttacatccaatttactttcaaaaaacaacaccaaattctgac

SEQ ID NO: 747 - DNA, 714 bp, Diabrotica virgifera
tgagccgtagaacacgaattttccgggcaacagccgatccggacgtcgacacgattgctatcaataaagaatttgaggaattacataacagcgatttttcgctacataacagcgatttttcgcgaaacaaaattttcttatatattctggttcattgttgttctgaagctatttccttgtggcatttttataattaagtattttctatgggaaataagccacaattttactaaaaaatgaatttattaacgtttcgaagcccaaatcgggtttcgttgtcaaaatacaaaatactattaaaataaacaaaaatgttgttgctaagtaaaaaaattcttctaataatttatttaatctgactcatttatattggcaattcagacgtatattatacattttaaagtagaagactttaaaatgatatcgccaatatttatgagttgcgttcctgggacgactttactaaaagatagttcattcgattacatgaaatcaatcccaactcaagaacatccgtcgcaaaaaaaaccaagcatgcgatccgtccttcaaaaagacaaccaaatgcaacgatgacagtaaaactctcgcgtcagagactccatagcaaatcacgagggaaaaccaggaaaaaacctcgtgataccatcccgacgtggtaactatttggtcttacatccaatttactttcaaaaaacaacaccaaattctgac

SEQ ID NO: 748 - DNA, 672 bp, Diabrotica virgifera
ctttggatgatgacgcacgggtacagattcccggactcaactgtacatacattttacttgaaaccgttcacatgctaacgcgcgttagcatgtgaacgatctcaagtaaaattaatgttgttctgaagctatttccttgtggcatttttatgattaactattttgatgggaaataagccacaattaaattgaaaaaataattttattaacgtttcgagcccaaatcgggtttgttgtcaaaatacaaaatactactaaattaaacaaaaatgttgttgctaagtaaaaaaattcttctaataatttatttaatctgactcatttatattggcaattcagacgtatattatacattttaaagtagaagactttaaaatgatatcgccaatatttatgagttgcgttcctgggacgactttactaaaagatagttcattcgattacatgaaatcaatcccaactcaagaacatccgtcgcaaaaaaaaccaagcatgcgatccgtccttcaaaaagacaaccaaatgcaacgatgacagtaaaactctcgcgtcagagactccatagcaaatcacgagggaaaaccaggaaaaaacctcgtgataccatcccgacgtggtaactatttggtcttacatccaatttactttcaaaaaacaacaccaaattctgac

SEQ ID NO: 749 - DNA, 3982 bp, Diabrotica virgifera
cgggaataaaaaagtctctagctcaaaaattatgtgacttataataaaaaaaagaatgtcagtccctattttttttcagcgaaaaagtgatcggaagcaacctcctaatcaccaccctatttaaaattagtcattgaccttatttggccttctttatttatgtattgttctgaagctatttccttgtggcatttttatgattaactattttgatgggaaataagccacaattaaattgaaaaaataattttattaacgtttcgagcccaaatcgggtttgttgtcaaaatacaaaatactactaaattaaacaaaaatgttgttgctaaataaaaaaattcttctatttatattggcaattcagacgtgtattatatatacattttaaagtagaagactttaaaatgatatcgccaatatttatgagttgcgttcctgggacgactttactaaaagatagttcattcgattacatgaaatcaatcccaactcaagaatattcgtcacaaaaaaaatcatagcatgtgatatgtctttaaaaagacaaccaaatgccacgatgacagtaaaattctcgcgttagagattccatagtaaatcccgagggaaaaccaggcaaaaacctcgtgataatatcccgacatcgtaagtatttgatcttacatttaatttactttcaaaaaactaataccaaattctgactttaatatgtttaaattataaataatattaataatacatagatatacaataagtaatactaaaatataaaatatgtactaactcgatatgttattgacttactaatcgtggtattttctttctattgacttcctctttcagtatgggtaaccacatcctactgcattctaccgaggaatttgcgacacaattggtttcatttagcataattatgtatattatattatatcctcaagtaaaatgtatgtagttgtaaccgcgcgttaagcgcttgtcatgagaacgaggtctaacagccacaaaactaaggatataaacgatatttatgcaattaatattcaggggattttattcgtaatattgatgatgaagtcatcaaacattagctaataagtcccattgctaacagtttgtttgttcaattaaaaaaatattagaaaaatcgtattaaaaagtcatatcgacggcggaagggcaggatctcgtaactagaaaatttgtataaaatgattaaaatgttttcgctttagaatagtgtatcggcacctattgaacagcggttccagctgggaaaatttccggaaggcttccagaaggctttcccagctgtaaccgctgtttaatagtgccgatacacttgttctaaagctaaagccgaagtaactcattttatacaaatttttcggttatgtggtcttgcctttccgccgtcgatatatgatatttacgctaacaaaattttgtatcactctcctaaatttttatgttataatcgatttccaagaaaaaaactctagacggtgagtaagattaaaaaatttgttgcataaatattaatttaatcaatggtactggtatctattctattatattttttgttaaattttgcctatcaattttgttcacatttcaatatttattcagctctattgaaaagttttagtacatatacatatacatatatccatttcttgtggtggtatcaattcggtgattatcagaaattaaaaacaatcagggaaaattcttgataaagaaagtttgacaaatttgacagactcatccagtctcatatatcgagactatttcgttcttttaatgccgcatatataggtactactaccatctttctaaaccactcattaatattcatctgagcggagtgctatattcgaggtgtgaacatcagtaaacaaatcatttggatacggattattccataaagcaggtagatcccttgtttatggaatctcacacctcgaaaattaccactctcttgagctgaatattaataagtctcttagaaagatggtagtaatatatatcttaacgcttaatttttttttgatatctaattgtgtcttttccaacagttcttattttaattaaagctaactacgcttttgttaattaaatgttatttaaaacaaaaggaattacctaattccattaaaatagttaacccgtaaatattggtgatttaaaatattgtgatttatctttataccattgtttaatgttattattattattagagattatagaattattattattagaaagttagtgaaccatagtttacgttattgtatctctcatagtgttcagcatgactacatttccaactatctttagaatagtattatcatatctatcatacctatcagaagagttttctttatttctgatatcggccttctttgattagttttatttggccacttggtcttttcttcgcacctgcggtaaaatggagtactaccaccgtttaaccaacaaacagaaataaatctttttgaaaacattatattcaacctgggctaaatttttgatgattaaatcctgcaataacaaaaccttctcctacaacttattcactcatttacaacttaaccaatattaccaacaactgaatcaaaaagtgagcttcggattatattcttagttattagatacacatatttagaaaaagtttcgttttgtttcatgtgaacttccgcataatgttagattttttcttgttcccctactggcgaagcgtccatgtaaccaccgttaccattggtaacagttaaaaatcttgcaaataaatatttaatgactactatgaaataattccatttatattttttaccaacagaaatatttgttaatagtacctaattcagtaaatctaaatagctaaataaaactagatctaaatataaatctaactagacgcacgaaaatattggcgagaatatgtgaatccgttgcacgttattattatgttgttaccacttaccacttctgctagctcgtttctgaaaattttgaaggagcgacggctctagagacggtgcgtggacactctgtgtatatcagtattgtaaccattttttggtttggtaacgttggtttagtacaacctattacagattacagtgtgcgtgcatttaaacatggaaaagtgttgctgcgtattgcgtattgcatggaaaagtttgctgaaaagtcattcttcttgtatatttttttatatatataattttgaagaaaaaaatgagattattgaaaatggaagaattcaaatataaacaatagttttcaaaatctgttctttttcctacttgttcattttttatgttaattttatggtagaataatatgtttaatttgtttattatttattgttatacctattacatatacataattgcatacatatacaattttgcaatagtgatttgtttaattttatcccacaggattgaaaataaaaacttatatttgggaggttcaaaataatttttttaaataagatttttttacatctggttttggtaacactttagaaaaagtcatgcgtcgccactgtgttcctctttgtttaactggagtcaaataaacacatgtgtgtgactttagttttatttagcatataactctttggaacgctcaatgtttaaataactttaataagcttactgttttttggtgtactgtggaagtacaacattatttcgacaatttgttaccattatcttattctcagtgtgttgtgagtacacaatatattattattgtttttgtgtttaatttttgacagatttgccttgaaagttggtcttaggtggtcttaggatgtaagtttaagataatcgacatgtaaataaagaaatgtgtgataaaagtatatttttatattgtatatatttttataaccaagtattacaataatttaatgtcaagaatttttaattattttgtttcgcatattgttacgattagtaaatataat

SEQ ID NO: 750 - DNA, 624 bp, Diabrotica virgifera
atattgtaatgtatgctttttctcatgagcatccttcagtgtgtcacagtttttcgatttcattctaacgcattaaattgtatgtgacagaaaaaaacgcacgtcggtgattacatttcgtcggtgacatttataacatttattctagttgtcaatagatggcgctataatcgaaaataaaataatttgcgaattatataatatatctacgaatataatctgaacaatttataagactatacaaatcaaagaaaataccattttataaatgcaataaacacaattgatttgtttttatgccaaattgcaaataaaatgtgacaactgtcagatttaactaaaatgtcatgtcactaaaatgtatattatcacggacttacctttttttctatcatttgtgacgcactgaaaaatgctcatgaaaagaagcatctaatccagtcaatgatcattttcctacataattttctgagcctgtaccgatttccaccaaaatttggctgtaggttccagttacactgaactttaaagttgaccctgtgccgtagggtgcttttacttttacaactttacataggtacactttaataatgtatttagtacactctagtcattagagtctag

SEQ ID NO: 751 - DNA, 615 bp, Diabrotica virgifera
tacttatatggttcttttcatgagcattttcagtgcgtcacagtttttcgatttctctctaacgcattaaattgtatgtgacagaaaaaaacgcacgtcgctgattacatttcgtcggtgacatttataacatttaatctagttgtcaatagatggcgctaataatataatattaataatattatattattctatataaaaaaatttaatctgtacaatttataagactatacaaatcaaagaaaataccattttataaatgcaataaacacaattgatttgtttttatgccaaattgcaaataaaatgtgacaactgtcagatttaactaaaatgtcatgtcactaaaatgtatattatcacggacttacctttttttctatcatttgtgacgcactgaaaaatgctcatgaaaagaagcatctaatccagtcaatgatcattttcctacataattttctgagcctgtaccgatttccaccaaaatttggctgtaggttccagttacactgaactttaaagttgaccctgtgccgtagggtgcttttacttttacaactttacataggtacactttaataatgtatttagtacactctagtcattagagtctag

SEQ ID NO: 752 - DNA, 435 bp, Diabrotica virgifera
atattgtaatgtatgctttttctcatgagcatccttcagtgtgtcacagtttttcgatttcattctaacgcattaaattgtatgtgacagaaaaaaacgcacgtcggtgattacatttcgtcggtgacatttataacatttattctagttgtcaatagatggcgctataatcgaaaataaaataatttgcgaattatataatatatctacgaatataatctgaacaatttataagactatacaaatcaaagaaaataccattttataaatgcaataaacacaattgatttgtttttatgccaaattgcaaataaaatgtgacaactgtcagatttaactaaaatgtcatgttagaataaatgtcataaatgtgtattatcacggacttacctttttttctatcatttgtgacgcactgaaaaatgttcatgaaaa

SEQ ID NO: 753 - DNA, 426 bp, Diabrotica virgifera
tacttatatggttcttttcatgagcattttcagtgcgtcacagtttttcgatttctctctaacgcattaaattgtatgtgacagaaaaaaacgcacgtcgctgattacatttcgtcggtgacatttataacatttaatctagttgtcaatagatggcgctaataatataatattaataatattatattattctatataaaaaaatttaatctgtacaatttataagactatacaaatcaaagaaaataccattttataaatgcaataaacacaattgatttgtttttatgccaaattgcaaataaaatgtgacaactgtcagatttaactaaaatgtcatgttagaataaatgtcataaatgtgtattatcacggacttacctttttttctatcatttgtgacgcactgaaaaatgttcatgaaaa

SEQ ID NO: 754 - DNA, 403 bp, Diabrotica virgifera
gtacaatttataagactatacaaatcaaagaaaataccattttataaatgcaataaacacaattgatttgtttttatgccaaattgcaaataaaatgtgacaactgtcagatttaactaaaatgtcatgtcactaaaatgtatattatcacggacttacctttttttctatcatttgtgacgcactgaaaaatgctcatgaaaagaagcatctaatccagtcaatgatcattttcctacataattttctgagcctgtaccgatttccaccaaaatttggctgtaggttccagttacactgaactttaaagttgaccctgtgccgtagggtgcttttacttttacaactttacataggtacactttaataatgtatttagtacactctagtcattagagtctag

SEQ ID NO: 755 - DNA, 214 bp, Diabrotica virgifera
gtacaatttataagactatacaaatcaaagaaaataccattttataaatgcaataaacacaattgatttgtttttatgccaaattgcaaataaaatgtgacaactgtcagatttaactaaaatgtcatgttagaataaatgtcataaatgtgtattatcacggacttacctttttttctatcatttgtgacgcactgaaaaatgttcatgaaaa

SEQ ID NO: 756 - DNA, 3938 bp, Diabrotica virgifera
ctttggatgatgacgcacgggtacagattcccggactcaactgtacatacattttacttgaaaccgttcacatgctaacgcgcgttagcatgtgaacgatctcaagtaaaattaatgttgttctgaagctatttccttgtggcatttttatgattaactattttgatgggaaataagccacaattaaattgaaaaaataattttattaacgtttcgagcccaaatcgggtttgttgtcaaaatacaaaatactactaaattaaacaaaaatgttgttgctaaataaaaaaattcttctatttatattggcaattcagacgtgtattatatatacattttaaagtagaagactttaaaatgatatcgccaatatttatgagttgcgttcctgggacgactttactaaaagatagttcattcgattacatgaaatcaatcccaactcaagaatattcgtcacaaaaaaaatcatagcatgtgatatgtctttaaaaagacaaccaaatgccacgatgacagtaaaattctcgcgttagagattccatagtaaatcccgagggaaaaccaggcaaaaacctcgtgataatatcccgacatcgtaagtatttgatcttacatttaatttactttcaaaaaactaataccaaattctgactttaatatgtttaaattataaataatattaataatacatagatatacaataagtaatactaaaatataaaatatgtactaactcgatatgttattgacttactaatcgtggtattttctttctattgacttcctctttcagtatgggtaaccacatcctactgcattctaccgaggaatttgcgacacaattggtttcatttagcataattatgtatattatattatatcctcaagtaaaatgtatgtagttgtaaccgcgcgttaagcgcttgtcatgagaacgaggtctaacagccacaaaactaaggatataaacgatatttatgcaattaatattcaggggattttattcgtaatattgatgatgaagtcatcaaacattagctaataagtcccattgctaacagtttgtttgttcaattaaaaaaatattagaaaaatcgtattaaaaagtcatatcgacggcggaagggcaggatctcgtaactagaaaatttgtataaaatgattaaaatgttttcgctttagaatagtgtatcggcacctattgaacagcggttccagctgggaaaatttccggaaggcttccagaaggctttcccagctgtaaccgctgtttaatagtgccgatacacttgttctaaagctaaagccgaagtaactcattttatacaaatttttcggttatgtggtcttgcctttccgccgtcgatatatgatatttacgctaacaaaattttgtatcactctcctaaatttttatgttataatcgatttccaagaaaaaaactagacggtgggtaagattaaaaaattggttgcatgaatattaatttaatcaatggtactggtatctattctgttatattttttgttcaattacgcctatcaattttgtttacatttcaatatttattcagatcttttaaaaagttttagtacatatacatatatccatttcttgtggtggtatcaattcggtaattatcagaaattaaaaacaatcagggaaaattcttgataaagaaagtttgacaaatttgacagactcatccagtcccgtatatcgagactgtttcgttctttgaatgccgcatatatactactatcatctttctaaaacactcattaatattcatctgagcggagtgctatattcgaggtgtgaaacatttggaacattttcgaggtgtgtaaacaaatcatttggatacggattattccataaaacaggtagatctcttgtttatggaatctcacacctcgaaaaataccactctcttgagctgaatattaatgagtctcttagaaagatggtagtaatatatcttaacgcttaatttttttgatatctaattgtgtcttttacaacagttcttattttaattaatgctaactacccttttgctaattaaatgttatttaaaacaaaaggaattacctaattccattaaaatagttaacccgtaaatattggtgatttaaaatattgtgatttatctttataccattgtttaatgttattattattattagagattatagaattattattattagaaagttagtgaaccatagtttacgttattgtatctctcatagtgttcagcatgactacatttccaactatctttagaatagtattatcatatctatcatacctatcagaagagttttctttatttctgatatcggccttctttgattagttttatttggccacttggtcttttcttcgcacctgcggtaaaatggagtactaccaccgtttaaccaacaaacagaaataaatctttttgaaaacattatattcaacctgggctaaatttttgatgattaaatcctgcaataacaaaaccttctcctacaacttattcactcatttacaacttaaccaatattaccaacaactgaatcaaaaagtgagcttcggattatattcttagttattagatacacatatttagaaaaagtttcgttttgtttcatgtgaacttccgcataatgttagattttttcttgttcccctactggcgaagcgtccatgtaaccaccgttaccattggtaacagttaaaaatcttgcaaataaatatttaatgactactatgaaataattccatttatattttttaccaacagaaatatttgttaatagtacctaattcagtaaatctaaatagctaaataaaactagatctaaatataaatctaactagacgcacgaaaatattggcgagaatatgtgaatccgttgcacgttattattatgttgttaccacttaccacttctgctagctcgtttctgaaaattttgaaggagcgacggctctagagacggtgcgtggacactctgtgtatatcagtattgtaaccattttttggtttggtaacgttggtttagtacaacctattacagattacagtgtgcgtgcatttaaacatggaaaagtgttgctgcgtattgcgtattgcatggaaaagtttgctgaaaagtcattcttcttgtatatttttttatatatataattttgaagaaaaaaatgagattattgaaaatggaagaattcaaatataaacaatagttttcaaaatctgttctttttcctacttgttcattttttatgttaattttatggtagaataatatgtttaatttgtttattatttattgttatacctattacatatacataattgcatacatatacaattttgcaatagtgatttgtttaattttatcccacaggattgaaaataaaaacttatatttgggaggttcaaaataatttttttaaataagatttttttacatctggttttggtaacactttagaaaaagtcatgcgtcgccactgtgttcctctttgtttaactggagtcaaataaacacatgtgtgtgactttagttttatttagcatataactctttggaacgctcaatgtttaaataactttaataagcttactgttttttggtgtactgtggaagtacaacattatttcgacaatttgttaccattatcttattctcagtgtgttgtgagtacacaatatattattattgtttttgtgtttaatttttgacagatttgccttgaaagttggtcttaggtggtcttaggatgtaagtttaagataatcgacatgtaaataaagaaatgtgtgataaaagtatatttttatattgtatatatttttataaccaagtattacaataatttaatgtcaagaatttttaattattttgtttcgcatattgttacgattagtaaatataat

SEQ ID NO: 757 - DNA, 3935 bp, Diabrotica virgifera
ctttggatgatgacgcacgggtacagattcccggactcaactgtacatacattttacttgaaaccgttcacatgctaacgcgcgttagcatgtgaacgatctcaagtaaaattaatgttgttctgaagctatttccttgtggcatttttatgattaactattttgatgggaaataagccacaattaaattgaaaaaataattttattaacgtttcgagcccaaatcgggtttgttgtcaaaatacaaaatactactaaattaaacaaaaatgttgttgctaaataaaaaaattcttctatttatattggcaattcagacgtgtattatatatacattttaaagtagaagactttaaaatgatatcgccaatatttatgagttgcgttcctgggacgactttactaaaagatagttcattcgattacatgaaatcaatcccaactcaagaatattcgtcacaaaaaaaatcatagcatgtgatatgtctttaaaaagacaaccaaatgccacgatgacagtaaaattctcgcgttagagattccatagtaaatcccgagggaaaaccaggcaaaaacctcgtgataatatcccgacatcgtaagtatttgatcttacatttaatttactttcaaaaaactaataccaaattctgactttaatatgtttaaattataaataatattaataatacatagatatacaataagtaatactaaaatataaaatatgtactaactcgatatgttattgacttactaatcgtggtattttctttctattgacttcctctttcagtatgggtaaccacatcctactgcattctaccgaggaatttgcgacacaattggtttcatttagcataattatgtatattatattatatcctcaagtaaaatgtatgtagttgtaaccgcgcgttaagcgcttgtcatgagaacgaggtctaacagccacaaaactaaggatataaacgatatttatgcaattaatattcaggggattttattcgtaatattgatgatgaagtcatcaaacattagctaataagtcccattgctaacagtttgtttgttcaattaaaaaaatattagaaaaatcgtattaaaaagtcatatcgacggcggaagggcaggatctcgtaactagaaaatttgtataaaatgattaaaatgttttcgctttagaatagtgtatcggcacctattgaacagcggttccagctgggaaaatttccggaaggcttccagaaggctttcccagctgtaaccgctgtttaatagtgccgatacacttgttctaaagctaaagccgaagtaactcattttatacaaatttttcggttatgtggtcttgcctttccgccgtcgatatatgatatttacgctaacaaaattttgtatcactctcctaaatttttatgttataatcgatttccaagaaaaaaactctagacggtgagtaagattaaaaaatttgttgcataaatattaatttaatcaatggtactggtatctattctattatattttttgttaaattttgcctatcaattttgttcacatttcaatatttattcagctctattgaaaagttttagtacatatacatatacatatatccatttcttgtggtggtatcaattcggtgattatcagaaattaaaaacaatcagggaaaattcttgataaagaaagtttgacaaatttgacagactcatccagtctcatatatcgagactatttcgttcttttaatgccgcatatataggtactactaccatctttctaaaccactcattaatattcatctgagcggagtgctatattcgaggtgtgaacatcagtaaacaaatcatttggatacggattattccataaagcaggtagatcccttgtttatggaatctcacacctcgaaaattaccactctcttgagctgaatattaataagtctcttagaaagatggtagtaatatatatcttaacgcttaatttttttttgatatctaattgtgtcttttccaacagttcttattttaattaaagctaactacgcttttgttaattaaatgttatttaaaacaaaaggaattacctaattccattaaaatagttaacccgtaaatattggtgatttaaaatattgtgatttatctttataccattgtttaatgttattattattattagagattatagaattattattattagaaagttagtgaaccatagtttacgttattgtatctctcatagtgttcagcatgactacatttccaactatctttagaatagtattatcatatctatcatacctatcagaagagttttctttatttctgatatcggccttctttgattagttttatttggccacttggtcttttcttcgcacctgcggtaaaatggagtactaccaccgtttaaccaacaaacagaaataaatctttttgaaaacattatattcaacctgggctaaatttttgatgattaaatcctgcaataacaaaaccttctcctacaacttattcactcatttacaacttaaccaatattaccaacaactgaatcaaaaagtgagcttcggattatattcttagttattagatacacatatttagaaaaagtttcgttttgtttcatgtgaacttccgcataatgttagattttttcttgttcccctactggcgaagcgtccatgtaaccaccgttaccattggtaacagttaaaaatcttgcaaataaatatttaatgactactatgaaataattccatttatattttttaccaacagaaatatttgttaatagtacctaattcagtaaatctaaatagctaaataaaactagatctaaatataaatctaactagacgcacgaaaatattggcgagaatatgtgaatccgttgcacgttattattatgttgttaccacttaccacttctgctagctcgtttctgaaaattttgaaggagcgacggctctagagacggtgcgtggacactctgtgtatatcagtattgtaaccattttttggtttggtaacgttggtttagtacaacctattacagattacagtgtgcgtgcatttaaacatggaaaagtgttgctgcgtattgcgtattgcatggaaaagtttgctgaaaagtcattcttcttgtatatttttttatatatataattttgaagaaaaaaatgagattattgaaaatggaagaattcaaatataaacaatagttttcaaaatctgttctttttcctacttgttcattttttatgttaattttatggtagaataatatgtttaatttgtttattatttattgttatacctattacatatacataattgcatacatatacaattttgcaatagtgatttgtttaattttatcccacaggattgaaaataaaaacttatatttgggaggttcaaaataatttttttaaataagatttttttacatctggttttggtaacactttagaaaaagtcatgcgtcgccactgtgttcctctttgtttaactggagtcaaataaacacatgtgtgtgactttagttttatttagcatataactctttggaacgctcaatgtttaaataactttaataagcttactgttttttggtgtactgtggaagtacaacattatttcgacaatttgttaccattatcttattctcagtgtgttgtgagtacacaatatattattattgtttttgtgtttaatttttgacagatttgccttgaaagttggtcttaggtggtcttaggatgtaagtttaagataatcgacatgtaaataaagaaatgtgtgataaaagtatatttttatattgtatatatttttataaccaagtattacaataatttaatgtcaagaatttttaattattttgtttcgcatattgttacgattagtaaatataat

SEQ ID NO: 758 - DNA, 3805 bp, Diabrotica virgifera
gtggccttgagtgttagtatagatagaataatatagatttatatttataaaaatatatatttctttttattaatataactctaatggccaaattaataataataaaccagttggttgttaacaactgagaatatgctttattgaaaaacgttacaaaataatcaaatttctctgacttacagctttgaacttctgtactatacctagatatttttgcattatccgtttgacggtttatcttctatacattcttaaactcttgtacgtaagactttcctcataaaaattctatcgttttaatattagagttcgaaactacgatcatgattttctgctgaaggtgctttagtctgttataagagagtttgaggaacgtattaacgatcaaattccaagtgtttaagtggcacatgacacaaaactaatattctttttctcatgggcatctttcagtgcgtcacagtttttcgatttctttctaatgcattaaattgtatgtgacagaaaaaaggcacgtctgtgattagagacatttataacatttattctagttgtcgatagatggcgctataatcgaaaaaaaaatatttacgaattatataatatatctacgaatataatctgtacaatttataagactatacaaatcaaagaaaataccattttataaatgcaataaacacaattgatttgtttttatgccaaattgcaaataaaatgtgacaactgtcagatttaactaaaatgtcatgtcactaaaatgtatattatcacggacttacctttttttctatcatttgtgacgcactgaaaaatgctcatgaaaagaagcatataaacgatatttatgcaattaatattcaggggattttattcgtaatattgatgatgaagtcatcaaacattagctaataagtcccattgctaacagtttgtttgttcaattaaaaaaatattagaaaaatcgtattaaaaagtcatatcgacggcggaagggcaggatctcgtaactagaaaatttgtataaaatgattaaaatgttttcgctttagaatagtgtatcggcacctattgaacagcggttccagctgggaaaatttccggaaggcttccagaaggctttcccagctgtaaccgctgtttaatagtgccgatacacttgttctaaagctaaagccgaagtaactcattttatacaaatttttcggttatgtggtcttgcctttccgccgtcgatatatgatatttacgctaacaaaattttgtatcactctcctaaatttttatgttataatcgatttccaagaaaaaaactagacggtgggtaagattaaaaaattggttgcatgaatattaatttaatcaatggtactggtatctattctgttatattttttgttcaattacgcctatcaattttgtttacatttcaatatttattcagatcttttaaaaagttttagtacatatacatatatccatttcttgtggtggtatcaattcggtaattatcagaaattaaaaacaatcagggaaaattcttgataaagaaagtttgacaaatttgacagactcatccagtcccgtatatcgagactgtttcgttctttgaatgccgcatatatactactatcatctttctaaaacactcattaatattcatctgagcggagtgctatattcgaggtgtgaaacatttggaacattttcgaggtgtgtaaacaaatcatttggatacggattattccataaaacaggtagatctcttgtttatggaatctcacacctcgaaaaataccactctcttgagctgaatattaatgagtctcttagaaagatggtagtaatatatcttaacgcttaatttttttgatatctaattgtgtcttttacaacagttcttattttaattaatgctaactacccttttgctaattaaatgttatttaaaacaaaaggaattacctaattccattaaaatagttaacccgtaaatattggtgatttaaaatattgtgatttatctttataccattgtttaatgttattattattattagagattatagaattattattattagaaagttagtgaaccatagtttacgttattgtatctctcatagtgttcagcatgactacatttccaactatctttagaatagtattatcatatctatcatacctatcagaagagttttctttatttctgatatcggccttctttgattagttttatttggccacttggtcttttcttcgcacctgcggtaaaatggagtactaccaccgtttaaccaacaaacagaaataaatctttttgaaaacattatattcaacctgggctaaatttttgatgattaaatcctgcaataacaaaaccttctcctacaacttattcactcatttacaacttaaccaatattaccaacaactgaatcaaaaagtgagcttcggattatattcttagttattagatacacatatttagaaaaagtttcgttttgtttcatgtgaacttccgcataatgttagattttttcttgttcccctactggcgaagcgtccatgtaaccaccgttaccattggtaacagttaaaaatcttgcaaataaatatttaatgactactatgaaataattccatttatattttttaccaacagaaatatttgttaatagtacctaattcagtaaatctaaatagctaaataaaactagatctaaatataaatctaactagacgcacgaaaatattggcgagaatatgtgaatccgttgcacgttattattatgttgttaccacttaccacttctgctagctcgtttctgaaaattttgaaggagcgacggctctagagacggtgcgtggacactctgtgtatatcagtattgtaaccattttttggtttggtaacgttggtttagtacaacctattacagattacagtgtgcgtgcatttaaacatggaaaagtgttgctgcgtattgcgtattgcatggaaaagtttgctgaaaagtcattcttcttgtatatttttttatatatataattttgaagaaaaaaatgagattattgaaaatggaagaattcaaatataaacaatagttttcaaaatctgttctttttcctacttgttcattttttatgttaattttatggtagaataatatgtttaatttgtttattatttattgttatacctattacatatacataattgcatacatatacaattttgcaatagtgatttgtttaattttatcccacaggattgaaaataaaaacttatatttgggaggttcaaaataatttttttaaataagatttttttacatctggttttggtaacactttagaaaaagtcatgcgtcgccactgtgttcctctttgtttaactggagtcaaataaacacatgtgtgtgactttagttttatttagcatataactctttggaacgctcaatgtttaaataactttaataagcttactgttttttggtgtactgtggaagtacaacattatttcgacaatttgttaccattatcttattctcagtgtgttgtgagtacacaatatattattattgtttttgtgtttaatttttgacagatttgccttgaaagttggtcttaggtggtcttaggatgtaagtttaagataatcgacatgtaaataaagaaatgtgtgataaaagtatatttttatattgtatatatttttataaccaagtattacaataatttaatgtcaagaatttttaattattttgtttcgcatattgttacgattagtaaatataat

SEQ ID NO: 759 - DNA, 3802 bp, Diabrotica virgifera
gtggccttgagtgttagtatagatagaataatatagatttatatttataaaaatatatatttctttttattaatataactctaatggccaaattaataataataaaccagttggttgttaacaactgagaatatgctttattgaaaaacgttacaaaataatcaaatttctctgacttacagctttgaacttctgtactatacctagatatttttgcattatccgtttgacggtttatcttctatacattcttaaactcttgtacgtaagactttcctcataaaaattctatcgttttaatattagagttcgaaactacgatcatgattttctgctgaaggtgctttagtctgttataagagagtttgaggaacgtattaacgatcaaattccaagtgtttaagtggcacatgacacaaaactaatattctttttctcatgggcatctttcagtgcgtcacagtttttcgatttctttctaatgcattaaattgtatgtgacagaaaaaaggcacgtctgtgattagagacatttataacatttattctagttgtcgatagatggcgctataatcgaaaaaaaaatatttacgaattatataatatatctacgaatataatctgtacaatttataagactatacaaatcaaagaaaataccattttataaatgcaataaacacaattgatttgtttttatgccaaattgcaaataaaatgtgacaactgtcagatttaactaaaatgtcatgtcactaaaatgtatattatcacggacttacctttttttctatcatttgtgacgcactgaaaaatgctcatgaaaagaagcatataaacgatatttatgcaattaatattcaggggattttattcgtaatattgatgatgaagtcatcaaacattagctaataagtcccattgctaacagtttgtttgttcaattaaaaaaatattagaaaaatcgtattaaaaagtcatatcgacggcggaagggcaggatctcgtaactagaaaatttgtataaaatgattaaaatgttttcgctttagaatagtgtatcggcacctattgaacagcggttccagctgggaaaatttccggaaggcttccagaaggctttcccagctgtaaccgctgtttaatagtgccgatacacttgttctaaagctaaagccgaagtaactcattttatacaaatttttcggttatgtggtcttgcctttccgccgtcgatatatgatatttacgctaacaaaattttgtatcactctcctaaatttttatgttataatcgatttccaagaaaaaaactctagacggtgagtaagattaaaaaatttgttgcataaatattaatttaatcaatggtactggtatctattctattatattttttgttaaattttgcctatcaattttgttcacatttcaatatttattcagctctattgaaaagttttagtacatatacatatacatatatccatttcttgtggtggtatcaattcggtgattatcagaaattaaaaacaatcagggaaaattcttgataaagaaagtttgacaaatttgacagactcatccagtctcatatatcgagactatttcgttcttttaatgccgcatatataggtactactaccatctttctaaaccactcattaatattcatctgagcggagtgctatattcgaggtgtgaacatcagtaaacaaatcatttggatacggattattccataaagcaggtagatcccttgtttatggaatctcacacctcgaaaattaccactctcttgagctgaatattaataagtctcttagaaagatggtagtaatatatatcttaacgcttaatttttttttgatatctaattgtgtcttttccaacagttcttattttaattaaagctaactacgcttttgttaattaaatgttatttaaaacaaaaggaattacctaattccattaaaatagttaacccgtaaatattggtgatttaaaatattgtgatttatctttataccattgtttaatgttattattattattagagattatagaattattattattagaaagttagtgaaccatagtttacgttattgtatctctcatagtgttcagcatgactacatttccaactatctttagaatagtattatcatatctatcatacctatcagaagagttttctttatttctgatatcggccttctttgattagttttatttggccacttggtcttttcttcgcacctgcggtaaaatggagtactaccaccgtttaaccaacaaacagaaataaatctttttgaaaacattatattcaacctgggctaaatttttgatgattaaatcctgcaataacaaaaccttctcctacaacttattcactcatttacaacttaaccaatattaccaacaactgaatcaaaaagtgagcttcggattatattcttagttattagatacacatatttagaaaaagtttcgttttgtttcatgtgaacttccgcataatgttagattttttcttgttcccctactggcgaagcgtccatgtaaccaccgttaccattggtaacagttaaaaatcttgcaaataaatatttaatgactactatgaaataattccatttatattttttaccaacagaaatatttgttaatagtacctaattcagtaaatctaaatagctaaataaaactagatctaaatataaatctaactagacgcacgaaaatattggcgagaatatgtgaatccgttgcacgttattattatgttgttaccacttaccacttctgctagctcgtttctgaaaattttgaaggagcgacggctctagagacggtgcgtggacactctgtgtatatcagtattgtaaccattttttggtttggtaacgttggtttagtacaacctattacagattacagtgtgcgtgcatttaaacatggaaaagtgttgctgcgtattgcgtattgcatggaaaagtttgctgaaaagtcattcttcttgtatatttttttatatatataattttgaagaaaaaaatgagattattgaaaatggaagaattcaaatataaacaatagttttcaaaatctgttctttttcctacttgttcattttttatgttaattttatggtagaataatatgtttaatttgtttattatttattgttatacctattacatatacataattgcatacatatacaattttgcaatagtgatttgtttaattttatcccacaggattgaaaataaaaacttatatttgggaggttcaaaataatttttttaaataagatttttttacatctggttttggtaacactttagaaaaagtcatgcgtcgccactgtgttcctctttgtttaactggagtcaaataaacacatgtgtgtgactttagttttatttagcatataactctttggaacgctcaatgtttaaataactttaataagcttactgttttttggtgtactgtggaagtacaacattatttcgacaatttgttaccattatcttattctcagtgtgttgtgagtacacaatatattattattgtttttgtgtttaatttttgacagatttgccttgaaagttggtcttaggtggtcttaggatgtaagtttaagataatcgacatgtaaataaagaaatgtgtgataaaagtatatttttatattgtatatatttttataaccaagtattacaataatttaatgtcaagaatttttaattattttgtttcgcatattgttacgattagtaaatataat

SEQ ID NO: 760 - DNA, 3403 bp, Diabrotica virgifera
atattgtaatgtatgctttttctcatgagcatccttcagtgtgtcacagtttttcgatttcattctaacgcattaaattgtatgtgacagaaaaaaacgcacgtcggtgattacatttcgtcggtgacatttataacatttattctagttgtcaatagatggcgctataatcgaaaataaaataatttgcgaattatataatatatctacgaatataatctgaacaatttataagactatacaaatcaaagaaaataccattttataaatgcaataaacacaattgatttgtttttatgccaaattgcaaataaaatgtgacaactgtcagatttaactaaaatgtcatgtcactaaaatgtatattatcacggacttacctttttttctatcatttgtgacgcactgaaaaatgctcatgaaaagaagcatataaacgatatttatgcaattaatattcaggggattttattcgtaatattgatgatgaagtcatcaaacattagctaataagtcccattgctaacagtttgtttgttcaattaaaaaaatattagaaaaatcgtattaaaaagtcatatcgacggcggaagggcaggatctcgtaactagaaaatttgtataaaatgattaaaatgttttcgctttagaatagtgtatcggcacctattgaacagcggttccagctgggaaaatttccggaaggcttccagaaggctttcccagctgtaaccgctgtttaatagtgccgatacacttgttctaaagctaaagccgaagtaactcattttatacaaatttttcggttatgtggtcttgcctttccgccgtcgatatatgatatttacgctaacaaaattttgtatcactctcctaaatttttatgttataatcgatttccaagaaaaaaactagacggtgggtaagattaaaaaattggttgcatgaatattaatttaatcaatggtactggtatctattctgttatattttttgttcaattacgcctatcaattttgtttacatttcaatatttattcagatcttttaaaaagttttagtacatatacatatatccatttcttgtggtggtatcaattcggtaattatcagaaattaaaaacaatcagggaaaattcttgataaagaaagtttgacaaatttgacagactcatccagtcccgtatatcgagactgtttcgttctttgaatgccgcatatatactactatcatctttctaaaacactcattaatattcatctgagcggagtgctatattcgaggtgtgaaacatttggaacattttcgaggtgtgtaaacaaatcatttggatacggattattccataaaacaggtagatctcttgtttatggaatctcacacctcgaaaaataccactctcttgagctgaatattaatgagtctcttagaaagatggtagtaatatatcttaacgcttaatttttttgatatctaattgtgtcttttacaacagttcttattttaattaatgctaactacccttttgctaattaaatgttatttaaaacaaaaggaattacctaattccattaaaatagttaacccgtaaatattggtgatttaaaatattgtgatttatctttataccattgtttaatgttattattattattagagattatagaattattattattagaaagttagtgaaccatagtttacgttattgtatctctcatagtgttcagcatgactacatttccaactatctttagaatagtattatcatatctatcatacctatcagaagagttttctttatttctgatatcggccttctttgattagttttatttggccacttggtcttttcttcgcacctgcggtaaaatggagtactaccaccgtttaaccaacaaacagaaataaatctttttgaaaacattatattcaacctgggctaaatttttgatgattaaatcctgcaataacaaaaccttctcctacaacttattcactcatttacaacttaaccaatattaccaacaactgaatcaaaaagtgagcttcggattatattcttagttattagatacacatatttagaaaaagtttcgttttgtttcatgtgaacttccgcataatgttagattttttcttgttcccctactggcgaagcgtccatgtaaccaccgttaccattggtaacagttaaaaatcttgcaaataaatatttaatgactactatgaaataattccatttatattttttaccaacagaaatatttgttaatagtacctaattcagtaaatctaaatagctaaataaaactagatctaaatataaatctaactagacgcacgaaaatattggcgagaatatgtgaatccgttgcacgttattattatgttgttaccacttaccacttctgctagctcgtttctgaaaattttgaaggagcgacggctctagagacggtgcgtggacactctgtgtatatcagtattgtaaccattttttggtttggtaacgttggtttagtacaacctattacagattacagtgtgcgtgcatttaaacatggaaaagtgttgctgcgtattgcgtattgcatggaaaagtttgctgaaaagtcattcttcttgtatatttttttatatatataattttgaagaaaaaaatgagattattgaaaatggaagaattcaaatataaacaatagttttcaaaatctgttctttttcctacttgttcattttttatgttaattttatggtagaataatatgtttaatttgtttattatttattgttatacctattacatatacataattgcatacatatacaattttgcaatagtgatttgtttaattttatcccacaggattgaaaataaaaacttatatttgggaggttcaaaataatttttttaaataagatttttttacatctggttttggtaacactttagaaaaagtcatgcgtcgccactgtgttcctctttgtttaactggagtcaaataaacacatgtgtgtgactttagttttatttagcatataactctttggaacgctcaatgtttaaataactttaataagcttactgttttttggtgtactgtggaagtacaacattatttcgacaatttgttaccattatcttattctcagtgtgttgtgagtacacaatatattattattgtttttgtgtttaatttttgacagatttgccttgaaagttggtcttaggtggtcttaggatgtaagtttaagataatcgacatgtaaataaagaaatgtgtgataaaagtatatttttatattgtatatatttttataaccaagtattacaataatttaatgtcaagaatttttaattattttgtttcgcatattgttacgattagtaaatataat

SEQ ID NO: 761 - DNA, 3400 bp, Diabrotica virgifera
atattgtaatgtatgctttttctcatgagcatccttcagtgtgtcacagtttttcgatttcattctaacgcattaaattgtatgtgacagaaaaaaacgcacgtcggtgattacatttcgtcggtgacatttataacatttattctagttgtcaatagatggcgctataatcgaaaataaaataatttgcgaattatataatatatctacgaatataatctgaacaatttataagactatacaaatcaaagaaaataccattttataaatgcaataaacacaattgatttgtttttatgccaaattgcaaataaaatgtgacaactgtcagatttaactaaaatgtcatgtcactaaaatgtatattatcacggacttacctttttttctatcatttgtgacgcactgaaaaatgctcatgaaaagaagcatataaacgatatttatgcaattaatattcaggggattttattcgtaatattgatgatgaagtcatcaaacattagctaataagtcccattgctaacagtttgtttgttcaattaaaaaaatattagaaaaatcgtattaaaaagtcatatcgacggcggaagggcaggatctcgtaactagaaaatttgtataaaatgattaaaatgttttcgctttagaatagtgtatcggcacctattgaacagcggttccagctgggaaaatttccggaaggcttccagaaggctttcccagctgtaaccgctgtttaatagtgccgatacacttgttctaaagctaaagccgaagtaactcattttatacaaatttttcggttatgtggtcttgcctttccgccgtcgatatatgatatttacgctaacaaaattttgtatcactctcctaaatttttatgttataatcgatttccaagaaaaaaactctagacggtgagtaagattaaaaaatttgttgcataaatattaatttaatcaatggtactggtatctattctattatattttttgttaaattttgcctatcaattttgttcacatttcaatatttattcagctctattgaaaagttttagtacatatacatatacatatatccatttcttgtggtggtatcaattcggtgattatcagaaattaaaaacaatcagggaaaattcttgataaagaaagtttgacaaatttgacagactcatccagtctcatatatcgagactatttcgttcttttaatgccgcatatataggtactactaccatctttctaaaccactcattaatattcatctgagcggagtgctatattcgaggtgtgaacatcagtaaacaaatcatttggatacggattattccataaagcaggtagatcccttgtttatggaatctcacacctcgaaaattaccactctcttgagctgaatattaataagtctcttagaaagatggtagtaatatatatcttaacgcttaatttttttttgatatctaattgtgtcttttccaacagttcttattttaattaaagctaactacgcttttgttaattaaatgttatttaaaacaaaaggaattacctaattccattaaaatagttaacccgtaaatattggtgatttaaaatattgtgatttatctttataccattgtttaatgttattattattattagagattatagaattattattattagaaagttagtgaaccatagtttacgttattgtatctctcatagtgttcagcatgactacatttccaactatctttagaatagtattatcatatctatcatacctatcagaagagttttctttatttctgatatcggccttctttgattagttttatttggccacttggtcttttcttcgcacctgcggtaaaatggagtactaccaccgtttaaccaacaaacagaaataaatctttttgaaaacattatattcaacctgggctaaatttttgatgattaaatcctgcaataacaaaaccttctcctacaacttattcactcatttacaacttaaccaatattaccaacaactgaatcaaaaagtgagcttcggattatattcttagttattagatacacatatttagaaaaagtttcgttttgtttcatgtgaacttccgcataatgttagattttttcttgttcccctactggcgaagcgtccatgtaaccaccgttaccattggtaacagttaaaaatcttgcaaataaatatttaatgactactatgaaataattccatttatattttttaccaacagaaatatttgttaatagtacctaattcagtaaatctaaatagctaaataaaactagatctaaatataaatctaactagacgcacgaaaatattggcgagaatatgtgaatccgttgcacgttattattatgttgttaccacttaccacttctgctagctcgtttctgaaaattttgaaggagcgacggctctagagacggtgcgtggacactctgtgtatatcagtattgtaaccattttttggtttggtaacgttggtttagtacaacctattacagattacagtgtgcgtgcatttaaacatggaaaagtgttgctgcgtattgcgtattgcatggaaaagtttgctgaaaagtcattcttcttgtatatttttttatatatataattttgaagaaaaaaatgagattattgaaaatggaagaattcaaatataaacaatagttttcaaaatctgttctttttcctacttgttcattttttatgttaattttatggtagaataatatgtttaatttgtttattatttattgttatacctattacatatacataattgcatacatatacaattttgcaatagtgatttgtttaattttatcccacaggattgaaaataaaaacttatatttgggaggttcaaaataatttttttaaataagatttttttacatctggttttggtaacactttagaaaaagtcatgcgtcgccactgtgttcctctttgtttaactggagtcaaataaacacatgtgtgtgactttagttttatttagcatataactctttggaacgctcaatgtttaaataactttaataagcttactgttttttggtgtactgtggaagtacaacattatttcgacaatttgttaccattatcttattctcagtgtgttgtgagtacacaatatattattattgtttttgtgtttaatttttgacagatttgccttgaaagttggtcttaggtggtcttaggatgtaagtttaagataatcgacatgtaaataaagaaatgtgtgataaaagtatatttttatattgtatatatttttataaccaagtattacaataatttaatgtcaagaatttttaattattttgtttcgcatattgttacgattagtaaatataat

SEQ ID NO: 762 - DNA, 3394 bp, Diabrotica virgifera
tacttatatggttcttttcatgagcattttcagtgcgtcacagtttttcgatttctctctaacgcattaaattgtatgtgacagaaaaaaacgcacgtcgctgattacatttcgtcggtgacatttataacatttaatctagttgtcaatagatggcgctaataatataatattaataatattatattattctatataaaaaaatttaatctgtacaatttataagactatacaaatcaaagaaaataccattttataaatgcaataaacacaattgatttgtttttatgccaaattgcaaataaaatgtgacaactgtcagatttaactaaaatgtcatgtcactaaaatgtatattatcacggacttacctttttttctatcatttgtgacgcactgaaaaatgctcatgaaaagaagcatataaacgatatttatgcaattaatattcaggggattttattcgtaatattgatgatgaagtcatcaaacattagctaataagtcccattgctaacagtttgtttgttcaattaaaaaaatattagaaaaatcgtattaaaaagtcatatcgacggcggaagggcaggatctcgtaactagaaaatttgtataaaatgattaaaatgttttcgctttagaatagtgtatcggcacctattgaacagcggttccagctgggaaaatttccggaaggcttccagaaggctttcccagctgtaaccgctgtttaatagtgccgatacacttgttctaaagctaaagccgaagtaactcattttatacaaatttttcggttatgtggtcttgcctttccgccgtcgatatatgatatttacgctaacaaaattttgtatcactctcctaaatttttatgttataatcgatttccaagaaaaaaactagacggtgggtaagattaaaaaattggttgcatgaatattaatttaatcaatggtactggtatctattctgttatattttttgttcaattacgcctatcaattttgtttacatttcaatatttattcagatcttttaaaaagttttagtacatatacatatatccatttcttgtggtggtatcaattcggtaattatcagaaattaaaaacaatcagggaaaattcttgataaagaaagtttgacaaatttgacagactcatccagtcccgtatatcgagactgtttcgttctttgaatgccgcatatatactactatcatctttctaaaacactcattaatattcatctgagcggagtgctatattcgaggtgtgaaacatttggaacattttcgaggtgtgtaaacaaatcatttggatacggattattccataaaacaggtagatctcttgtttatggaatctcacacctcgaaaaataccactctcttgagctgaatattaatgagtctcttagaaagatggtagtaatatatcttaacgcttaatttttttgatatctaattgtgtcttttacaacagttcttattttaattaatgctaactacccttttgctaattaaatgttatttaaaacaaaaggaattacctaattccattaaaatagttaacccgtaaatattggtgatttaaaatattgtgatttatctttataccattgtttaatgttattattattattagagattatagaattattattattagaaagttagtgaaccatagtttacgttattgtatctctcatagtgttcagcatgactacatttccaactatctttagaatagtattatcatatctatcatacctatcagaagagttttctttatttctgatatcggccttctttgattagttttatttggccacttggtcttttcttcgcacctgcggtaaaatggagtactaccaccgtttaaccaacaaacagaaataaatctttttgaaaacattatattcaacctgggctaaatttttgatgattaaatcctgcaataacaaaaccttctcctacaacttattcactcatttacaacttaaccaatattaccaacaactgaatcaaaaagtgagcttcggattatattcttagttattagatacacatatttagaaaaagtttcgttttgtttcatgtgaacttccgcataatgttagattttttcttgttcccctactggcgaagcgtccatgtaaccaccgttaccattggtaacagttaaaaatcttgcaaataaatatttaatgactactatgaaataattccatttatattttttaccaacagaaatatttgttaatagtacctaattcagtaaatctaaatagctaaataaaactagatctaaatataaatctaactagacgcacgaaaatattggcgagaatatgtgaatccgttgcacgttattattatgttgttaccacttaccacttctgctagctcgtttctgaaaattttgaaggagcgacggctctagagacggtgcgtggacactctgtgtatatcagtattgtaaccattttttggtttggtaacgttggtttagtacaacctattacagattacagtgtgcgtgcatttaaacatggaaaagtgttgctgcgtattgcgtattgcatggaaaagtttgctgaaaagtcattcttcttgtatatttttttatatatataattttgaagaaaaaaatgagattattgaaaatggaagaattcaaatataaacaatagttttcaaaatctgttctttttcctacttgttcattttttatgttaattttatggtagaataatatgtttaatttgtttattatttattgttatacctattacatatacataattgcatacatatacaattttgcaatagtgatttgtttaattttatcccacaggattgaaaataaaaacttatatttgggaggttcaaaataatttttttaaataagatttttttacatctggttttggtaacactttagaaaaagtcatgcgtcgccactgtgttcctctttgtttaactggagtcaaataaacacatgtgtgtgactttagttttatttagcatataactctttggaacgctcaatgtttaaataactttaataagcttactgttttttggtgtactgtggaagtacaacattatttcgacaatttgttaccattatcttattctcagtgtgttgtgagtacacaatatattattattgtttttgtgtttaatttttgacagatttgccttgaaagttggtcttaggtggtcttaggatgtaagtttaagataatcgacatgtaaataaagaaatgtgtgataaaagtatatttttatattgtatatatttttataaccaagtattacaataatttaatgtcaagaatttttaattattttgtttcgcatattgttacgattagtaaatataat

SEQ ID NO: 763 - DNA, 2501 bp, Diabrotica virgifera
  SmartBlast Evalue=1E-10; Info=Endonuclease-reverse transcriptase n=1 Tax=Bombyx mori RepID=D5LB38_BOMMO
gtaaacgaaaaagagagaggagacacggaggtcgacccactaccggtagattcatagcgtgaaaacactatagtgcacgaaacacctcaagtgatcaacacgtgttatgtagagtagtttcgaaagtgcaagcgacaacaacaatggaacaccaccctcaacaatcaaccgactcttcggcggctcaacaccaacccttgaataatcctcctgcgacaggtagcagcaatgcacatactcccgctcagacacagaaagcgaggattgctaaaatcaagcagaaacttctacctggtgtaaaaataacgctgcttctgtccctcatcatatatctcgccatgctcatcattggtattctaggtgttcaccactgccccgtcgaagaaaacatacccctcttcctcatagctacaggtgctattggattaatcaccaaaattacaacttacatgagagagcaaataatgaggcattttcaagttggatatgttgaatcgagtttatacaccattgaaatggtcttccttattttgggagcatactgggtgtataaggaataccctcccagctacaatccagatgaagggatattttattgtcagaagactgcctatctattcgcttttgtctacattacgattgtcttgacttttgtcgcaataggaattcttgcggtcttgctatgtatcttactatgcggattatgcgcatgtgcgtgctctgcctgttgcgatcttgaagcacagcccgaagaagatgaactgaataaaagcactgaaaactagccgtcgtatatttgcttaaatatggtttaagttttattttaaatttatgtaagagtatagacgatccataggtgttaagtcagacgttttatagaagacgatgcataatgcatattgcatattatcaaaattaatcaggcttaggtagagagaagctacagcatttctacaggacaataatttggctattgtgtgattgttcatagtttaaaagacatgcacatttaaattacattgtacctacagttaggttagatctaataattgtgcattcatttttttctaaaagtccgttgcacgtcgtatgtcctaactcgtccataagacttcaacaacttcgcaatgcaaccaaatgcttataatttcgaatccaacaagataatttacgagaatgtatacatatatgaagatataatacaacctaggaacaatgatatcgaaactttttgataatgttcagagggaaagaacaatggattcatgacgagccaactaatgaaggaaatggagaagaggagaaatgctgcagtaaaagataaaaagaacaccgaaaacaccacaaaaaaaaagagaagaagagaaaacaagtggaggcgatcaaatgatgaaaattttgaaaggtttaacaatggatgcaaaatgcgtcaaaaaagataatgtaaatccggagacgagatcacacaattaaagaaggaagttaaagaacttaaagatcaacaaagcggctacaaagatgaaataagaaatctgcgagaaacaaacgaaagatcataaaacaaatacgtaaattagaaaagaaaattaccacagcaaacgaaaaaagaagtaaatttgagagaggaggaaggagaagaaatgtaataatacaaggattaaaaatgaatacaaataatctaaaagtattgcgagatactatggagagttttatggaaaaatacctatgagcatacaagtatcaatagatgtaaatggagcaaggaaggtagaagacaattctaccatagtggaacttatcagcgtaaaaagcaaaatcgaagtaattaaaaattaaattacattaaaaaaccaaaagaacgaatgaattttatattaattatgctatgccaaaggaaaaaagaatcatccagaaagaccgtagaagtacctaaggctatgatagagagacataagtcttgagtagaataacaaatgttgaggtcctcagaaagatgaaaaaggaaaaggaaatcatgaatacgactaagataagaaagttataatatctcggctacgttatgagagcggataaatatgtgttgctacaaaccataatgcagggaaaaatacagggaaaacgaagtattggaagaaaacgcatctcctaggtcaacaatctgagaaagtggtataattgcagttccgtcgacttgttcagagctgcaatctcaaaagtgaaaatagctgtgatgattacccacctccttagaggagacggtacctaaagaagaagaagaagaataatgggaaaataccaaacacattattatagacatacatgcaccgaataaaagaaaacatagaaataaaagaccaccataatcgctgtcaatgaggaccctattatcgcgtctgcacaactgcaaaaccaccttgaccaattgggaacatggctcaacaaatggaaggtgaaagtaaatgaaatgaagtcaacccaagttacatttacaaaccgaagag

SEQ ID NO: 764 - DNA, 2471 bp, Diabrotica virgifera
  SmartBlast Evalue=1E-10; Info=Endonuclease-reverse transcriptase n=1 Tax=Bombyx mori RepID=D5LB38_BOMMO
gtaaacgaaaaagagagaggagacacggaggtcgacccactaccggtagattcatagcgtgaaaacactatagtgcacgaaacacctcaagtgatcaacacgtgttatgtagagtagtttcgaaagtgcaagcgacaacaacaatggaacaccaccctcaacaatcaaccgactcttcggcggctcaacaccaacccttgaataatcctcctgcgacaggtagcagcaatgcacatactcccgctcagacacagaaagcgaggattgctaaaatcaagcagaaacttctacctggtgtaaaaataacgctgcttctgtccctcatcatatatctcgccatgctcatcattggtattctaggtgttcaccactgccccgtcgaagaaaacatacccctcttcctcatagctacaggtgctattggattaatcaccaaaattacaacttacatgagagagcaaataatgaggcattttcaagttggatatgttgaatcgagtttatacaccattgaaatggtcttccttattttgggagcatactgggtgtataaggaataccctcccagctacaatccagatgaagggatattttattgtcagaagactgcctatctattcgcttttgtctacattacgattgtcttgacttttgtcgcaataggaattcttgcggtcttgctatgtatcttactatgcggattatgcgcatgtgcgtgctctgcctgttgcgatcttgaagcacagcccgaagaagatgaactgaataaaagcactgaaaactagccgtcgtatatttgcttaaatatggtttaagttttattttaaatttatgtaagagtatagacgatccataggtgttaagtcagacgttttatagaagacgatgcataatgcatattgcatattatcaaaattaatcaggcttaggtagaggctacagcatttctacatgacaataatttggctattgtgtgactgttcatagtttaaaagacatgcacatttaaattacgttgtacctacagttaggttagatcgtgcatttttttctcaaagtccgttgcacgtcgtccataagacttcaacaacttcgcaatgccaccaaatgcttataatttcgaatccaacaagataatttacgagaatgtatacatatatgaagatataatacaacctaggaacaatgatatcgaaactttttgataatgttcagagggaaagaacaatggattcatgacgagccaactaatgaaggaaatggagaagaggagaaatgctgcagtaaaagataaaaagaacaccgaaaacaccacaaaaaaaaagagaagaagagaaaacaagtggaggcgatcaaatgatgaaaattttgaaaggtttaacaatggatgcaaaatgcgtcaaaaaagataatgtaaatccggagacgagatcacacaattaaagaaggaagttaaagaacttaaagatcaacaaagcggctacaaagatgaaataagaaatctgcgagaaacaaacgaaagatcataaaacaaatacgtaaattagaaaagaaaattaccacagcaaacgaaaaaagaagtaaatttgagagaggaggaaggagaagaaatgtaataatacaaggattaaaaatgaatacaaataatctaaaagtattgcgagatactatggagagttttatggaaaaatacctatgagcatacaagtatcaatagatgtaaatggagcaaggaaggtagaagacaattctaccatagtggaacttatcagcgtaaaaagcaaaatcgaagtaattaaaaattaaattacattaaaaaaccaaaagaacgaatgaattttatattaattatgctatgccaaaggaaaaaagaatcatccagaaagaccgtagaagtacctaaggctatgatagagagacataagtcttgagtagaataacaaatgttgaggtcctcagaaagatgaaaaaggaaaaggaaatcatgaatacgactaagataagaaagttataatatctcggctacgttatgagagcggataaatatgtgttgctacaaaccataatgcagggaaaaatacagggaaaacgaagtattggaagaaaacgcatctcctaggtcaacaatctgagaaagtggtataattgcagttccgtcgacttgttcagagctgcaatctcaaaagtgaaaatagctgtgatgattacccacctccttagaggagacggtacctaaagaagaagaagaagaataatgggaaaataccaaacacattattatagacatacatgcaccgaataaaagaaaacatagaaataaaagaccaccataatcgctgtcaatgaggaccctattatcgcgtctgcacaactgcaaaaccaccttgaccaattgggaacatggctcaacaaatggaaggtgaaagtaaatgaaatgaagtcaacccaagttacatttacaaaccgaagag

SEQ ID NO: 765 - DNA, 1189 bp, Diabrotica virgifera
  SmartBlast Evalue=8E-16; Info=Endonuclease-reverse transcriptase n=1 Tax=Bombyx mori RepID=D5LB38_BOMMO
gcattgcgtatgttccctattaactgtaaagttaaggtgggacggcatatagataaaaaattaaaaataatcagtcaataaatctgacacatcgatccagttggtaactttcgagagttttttaatgctgtgatcaactacatgtgaatcaaaatattttgcacaaatatttaaggtatttaataacgctcctgcttgattttccttaatttcatggtttctctatacagtcaattcgcatctttacttttttatttactgttgtaaccagctgggaaacatacctttttgatttgtaacaatcttgatttttgtatagtttgagtaccgagtgtatgctttttgtgtcaaaattaaaattcaatacattttgctaccttgcccctttacattaaggcaatataatttaatacaaaggaaatgttaatatcacttttcataaaaataaaaacaacagtcgagtttcaactgccgccattcttgaaagaattacgtgctcacaagcgcctttttataatttagggtttcccggtctttttttggcttgggcagttgtcactggagatgtggatctaccgaagaatattaaaaataagttgggtagacagaataacaaatgttgaggtcctcagaaagatgaaaaaggaaatcatgaataagattaagataagaaagttacaatatctcggccacgctatgagaggggataaatatgtgttgctacaaaccataatgcagggaaaaatacagggaaaacgaagtattggaagacgcatctcctggctcaacaatctgagaaagtggtataattgcagttccatcgacttgtttagagctgcaatctcaaaagtaaaaatagcggcgatgattgccaacctccttagggaccgttcaagtattacgtatcgcaggtggagggggacgattaaaaatcttcaaaaattgcgttacgcattagttaaactcccataagagtgcgttacgtagggggggggaggggttaaaaatcttcaaaaatcgtgttacttaatacttgaacactaccttacaggagacggtacctaaagaagttgtcatatttcctggtcttaaattatggtaatagtcagtcttttgtggtatattcttgccgaattaatgtaattaatatcatttttgttaggttttaatattttgaattttgacaacg

SEQ ID NO: 766 - DNA, 1135 bp, Diabrotica virgifera
  SmartBlast Evalue=1E-14; Info=Endonuclease-reverse transcriptase n=1 Tax=Bombyx mori RepID=D5LB38_BOMMO
gcattgcgtatgttccctattaactgtaaagttaaggtgggacggcatatagataaaaaattaaaaataatcagtcaataaatctgacacatcgatccagttggtaactttcgagagttttttaatgctgtgatcaactacatgtgaatcaaaatattttgcacaaatatttaaggtatttaataacgctcctgcttgattttccttaatttcatggtttctctatacagtcaattcgcatctttacttttttatttactgttgtaaccagctgggaaacatacctttttgatttgtaacaatcttgatttttgtatagtttgagtaccgagtgtatgctttttgtgtcaaaattaaaattcaatacattttgctaccttgcccctttacattaaggcaatataatttaatacaaaggaaatgttaatatcacttttcataaaaataaaaacaacagtcgagtttcaactgccgccattcttgaaagaattacgtgctcacaagcgcctttttataatttagggtttcccggtctttttttggcttgggcagttgtcactggagatgtggatctaccgaagaatattaaaaataagttgggtagacagaataacaaatgttgaggtcctcagaaagatgaaaaaggaaatcatgaataagattaagataagaaagttacaatatctcggccacgctatgagaggggataaatatgtgttgctacaaaccataatgcagggaaaaatacagggaaaacgaagtattggaagacgcatctcctggctcaacaatctgagaaagtggtataattgcagttccatcgacttgtttagagctgcaatctcaaaagtgaaaatagctgtgatgattacccacctccttagaggagacggtacctaaagaagaagaagaagaataatgggaaaataccaaacacattattatagacatacatgcaccgaataaaagaaaacatagaaataaaagaccaccataatcgctgtcaatgaggaccctattatcgcgtctgcacaactgcaaaaccaccttgaccaattgggaacatggctcaacaaatggaaggtgaaagtaaatgaaatgaagtcaacccaagttacatttacaaaccgaagag

SEQ ID NO: 767 - DNA, 790 bp, Diabrotica virgifera
cgtggctaagaaaagggcggatttatgtaattttttgaaattgtattcagctttacagtttgatttttaaccgatgttatacatgcggtgcaatcatcaagtagttttaatctatcacttgaatacacatacaaattgtctattacgttgtgtagaagacaggtatatagtttttcggaaatcgataacaggaaatctcggaaacggaaatcacattcattggaatttaaaaaaggggataattttaccattttctctcattttgcacattttctatcttggtcaatcatatatatgatcaacaatccactctacactttgtccatatctgttgcagtgcatgtccatgtttcattctgagaaaattgagattgagaagaaaagagacaactcaaattttgcgaaagctaacgtctattaacttatcagtattttcgttcatccatttttgttattcaaaatttgtgtttgaaagcaaacacagaaaacatggaaatgctcattatacaaggaaaagtggaaggccgaagatcacgaggaagatccccaacaagatggatcgatcaaattacaagaatatgcaaaatacctatgcatgggttaaaaatgaccaaaaagagatctttggagacggacaatacacgacatcacgatcaccactccacttcttacggggaattactatttgaaaaaaaaaaggaaatataggtgaaaaatgtttgaataaatgaaatgctttccagaacatcctctggtctttaaaatggttttcagacatgttaaatcaaat

SEQ ID NO: 768 - DNA, 374 bp, Diabrotica virgifera
tttcataaaaacaagggaaagatattgttcttaggttgttacaaacttctcatgcttttccgaatcgtatattcatggaaagactcattatgcaaggaaaagtggaatgctgaagatcaagaggagatcaccaacaaaatagatcgacaaaattacaagaatatgcaaaatacctatgcatgggttaaaaatgaccaaaaagagatctttggagacggacaatacacgacatcacgatcaccactccacttcttacggggaattactatttgaaaaaaaaaaggaaatataggtgaaaaatgtttgaataaatgaaatgctttccagaacatcctctggtctttaaaatggttttcagacatgttaaatcaaat

SEQ ID NO: 769 - DNA, 5722 bp, Diabrotica virgifera
  SmartBlast Evalue=3E-64; Info=Endonuclease-reverse transcriptase n=1 Tax=Bombyx mori RepID=D7F161_BOMMO
gtaaacgaaaaagagagaggagacacggaggtcgacccactaccggtagattcatagcgtgaaaacactatagtgcacgaaacacctcaagtgatcaacacgtgttatgtagagtagtttcgaaagtgcaagcgacaacaacaatggaacaccaccctcaacaatcaaccgactcttcggcggctcaacaccaacccttgaataatcctcctgcgacaggtagcagcaatgcacatactcccgctcagacacagaaagcgaggattgctaaaatcaagcagaaacttctacctggtgtaaaaataacgctgcttctgtccctcatcatatatctcgccatgctcatcattggtattctaggtgttcaccactgccccgtcgaagaaaacatacccctcttcctcatagctacaggtgctattggattaatcaccaaaattacaacttacatgagagagcaaataatgaggcattttcaagttggatatgttgaatcgagtttatacaccattgaaatggtcttccttattttgggagcctattgggtgtacaaggaatatccaccgaaatacgatcccatttttggacgcgcctactgccagaagactgcttatatgatggcttttgtatacattacatttatatttggattcgctttagtagtggtagcaggatttatctttttcctttgttgcatttgctgcctcgcaggttgttctctaaaatctgacgatgaggagcaacctcagggaggtgctgcttaattgagtttaaatattgctactcagttttattatttaaactattattttgactgttgaaaaaatactgatctgattgaaagtctgaaagatttacagtactggaagtgttttaagcttggttacaatttgtatacctaatacctcctcctcctatgtaagtgggccttctctattgaggttggcgatcaatatggcaaatttatttctgtactgtataatatacttgagtgcaaagtagtcgactcaaaagcaaggtttaagattacacctcctgtttcaatgtaagaagtatgaaaataaaaatcggtaatgtgaaaacaatacctttattattgaccttacaaaaactgctattgcgttatttggaataatatgcaagaacaatattatgagaagagcacttgaaggatgggaaaaaggcatctcaataaatggtcataaaataaacaacctacgtttcgcagatgatacagcccttcttgcaaatagtcaagcagagctgattgatcttatacgactggttgaaaacgaaagtcaaatatttggtctgtaattaaatatatcaaagacaaagatcatgatagtgaatagactacataacaaccatccacatataaccacaattgatcggtttgaggttgtgagctcatacttatatctgggatcattaatcacaaacacaaggtcactacaggaagaaataaaacgtagatgtgatctagcaaaagtcgccacagcaaaaatgaccacaatatggaaggactgtcaaatttcaagagcgttaaagatgaggttgatcaactgcttaatattcccaatactgacttacggatgtgaatcttggaccctgagaaattcggaaagaagaaagatagacgccactgaaatgttctgttggagagaatgctacgaattccttggaccgaccatagaacaaataattcaattttaagagagctaaaagttagccaacgactctccagtaaagtccatctccaacaattaaaatactttggacatgttatgagagccaacacagaaaacatggaaagacacattatacaaggaaaggtggaaggccgaagatcacgaggaagatccccaacaagatggatcgatcagattacaggaatatgcaaaagacctatgcatgagttaaaagaaatgaccagagacagagatctttggagacggataatacacgacatcacgtcgaccactacactccctccggggggtcaggattgaagagagagatgcaagacgaacagagtttcctcaatattcacaattggaacgaacgcatgaacagagaaatcatcaattacaaaattaatttcttttttcagtatttgatataaccaccctactcctaataattatactatttaatcaatttcgcatggatcggatgacttttctaataaattcttatcattagtcattaaacgcagctctcaattccattattcccctggtgcatgatttctgtttcggacccttcgtttaagctcatcccaaacatcttttgttggatttaagttgagctcaacgcaggctaatttattgtacgtataccgacctcagtcagataagtggtggtgactcgtacgtatggtatcgtgcattatcgtacattaaaataaaggcatcaccaataaatgatgactgatgtaactatccgtcgttaatcctcctccacgtccttcccaggcacgaaaccaacttggtttttctatccatggaaatacctgcccaacaaatacaagaaccacctccatgtgacacagtttttcatatacaacattgagcaaatcgctctcctgtccttcgatagactcaacgcctcttgtcgttactttgatattcgtccctttgatattctacttcgtctaatcgcctttgcttctgggttttagttagcttgggacatatagctgccttttgtggtgtcaggttggctgctttcagtctttttctgactgtccaaatgctggtaactacacctcgaacctctctaaactcttctttgagagtagcaccagtcaaatgtcgatttctcaaggttttcgatacaagaaatcgatcatctctttccgttgttattcgtttacggcctcctcctcctccttgtcgacggacatagtcaccagtatcttggtactgacacagctaattggcttaaatttagtcaaattgccacggccctatggctcaggtcttctctcaatactgccactgcttgtgctgctttgacggaggtggtatcatttgtaatgtacttgcaaacttcttataagtgacttatgaattagagttgctatggaaaaactcaataatgtggttaaggattgtacactaaatatttttaaatttacaccttttagactgaaataggagacgtaccttcgcaaaataattttggatggattattttgcactcaagatataaaattgaattccttgaaaataatttgcttaaatgttgaaataagatcggaataaatttttagcctttcagttagtagtagtagtagtctcaaaacaacatttttatctttaaatggcgcgacgaggaatctttgataaataattacaaatggtggttttgcgtaaaattgataaatgggttccagatggtaaccatccttcttctctactttagagatgcaacttgctgtaattaatagagaatctattgatttttggaaatactttttcatatattataatgtagaaaagacgaattctttccaatgttctgggactgcagaatggatgcaaagatgcttttttctgatgataaatgtaggttttgatcaagctattggtttctccaatacgtaattgcatgatcttttctcttgtgagtagcattttcatattctcacttgttattagttttaattatttcatacccgtgattcgtcaatttcgctctactcgccaaatcgatgaggttcgtcggaatacgttcagcgtacctattcctggttagttattctcctttcagcaacagagaatgtgcttagacggtaaaagtgtattattgtattatcgtcacacgtcgcaaagctcgttattctaattaccaaccatagagcacaaattttgttacacaactaacaatacatcatggcgacgcaacaacataccgactcgcagtaaaaccaccacattttattcttcttcttaaagtccctctcctcaatggaggttggctactattatagtcagaaaacgaaatatttgtcagtgattcatttcgaagttcggataattgagtttatatcgttgcattgaagcgaaagagagataggctaccccagttaattgaaataatactcgaaaataatattccaacctactaagataactatcgttcaccctggcttagctcagtttctcaaggtgtgtgttcgtcttgtcctaatcttggatattcactctgaaaatttagaatgttagtaaacaaaacaatagttcaactaatcatatttattgttcaataaagataaaataaaaatgtgacttattaaatgcattaacaaatatattcaaattcttgccaaaaacttctggacacaatttctggattatacttatgcgtggcttgtggtgttggttcgatggtaacttcttgatgtcggatggtacagctggtgtcttttcaacctgggctagatggtcggtctcaggtcactgcagactgcagttctagttgattggttggttgctgttgattgttgatgcatcctgttcttatttgcctggaagtagcatcaccggtgatgtatgaggctggaggctcccgaagggagaaagattgattttttcccaaaaacccaagagatcgtctgtttggaataaaatgaagctaatatttaaatttcatgttttaaagaaattaattttcccctccattactaattgccactctcattgacatgacagcgcaaagtatgaggagatggacaaccatgttccgtattaaaagacagatatctagagagtgaggatatatggagtacgttcagtatgatgacttagatgttagatgaaaagagagttccttatagaacggcgccaaacaggttttaacggaaaaacaagttaaaacgaatacagaagatgatttactatttactatgatttacagaaggaactatttcgttccttgagtatagttgagcatattggtacttgttatttttcacgtggactagattttatgtttttctaactttcactgtgttaaaatgattcacatttcaaaggcctccaatttatttacggttggtgttttaagggtccacgtctcaactgcacagagaagagtcgacctgacgtgttaatttgataaacatagtgtaatttcgagttttataatcacatagcagttttttgatttttttgaaacattttgctggtctgtcctattctcgatcttatttctagatcaggatttagactgctatcgatttaacgtctcaggtacttaaatctattgacctgttctaaaatttgcccgtttattgtacgaggttggggtacattttggttttttccgattgacatcgctttggttttcttaatgtttattttcataccaaattgctcacaggtcgagttggtcttgtcgatgagtcgttgtagacccaagtcggaatccgcaatcaacaccatatcatcggtgtatgggatgctattgatatttacaccattcaccttgactctatccttggaatcctccagtgcctttttaaatagaagctcagagtaaagattaaagagcagtggtgagagaacacatccttgtgtaactccatttacattttatatagtacagtatattttggtgcataccgtatttgaatccatccagaaataaaagatatgtcaatttgatataatgtatttataaaaaacgctaattattatattacaacaactatggt

SEQ ID NO: 770 - DNA, 4351 bp, Diabrotica virgifera
  SmartBlast Evalue=6E-38; Info=Endonuclease-reverse transcriptase n=1 Tax=Bombyx mori RepID=D7F161_BOMMO
ggtcttcaattgactggtttgaggttgtgagctcacacttaatatctgggatcattgaccacaaacacagggtcactacaggaagaaataaaacgaagatgtgatctaagaaaagttgccagagcaaaaataaccacaatattgaaggacttcaagagtcaaatttcaagagcgttaaagatgaggttgatcaactgcttaatattcccaatactgacttacggatgtgaatcttggaccctgagaaattcggaaagaagaaagatagacgccactgaaatgttctgttggagagaatgctacgaattccttggaccgaccatagaacaaataattcaattttaagagagctaaaagttagccaacgactctccagtaaagtccatctccaacaattaaaatactttggacatgttatgagagccaacacagaaaacatggaaagacacattatacaaggaaaggtggaaggccgaagatcacgaggaagatccccaacaagatggatcgatcagattacaggaatatgcaaaagacctatgcatgagttaaaagaaatgaccagagacagagatctttggagacggataatacacgacatcacgtcgaccactacactccctccggggggtcaggattgaagagagagatgcaagacgaacagagtttcctcaatattcacaattggaacgaacgcatgaacagagaaatcatcaattacaaaattaatttcttttttcagtatttgatataaccaccctactcctaataattatactatttaatcaatttcgcatggatcggatgacttttctaataaattcttatcattagtcattaaacgcagctctcaattccattattcccctggtgcatgatttctgtttcggacccttcgtttaagctcatcccaaacatcttttgttggatttaagttgagctcaacgcaggctaatttattgtacgtataccgacctcagtcagataagtggtggtgactcgtacgtatggtatcgtgcattatcgtacattaaaataaaggcatcaccaataaatgatgactgatgtaactatccgtcgttaatcctcctccacgtccttcccaggcacgaaaccaacttggtttttctatccatggaaatacctgcccaacaaatacaagaaccacctccatgtgacacagtttttcatatacaacattgagcaaatcgctctcctgtccttcgatagactcaacgcctcttgtcgttactttgatattcgtccctttgatattctacttcgtctaatcgcctttgcttctgggttttagttagcttgggacatatagctgccttttgtggtgtcaggttggctgctttcagtctttttctgactgtccaaatgctggtaactacacctcgaacctctctaaactcttctttgagagtagcaccagtcaaatgtcgatttctcaaggttttcgatacaagaaatcgatcatctctttccgttgttattcgtttacggcctcctcctcctccttgtcgacggacatagtcaccagtatcttggtactgacacagctaattggcttaaatttagtcaaattgccacggccctatggctcaggtcttctctcaatactgccactgcttgtgctgctttgacggaggtggtatcatttgtaatgtacttgcaaacttcttataagtgacttatgaattagagttgctatggaaaaactcaataatgtggttaaggattgtacactaaatatttttaaatttacaccttttagactgaaataggagacgtaccttcgcaaaataattttggatggattattttgcactcaagatataaaattgaattccttgaaaataatttgcttaaatgttgaaataagatcggaataaatttttagcctttcagttagtagtagtagtagtctcaaaacaacatttttatctttaaatggcgcgacgaggaatctttgataaataattacaaatggtggttttgcgtaaaattgataaatgggttccagatggtaaccatccttcttctctactttagagatgcaacttgctgtaattaatagagaatctattgatttttggaaatactttttcatatattataatgtagaaaagacgaattctttccaatgttctgggactgcagaatggatgcaaagatgcttttttctgatgataaatgtaggttttgatcaagctattggtttctccaatacgtaattgcatgatcttttctcttgtgagtagcattttcatattctcacttgttattagttttaattatttcatacccgtgattcgtcaatttcgctctactcgccaaatcgatgaggttcgtcggaatacgttcagcgtacctattcctggttagttattctcctttcagcaacagagaatgtgcttagacggtaaaagtgtattattgtattatcgtcacacgtcgcaaagctcgttattctaattaccaaccatagagcacaaattttgttacacaactaacaatacatcatggcgacgcaacaacataccgactcgcagtaaaaccaccacattttattcttcttcttaaagtccctctcctcaatggaggttggctactattatagtcagaaaacgaaatatttgtcagtgattcatttcgaagttcggataattgagtttatatcgttgcattgaagcgaaagagagataggctaccccagttaattgaaataatactcgaaaataatattccaacctactaagataactatcgttcaccctggcttagctcagtttctcaaggtgtgtgttcgtcttgtcctaatcttggatattcactctgaaaatttagaatgttagtaaacaaaacaatagttcaactaatcatatttattgttcaataaagataaaataaaaatgtgacttattaaatgcattaacaaatatattcaaattcttgccaaaaacttctggacacaatttctggattatacttatgcgtggcttgtggtgttggttcgatggtaacttcttgatgtcggatggtacagctggtgtcttttcaacctgggctagatggtcggtctcaggtcactgcagactgcagttctagttgattggttggttgctgttgattgttgatgcatcctgttcttatttgcctggaagtagcatcaccggtgatgtatgaggctggaggctcccgaagggagaaagattgattttttcccaaaaacccaagagatcgtctgtttggaataaaatgaagctaatatttaaatttcatgttttaaagaaattaattttcccctccattactaattgccactctcattgacatgacagcgcaaagtatgaggagatggacaaccatgttccgtattaaaagacagatatctagagagtgaggatatatggagtacgttcagtatgatgacttagatgttagatgaaaagagagttccttatagaacggcgccaaacaggttttaacggaaaaacaagttaaaacgaatacagaagatgatttactatttactatgatttacagaaggaactatttcgttccttgagtatagttgagcatattggtacttgttatttttcacgtggactagattttatgtttttctaactttcactgtgttaaaatgattcacatttcaaaggcctccaatttatttacggttggtgttttaagggtccacgtctcaactgcacagagaagagtcgacctgacgtgttaatttgataaacatagtgtaatttcgagttttataatcacatagcagttttttgatttttttgaaacattttgctggtctgtcctattctcgatcttatttctagatcaggatttagactgctatcgatttaacgtctcaggtacttaaatctattgacctgttctaaaatttgcccgtttattgtacgaggttggggtacattttggttttttccgattgacatcgctttggttttcttaatgtttattttcataccaaattgctcacaggtcgagttggtcttgtcgatgagtcgttgtagacccaagtcggaatccgcaatcaacaccatatcatcggtgtatgggatgctattgatatttacaccattcaccttgactctatccttggaatcctccagtgcctttttaaatagaagctcagagtaaagattaaagagcagtggtgagagaacacatccttgtgtaactccatttacattttatatagtacagtatattttggtgcataccgtatttgaatccatccagaaataaaagatatgtcaatttgatataatgtatttataaaaaacgctaattattatattacaacaactatggt

SEQ ID NO: 771 - DNA, 4399 bp, Diabrotica virgifera
  SmartBlast Evalue=2E-23; Info=Endonuclease-reverse transcriptase n=1 Tax=Bombyx mori RepID=D5LB38_BOMMO
cgtggctaagaaaagggcggatttatgtaattttttgaaattgtattcagctttacagtttgatttttaaccgatgttatacatgcggtgcaatcatcaagtagttttaatctatcacttgaatacacatacaaattgtctattacgttgtgtagaagacaggtatatagtttttcggaaatcgataacaggaaatctcggaaacggaaatcacattcattggaatttaaaaaaggggataattttaccattttctctcattttgcacattttctatcttggtcaatcatatatatgatcaacaatccactctacactttgtccatatctgttgcagtgcatgtccatgtttcattctgagaaaattgagattgagaagaaaagagacaactcaaattttgcgaaagctaacgtctattaacttatcagtattttcgttcatccatttttgttattcaaaatttgtgtttgaaagcaaacacagaaaacatggaaatgctcattatacaaggaaaagtggaaggccgaagatcacgaggaagatccccaacaagatggatcgatcaaattacaagaatatgcaaaatacctatgcatgggttaaaaatgaccaaaaagagatctttggagacggacaatacacgacatcacgtcgaccactacactccctccggggtgctcaggattgaagagagagatgcaagacgaacagagtttcctcaatattcacaattggaacgaacgcatgaacagagaaatcatcaattacaaaattaatttcttttttcagtatttgatataaccaccctactcctaataattatactatttaatcaatttcgcatggatcggatgacttttctaataaattcttatcattagtcattaaacgcagctctcaattccattattcccctggtgcatgatttctgtttcggacccttcgtttaagctcatcccaaacatcttttgttggatttaagttgagctcaacgcaggctaatttattgtacgtataccgacctcagtcagataagtggtggtgactcgtacgtatggtatcgtgcattatcgtacattaaaataaaggcatcaccaataaatgatgactgatgtaactatccgtcgttaatcctcctccacgtccttcccaggcacgaaaccaacttggtttttctatccatggaaatacctgcccaacaaatacaagaaccacctccatgtgacacagtttttcatatacaacattgagcaaatcgctctcctgtccttcgatagactcaacgcctcttgtcgttactttgatattcgtccctttgatattctacttcgtctaatcgcctttgcttctgggttttagttagcttgggacatatagctgccttttgtggtgtcaggttggctgctttcagtctttttctgactgtccaaatgctggtaactacacctcgaacctctctaaactcttctttgagagtagcaccagtcaaatgtcgatttctcaaggttttcgatacaagaaatcgatcatctctttccgttgttattcgtttacggcctcctcctcctccttgtcgacggacatagtcaccagtatcttggtactgacacagctaattggcttaaatttagtcaaattgccacggccctatggctcaggtcttctctcaatactgccactgcttgtgctgctttgacggaggtggtatcatttgtaatgtacttgcaaacttcttataagtgacttatgaattagagttgctatggaaaaactcaataatgtggttaaggattgtacactaaatatttttaaatttacaccttttagactgaaataggagacgtaccttcgcaaaataattttggatggattattttgcactcaagatataaaattgaattccttgaaaataatttgcttaaatgttgaaataagatcggaataaatttttagcctttcagttagtagtagtagtagtctcaaaacaacatttttatctttaaatggcgcgacgaggaatctttgataaataattacaaatggtggttttgcgtaaaattgataaatgggttccagatggtaaccatccttcttctctactttagagatgcaacttgctgtaattaatagagaatctattgatttttggaaatactttttcatatattataatgtagaaaagacgaattctttccaatgttctgggactgcagaatggatgcaaagatgcttttttctgatgataaatgtaggttttgatcaagctattggtttctccaatacgtaattgcatgatcttttctcttgtgagtagcattttcatattctcacttgttattagttttaattatttcatacccgtgattcgtcaatttcgctctactcgccaaatcgatgaggttcgtcggaatacgttcagcgtacctattcctggttagttattctcctttcagcaacagagaatgtgcttagacggtaaaagtgtattattgtattatcgtcacacgtcgcaaagctcgttattctaattaccaaccatagagcacaaattttgttacacaactaacaatacatcatggcgacgcaacaacataccgactcgcagtaaaaccaccacattttattcttcttcttaaagtccctctcctcaatggaggttggctactattatagtcagaaaacgaaatatttgtcagtgattcatttcgaagttcggataattgagtttatatcgttgcattgaagcgaaagagagataggctaccccagttaattgaaataatactcgaaaataatattccaacctactaagataactatcgttcaccctggcttagctcagtttctcaaggtgtgtgttcgtcttgtcctaatcttggatattcactctgaaaatttagaatgttagtaaacaaaacaatagttcaactaatcatatttattgttcaataaagataaaataaaaatgtgacttattaaatgcattaacaaatatattcaaattcttgccaaaaacttctggacacaatttctggattatacttatgcgtggcttgtggtgttggttcgatggtaacttcttgatgtcggatggtacagctggtgtcttttcaacctgggctagatggtcggtctcaggtcactgcagactgcagttctagttgattggttggttgctgttgattgttgatgcatcctgttcttatttgcctggaagtagcatcaccggtgatgtatgaggctggaggctcccgaagggagaaagattgattttttcccaaaaacccaagagatcgtctgtttggaataaaatgaagctaatatttaaatttcatgttttaaagaaattaattttcccctccattactaattgccactctcattgacatgacagcgcaaagtatgaggagatggacaaccatgttccgtattaaaagacagatatctagagagtgaggatatatggagtacgttcagtatgatgacttagatgttagatgaaaagagagttccttatagaacggcgccaaacaggttttaacggaaaaacaagttaaaacgaatacagaagatgatttactatttactatgatttacagaaggaactatttcgttccttgagtatagttgagcatattggtacttgttatttttcacgtggactagattttatgtttttctaactttcactgtgttaaaatgattcacatttcaaaggcctccaatttatttacggttggtgttttaagggtccacgtctcaactgcacagagaagagtcgacctgacgtgttaatttgataaacatagtgtaatttcgagttttataatcacatagcagttttttgatttttttgaaacattttgctggtctgtcctattctcgatcttatttctagatcaggatttagactgctatcgatttaacgtctcaggtacttaaatctattgacctgttctaaaatttgcccgtttattgtacgaggttggggtacattttggttttttccgattgacatcgctttggttttcttaatgtttattttcataccaaattgctcacaggtcgagttggtcttgtcgatgagtcgttgtagacccaagtcggaatccgcaatcaacaccatatcatcggtgtatgggatgctattgatatttacaccattcaccttgactctatccttggaatcctccagtgcctttttaaatagaagctcagagtaaagattaaagagcagtggtgagagaacacatccttgtgtaactccatttacattttatatagtacagtatattttggtgcataccgtatttgaatccatccagaaataaaagatatgtcaatttgatataatgtatttataaaaaacgctaattattatattacaacaactatggt

SEQ ID NO: 772 - DNA, 4015 bp, Diabrotica virgifera
  SmartBlast Evalue=2E-23; Info=Endonuclease-reverse transcriptase n=1 Tax=Bombyx mori RepID=D5LB38_BOMMO
caattttaagagagcttaaaattagccaacgactctccagtaaagtccatctccaacaattaaaatactttggacatgttttgagaactaacacagaaaacatggaaagactaattatacaaggaaaggtggaaggccgaagatcacgaggaagatccccaacaagatggatcgatcagattacaggaatatgcaaaagacctatgcatgagttaaaagaaatgaccagagacagagatctttggagacggataatacacgacatcacgtcgaccactacactccctccggggggtcaggattgaagagagagatgcaagacgaacagagtttcctcaatattcacaattggaacgaacgcatgaacagagaaatcatcaattacaaaattaatttcttttttcagtatttgatataaccaccctactcctaataattatactatttaatcaatttcgcatggatcggatgacttttctaataaattcttatcattagtcattaaacgcagctctcaattccattattcccctggtgcatgatttctgtttcggacccttcgtttaagctcatcccaaacatcttttgttggatttaagttgagctcaacgcaggctaatttattgtacgtataccgacctcagtcagataagtggtggtgactcgtacgtatggtatcgtgcattatcgtacattaaaataaaggcatcaccaataaatgatgactgatgtaactatccgtcgttaatcctcctccacgtccttcccaggcacgaaaccaacttggtttttctatccatggaaatacctgcccaacaaatacaagaaccacctccatgtgacacagtttttcatatacaacattgagcaaatcgctctcctgtccttcgatagactcaacgcctcttgtcgttactttgatattcgtccctttgatattctacttcgtctaatcgcctttgcttctgggttttagttagcttgggacatatagctgccttttgtggtgtcaggttggctgctttcagtctttttctgactgtccaaatgctggtaactacacctcgaacctctctaaactcttctttgagagtagcaccagtcaaatgtcgatttctcaaggttttcgatacaagaaatcgatcatctctttccgttgttattcgtttacggcctcctcctcctccttgtcgacggacatagtcaccagtatcttggtactgacacagctaattggcttaaatttagtcaaattgccacggccctatggctcaggtcttctctcaatactgccactgcttgtgctgctttgacggaggtggtatcatttgtaatgtacttgcaaacttcttataagtgacttatgaattagagttgctatggaaaaactcaataatgtggttaaggattgtacactaaatatttttaaatttacaccttttagactgaaataggagacgtaccttcgcaaaataattttggatggattattttgcactcaagatataaaattgaattccttgaaaataatttgcttaaatgttgaaataagatcggaataaatttttagcctttcagttagtagtagtagtagtctcaaaacaacatttttatctttaaatggcgcgacgaggaatctttgataaataattacaaatggtggttttgcgtaaaattgataaatgggttccagatggtaaccatccttcttctctactttagagatgcaacttgctgtaattaatagagaatctattgatttttggaaatactttttcatatattataatgtagaaaagacgaattctttccaatgttctgggactgcagaatggatgcaaagatgcttttttctgatgataaatgtaggttttgatcaagctattggtttctccaatacgtaattgcatgatcttttctcttgtgagtagcattttcatattctcacttgttattagttttaattatttcatacccgtgattcgtcaatttcgctctactcgccaaatcgatgaggttcgtcggaatacgttcagcgtacctattcctggttagttattctcctttcagcaacagagaatgtgcttagacggtaaaagtgtattattgtattatcgtcacacgtcgcaaagctcgttattctaattaccaaccatagagcacaaattttgttacacaactaacaatacatcatggcgacgcaacaacataccgactcgcagtaaaaccaccacattttattcttcttcttaaagtccctctcctcaatggaggttggctactattatagtcagaaaacgaaatatttgtcagtgattcatttcgaagttcggataattgagtttatatcgttgcattgaagcgaaagagagataggctaccccagttaattgaaataatactcgaaaataatattccaacctactaagataactatcgttcaccctggcttagctcagtttctcaaggtgtgtgttcgtcttgtcctaatcttggatattcactctgaaaatttagaatgttagtaaacaaaacaatagttcaactaatcatatttattgttcaataaagataaaataaaaatgtgacttattaaatgcattaacaaatatattcaaattcttgccaaaaacttctggacacaatttctggattatacttatgcgtggcttgtggtgttggttcgatggtaacttcttgatgtcggatggtacagctggtgtcttttcaacctgggctagatggtcggtctcaggtcactgcagactgcagttctagttgattggttggttgctgttgattgttgatgcatcctgttcttatttgcctggaagtagcatcaccggtgatgtatgaggctggaggctcccgaagggagaaagattgattttttcccaaaaacccaagagatcgtctgtttggaataaaatgaagctaatatttaaatttcatgttttaaagaaattaattttcccctccattactaattgccactctcattgacatgacagcgcaaagtatgaggagatggacaaccatgttccgtattaaaagacagatatctagagagtgaggatatatggagtacgttcagtatgatgacttagatgttagatgaaaagagagttccttatagaacggcgccaaacaggttttaacggaaaaacaagttaaaacgaatacagaagatgatttactatttactatgatttacagaaggaactatttcgttccttgagtatagttgagcatattggtacttgttatttttcacgtggactagattttatgtttttctaactttcactgtgttaaaatgattcacatttcaaaggcctccaatttatttacggttggtgttttaagggtccacgtctcaactgcacagagaagagtcgacctgacgtgttaatttgataaacatagtgtaatttcgagttttataatcacatagcagttttttgatttttttgaaacattttgctggtctgtcctattctcgatcttatttctagatcaggatttagactgctatcgatttaacgtctcaggtacttaaatctattgacctgttctaaaatttgcccgtttattgtacgaggttggggtacattttggttttttccgattgacatcgctttggttttcttaatgtttattttcataccaaattgctcacaggtcgagttggtcttgtcgatgagtcgttgtagacccaagtcggaatccgcaatcaacaccatatcatcggtgtatgggatgctattgatatttacaccattcaccttgactctatccttggaatcctccagtgcctttttaaatagaagctcagagtaaagattaaagagcagtggtgagagaacacatccttgtgtaactccatttacattttatatagtacagtatattttggtgcataccgtatttgaatccatccagaaataaaagatatgtcaatttgatataatgtatttataaaaaacgctaattattatattacaacaactatggt

SEQ ID NO: 773 - DNA, 3983 bp, Diabrotica virgifera
  SmartBlast Evalue=2E-23; Info=Endonuclease-reverse transcriptase n=1 Tax=Bombyx mori RepID=D5LB38_BOMMO
tttcataaaaacaagggaaagatattgttcttaggttgttacaaacttctcatgcttttccgaatcgtatattcatggaaagactcattatgcaaggaaaagtggaatgctgaagatcaagaggagatcaccaacaaaatagatcgacaaaattacaagaatatgcaaaatacctatgcatgggttaaaaatgaccaaaaagagatctttggagacggacaatacacgacatcacgtcgaccactacactccctccggggtgctcaggattgaagagagagatgcaagacgaacagagtttcctcaatattcacaattggaacgaacgcatgaacagagaaatcatcaattacaaaattaatttcttttttcagtatttgatataaccaccctactcctaataattatactatttaatcaatttcgcatggatcggatgacttttctaataaattcttatcattagtcattaaacgcagctctcaattccattattcccctggtgcatgatttctgtttcggacccttcgtttaagctcatcccaaacatcttttgttggatttaagttgagctcaacgcaggctaatttattgtacgtataccgacctcagtcagataagtggtggtgactcgtacgtatggtatcgtgcattatcgtacattaaaataaaggcatcaccaataaatgatgactgatgtaactatccgtcgttaatcctcctccacgtccttcccaggcacgaaaccaacttggtttttctatccatggaaatacctgcccaacaaatacaagaaccacctccatgtgacacagtttttcatatacaacattgagcaaatcgctctcctgtccttcgatagactcaacgcctcttgtcgttactttgatattcgtccctttgatattctacttcgtctaatcgcctttgcttctgggttttagttagcttgggacatatagctgccttttgtggtgtcaggttggctgctttcagtctttttctgactgtccaaatgctggtaactacacctcgaacctctctaaactcttctttgagagtagcaccagtcaaatgtcgatttctcaaggttttcgatacaagaaatcgatcatctctttccgttgttattcgtttacggcctcctcctcctccttgtcgacggacatagtcaccagtatcttggtactgacacagctaattggcttaaatttagtcaaattgccacggccctatggctcaggtcttctctcaatactgccactgcttgtgctgctttgacggaggtggtatcatttgtaatgtacttgcaaacttcttataagtgacttatgaattagagttgctatggaaaaactcaataatgtggttaaggattgtacactaaatatttttaaatttacaccttttagactgaaataggagacgtaccttcgcaaaataattttggatggattattttgcactcaagatataaaattgaattccttgaaaataatttgcttaaatgttgaaataagatcggaataaatttttagcctttcagttagtagtagtagtagtctcaaaacaacatttttatctttaaatggcgcgacgaggaatctttgataaataattacaaatggtggttttgcgtaaaattgataaatgggttccagatggtaaccatccttcttctctactttagagatgcaacttgctgtaattaatagagaatctattgatttttggaaatactttttcatatattataatgtagaaaagacgaattctttccaatgttctgggactgcagaatggatgcaaagatgcttttttctgatgataaatgtaggttttgatcaagctattggtttctccaatacgtaattgcatgatcttttctcttgtgagtagcattttcatattctcacttgttattagttttaattatttcatacccgtgattcgtcaatttcgctctactcgccaaatcgatgaggttcgtcggaatacgttcagcgtacctattcctggttagttattctcctttcagcaacagagaatgtgcttagacggtaaaagtgtattattgtattatcgtcacacgtcgcaaagctcgttattctaattaccaaccatagagcacaaattttgttacacaactaacaatacatcatggcgacgcaacaacataccgactcgcagtaaaaccaccacattttattcttcttcttaaagtccctctcctcaatggaggttggctactattatagtcagaaaacgaaatatttgtcagtgattcatttcgaagttcggataattgagtttatatcgttgcattgaagcgaaagagagataggctaccccagttaattgaaataatactcgaaaataatattccaacctactaagataactatcgttcaccctggcttagctcagtttctcaaggtgtgtgttcgtcttgtcctaatcttggatattcactctgaaaatttagaatgttagtaaacaaaacaatagttcaactaatcatatttattgttcaataaagataaaataaaaatgtgacttattaaatgcattaacaaatatattcaaattcttgccaaaaacttctggacacaatttctggattatacttatgcgtggcttgtggtgttggttcgatggtaacttcttgatgtcggatggtacagctggtgtcttttcaacctgggctagatggtcggtctcaggtcactgcagactgcagttctagttgattggttggttgctgttgattgttgatgcatcctgttcttatttgcctggaagtagcatcaccggtgatgtatgaggctggaggctcccgaagggagaaagattgattttttcccaaaaacccaagagatcgtctgtttggaataaaatgaagctaatatttaaatttcatgttttaaagaaattaattttcccctccattactaattgccactctcattgacatgacagcgcaaagtatgaggagatggacaaccatgttccgtattaaaagacagatatctagagagtgaggatatatggagtacgttcagtatgatgacttagatgttagatgaaaagagagttccttatagaacggcgccaaacaggttttaacggaaaaacaagttaaaacgaatacagaagatgatttactatttactatgatttacagaaggaactatttcgttccttgagtatagttgagcatattggtacttgttatttttcacgtggactagattttatgtttttctaactttcactgtgttaaaatgattcacatttcaaaggcctccaatttatttacggttggtgttttaagggtccacgtctcaactgcacagagaagagtcgacctgacgtgttaatttgataaacatagtgtaatttcgagttttataatcacatagcagttttttgatttttttgaaacattttgctggtctgtcctattctcgatcttatttctagatcaggatttagactgctatcgatttaacgtctcaggtacttaaatctattgacctgttctaaaatttgcccgtttattgtacgaggttggggtacattttggttttttccgattgacatcgctttggttttcttaatgtttattttcataccaaattgctcacaggtcgagttggtcttgtcgatgagtcgttgtagacccaagtcggaatccgcaatcaacaccatatcatcggtgtatgggatgctattgatatttacaccattcaccttgactctatccttggaatcctccagtgcctttttaaatagaagctcagagtaaagattaaagagcagtggtgagagaacacatccttgtgtaactccatttacattttatatagtacagtatattttggtgcataccgtatttgaatccatccagaaataaaagatatgtcaatttgatataatgtatttataaaaaacgctaattattatattacaacaactatggt

SEQ ID NO: 774 - DNA, 2946 bp, Diabrotica virgifera
  SmartBlast Evalue=8E-49; Info=Endonuclease-reverse transcriptase n=1 Tax=Bombyx mori RepID=D7F170_BOMMO
gtaaacgaaaaagagagaggagacacggaggtcgacccactaccggtagattcatagcgtgaaaacactatagtgcacgaaacacctcaagtgatcaacacgtgttatgtagagtagtttcgaaagtgcaagcgacaacaacaatggaacaccaccctcaacaatcaaccgactcttcggcggctcaacaccaacccttgaataatcctcctgcgacaggtagcagcaatgcacatactcccgctcagacacagaaagcgaggattgctaaaatcaagcagaaacttctacctggtgtaaaaataacgctgcttctgtccctcatcatatatctcgccatgctcatcattggtattctaggtgttcaccactgccccgtcgaagaaaacatacccctcttcctcatagctacaggtgctattggattaatcaccaaaattacaacttacatgagagagcaaataatgaggcattttcaagttggatatgttgaatcgagtttatacaccattgaaatggtcttccttattttgggagcatactgggtgtataaggaataccctcccagctacaatccagatgaagggatattttattgtcagaagactgcctatctattcgcttttgtctacattacgattgtcttgacttttgtcgcaataggaattcttgcggtcttgctatgtatcttactatgcggattatgcgcatgtgcgtgctctgcctgttgcgatcttgaagcacagcccgaagaagatgaactgaataaaagcactgaaaactagccgtcgtatatttgcttaaatatggtttaagttttattttaaatttatgtaagagtatagacgatccataggtgttaagtcagacgttttatagaagacgatgcataatgcatattgcatattatcaaaattaatcaggcttaggtagagagaagctacagcatttctacaggacaataatttggctattgtgtgattgttcatagtttaaaagacatgcacatttaaattacattgtacctacagttaggttagatctaataattgtgcattcatttttttctaaaagtccgttgcacgtcgtatgtcctaactcgtccataagacttcaacaacttcgcaatgcaaccaaatgcttataatttcgaatccaacaagataatttacgagaatgtatacatatatgaagatataatacaacctaggaacaatgatatcgaaactttttgataatgttcagagggaaagaacaatggattcatgacgagccaactaatgaaggaaatggagaagaggagaaatgctgcagtaaaagataaaaagaacaccgaaaacaccacaaaaaaaaagagaagaagagaaaacaagtggaggcgatcaaatgatgaaaattttgaaaggtttaacaatggatgcaaaatgcgtcaaaaaagataatgtaaatccggagacgagatcacacaattaaagaaggaagttaaagaacttaaagatcaacaaagcggctacaaagatgaaataaaaaagctgcgagaaacaaacgaaaaagctataaatcaaataggtcaattagaaaaagaaattagtatagcaaatgaaaaaatagagaaattggaaagagaaagaaagagaaaaaatgtaataatacaaggaataaaaattgatacaaatgatcagaaagttttacgaggggctatggagaattttatggaaaaagagctacaagtttcagtagatgtaaatggagcaaggaaaataggagaaaatactgtcatagtggaactcaacagcgtgaaaaacaaaatagaagtaatgaaaaataaaagtaaattaaaaaccaaaaaggacgaaagaatctatattaatgatgatatgtcaaaagaagaaagaattattcagaaagaaattagaagcaaggctatggtagagaggcataatggaaaaaatgtaaaaataggataccagaagctaatcattaatggtgaaatatggacatggaataacagccaacaacaactcataaaagagaaaaatatacaaccaaaaaactagcaatacaacgaaagcagactgaaataacggagactgacatggcaaagtacaggtacacgaaatagacaaaatgtacagattattaatgaaaagcagcccataaaagaacatatattagtaggaacatggaatgtaagaggaacatacgaagaaggaaaactgaaacacctagtagatgaatgtaaaaaatataaattcgaaatagtagcactacaagaaacgaaacaactaggccaaaactcaatggaaataaatgactatttatttttcaatagcggaggcgaaaatagaatgttaggcacaggatttgtagtaaacaaaaagctgaaagatctaatcgttgactttaaaccaatttcagagagaatatgcatactaagaataagaggaaaataccaaaaaataacatttataaacatacatgcaccgactgaagagaaaaacatagagataaaggaagacttctacagtcaaatagatacagtattcgaaaatattcccaaatacgatataaaaatagtactaggtgatgctaatgccaaaataggaaaagaagaaatatacacacccaccataggaaaatatagtctgcatgaaacaacgaatgaaaatggtcacctcttaatagattttgcaaaagaaaaaacatgatcgttatgagcacgtactttcaacacaaaagaatatatcaaggaacatggagatcaccagatggaaaaccataaatcaaatagatcatgtgctcatcgaaaaagacatggaaaaatgtataaagaacataagaacatatagaggaccggatgcagacacagatcactttatagtcggaatacaacttaaacaggttataccagttcttagaaatcaacagaaaaaaggtacaaagtaa

SEQ ID NO: 775 - DNA, 2916 bp, Diabrotica virgifera
  SmartBlast Evalue=8E-49; Info=Endonuclease-reverse transcriptase n=1 Tax=Bombyx mori RepID=D7F170_BOMMO
gtaaacgaaaaagagagaggagacacggaggtcgacccactaccggtagattcatagcgtgaaaacactatagtgcacgaaacacctcaagtgatcaacacgtgttatgtagagtagtttcgaaagtgcaagcgacaacaacaatggaacaccaccctcaacaatcaaccgactcttcggcggctcaacaccaacccttgaataatcctcctgcgacaggtagcagcaatgcacatactcccgctcagacacagaaagcgaggattgctaaaatcaagcagaaacttctacctggtgtaaaaataacgctgcttctgtccctcatcatatatctcgccatgctcatcattggtattctaggtgttcaccactgccccgtcgaagaaaacatacccctcttcctcatagctacaggtgctattggattaatcaccaaaattacaacttacatgagagagcaaataatgaggcattttcaagttggatatgttgaatcgagtttatacaccattgaaatggtcttccttattttgggagcatactgggtgtataaggaataccctcccagctacaatccagatgaagggatattttattgtcagaagactgcctatctattcgcttttgtctacattacgattgtcttgacttttgtcgcaataggaattcttgcggtcttgctatgtatcttactatgcggattatgcgcatgtgcgtgctctgcctgttgcgatcttgaagcacagcccgaagaagatgaactgaataaaagcactgaaaactagccgtcgtatatttgcttaaatatggtttaagttttattttaaatttatgtaagagtatagacgatccataggtgttaagtcagacgttttatagaagacgatgcataatgcatattgcatattatcaaaattaatcaggcttaggtagaggctacagcatttctacatgacaataatttggctattgtgtgactgttcatagtttaaaagacatgcacatttaaattacgttgtacctacagttaggttagatcgtgcatttttttctcaaagtccgttgcacgtcgtccataagacttcaacaacttcgcaatgccaccaaatgcttataatttcgaatccaacaagataatttacgagaatgtatacatatatgaagatataatacaacctaggaacaatgatatcgaaactttttgataatgttcagagggaaagaacaatggattcatgacgagccaactaatgaaggaaatggagaagaggagaaatgctgcagtaaaagataaaaagaacaccgaaaacaccacaaaaaaaaagagaagaagagaaaacaagtggaggcgatcaaatgatgaaaattttgaaaggtttaacaatggatgcaaaatgcgtcaaaaaagataatgtaaatccggagacgagatcacacaattaaagaaggaagttaaagaacttaaagatcaacaaagcggctacaaagatgaaataaaaaagctgcgagaaacaaacgaaaaagctataaatcaaataggtcaattagaaaaagaaattagtatagcaaatgaaaaaatagagaaattggaaagagaaagaaagagaaaaaatgtaataatacaaggaataaaaattgatacaaatgatcagaaagttttacgaggggctatggagaattttatggaaaaagagctacaagtttcagtagatgtaaatggagcaaggaaaataggagaaaatactgtcatagtggaactcaacagcgtgaaaaacaaaatagaagtaatgaaaaataaaagtaaattaaaaaccaaaaaggacgaaagaatctatattaatgatgatatgtcaaaagaagaaagaattattcagaaagaaattagaagcaaggctatggtagagaggcataatggaaaaaatgtaaaaataggataccagaagctaatcattaatggtgaaatatggacatggaataacagccaacaacaactcataaaagagaaaaatatacaaccaaaaaactagcaatacaacgaaagcagactgaaataacggagactgacatggcaaagtacaggtacacgaaatagacaaaatgtacagattattaatgaaaagcagcccataaaagaacatatattagtaggaacatggaatgtaagaggaacatacgaagaaggaaaactgaaacacctagtagatgaatgtaaaaaatataaattcgaaatagtagcactacaagaaacgaaacaactaggccaaaactcaatggaaataaatgactatttatttttcaatagcggaggcgaaaatagaatgttaggcacaggatttgtagtaaacaaaaagctgaaagatctaatcgttgactttaaaccaatttcagagagaatatgcatactaagaataagaggaaaataccaaaaaataacatttataaacatacatgcaccgactgaagagaaaaacatagagataaaggaagacttctacagtcaaatagatacagtattcgaaaatattcccaaatacgatataaaaatagtactaggtgatgctaatgccaaaataggaaaagaagaaatatacacacccaccataggaaaatatagtctgcatgaaacaacgaatgaaaatggtcacctcttaatagattttgcaaaagaaaaaacatgatcgttatgagcacgtactttcaacacaaaagaatatatcaaggaacatggagatcaccagatggaaaaccataaatcaaatagatcatgtgctcatcgaaaaagacatggaaaaatgtataaagaacataagaacatatagaggaccggatgcagacacagatcactttatagtcggaatacaacttaaacaggttataccagttcttagaaatcaacagaaaaaaggtacaaagtaa

SEQ ID NO: 776 - DNA, 2555 bp, Diabrotica virgifera
  SmartBlast Evalue=8E-12; Info=Endonuclease-reverse transcriptase n=1 Tax=Bombyx mori RepID=D5LB38_BOMMO
gtaaacgaaaaagagagaggagacacggaggtcgacccactaccggtagattcatagcgtgaaaacactatagtgcacgaaacacctcaagtgatcaacacgtgttatgtagagtagtttcgaaagtgcaagcgacaacaacaatggaacaccaccctcaacaatcaaccgactcttcggcggctcaacaccaacccttgaataatcctcctgcgacaggtagcagcaatgcacatactcccgctcagacacagaaagcgaggattgctaaaatcaagcagaaacttctacctggtgtaaaaataacgctgcttctgtccctcatcatatatctcgccatgctcatcattggtattctaggtgttcaccactgccccgtcgaagaaaacatacccctcttcctcatagctacaggtgctattggattaatcaccaaaattacaacttacatgagagagcaaataatgaggcattttcaagttggatatgttgaatcgagtttatacaccattgaaatggtcttccttattttgggagcatactgggtgtataaggaataccctcccagctacaatccagatgaagggatattttattgtcagaagactgcctatctattcgcttttgtctacattacgattgtcttgacttttgtcgcaataggaattcttgcggtcttgctatgtatcttactatgcggattatgcgcatgtgcgtgctctgcctgttgcgatcttgaagcacagcccgaagaagatgaactgaataaaagcactgaaaactagccgtcgtatatttgcttaaatatggtttaagttttattttaaatttatgtaagagtatagacgatccataggtgttaagtcagacgttttatagaagacgatgcataatgcatattgcatattatcaaaattaatcaggcttaggtagagagaagctacagcatttctacaggacaataatttggctattgtgtgattgttcatagtttaaaagacatgcacatttaaattacattgtacctacagttaggttagatctaataattgtgcattcatttttttctaaaagtccgttgcacgtcgtatgtcctaactcgtccataagacttcaacaacttcgcaatgcaaccaaatgcttataatttcgaatccaacaagataatttacgagaatgtatacatatatgaagatataatacaacctaggaacaatgatatcgaaactttttgataatgttcagagggaaagaacaatggattcatgacgagccaactaatgaaggaaatggagaagaggagaaatgctgcagtaaaagataaaaagaacaccgaaaacaccacaaaaaaaaagagaagaagagaaaacaagtggaggcgatcaaatgatgaaaattttgaaaggtttaacaatggatgcaaaatgcgtcaaaaaagataatgtaaatccggagacgagatcacacaattaaagaaggaagttaaagaacttaaagatcaacaaagcggctacaaagatgaaataagaaatctgcgagaaacaaacgaaagatcataaaacaaatacgtaaattagaaaagaaaattaccacagcaaacgaaaaaagaagtaaatttgagagaggaggaaggagaagaaatgtaataatacaaggattaaaaatgaatacaaataatctaaaagtattgcgagatactatggagagttttatggaaaaatacctatgagcatacaagtatcaatagatgtaaatggagcaaggaaggtagaagacaattctaccatagtggaacttatcagcgtaaaaagcaaaatcgaagtaattaaaaattaaattacattaaaaaaccaaaagaacgaatgaattttatattaattatgctatgccaaaggaaaaaagaatcatccagaaagaccgtagaagtacctaaggctatgatagagagacataagtcttgagtagaataacaaatgttgaggtcctcagaaagatgaaaaaggaaaaggaaatcatgaatacgactaagataagaaagttataatatctcggctacgttatgagagcggataaatatgtgttgctacaaaccataatgcagggaaaaatacagggaaaacgaagtattggaagaaaacgcatctcctaggtcaacaatctgagaaagtggtataattgcagttccgtcgacttgttcagagctgcaatctcaaaagtaaaaatagcggcgatgattgccaacctccttagggaccgttcaagtattacgtatcgcaggtggagggggacgattaaaaatcttcaaaaattgcgttacgcattagttaaactcccataagagtgcgttacgtagggggggggaggggttaaaaatcttcaaaaatcgtgttacttaatacttgaacactaccttacaggagacggtacctaaagaagttgtcatatttcctggtcttaaattatggtaatagtcagtcttttgtggtatattcttgccgaattaatgtaattaatatcatttttgttaggttttaatattttgaattttgacaacg

SEQ ID NO: 777 - DNA, 2525 bp, Diabrotica virgifera
  SmartBlast Evalue=8E-12; Info=Endonuclease-reverse transcriptase n=1 Tax=Bombyx mori RepID=D5LB38_BOMMO
gtaaacgaaaaagagagaggagacacggaggtcgacccactaccggtagattcatagcgtgaaaacactatagtgcacgaaacacctcaagtgatcaacacgtgttatgtagagtagtttcgaaagtgcaagcgacaacaacaatggaacaccaccctcaacaatcaaccgactcttcggcggctcaacaccaacccttgaataatcctcctgcgacaggtagcagcaatgcacatactcccgctcagacacagaaagcgaggattgctaaaatcaagcagaaacttctacctggtgtaaaaataacgctgcttctgtccctcatcatatatctcgccatgctcatcattggtattctaggtgttcaccactgccccgtcgaagaaaacatacccctcttcctcatagctacaggtgctattggattaatcaccaaaattacaacttacatgagagagcaaataatgaggcattttcaagttggatatgttgaatcgagtttatacaccattgaaatggtcttccttattttgggagcatactgggtgtataaggaataccctcccagctacaatccagatgaagggatattttattgtcagaagactgcctatctattcgcttttgtctacattacgattgtcttgacttttgtcgcaataggaattcttgcggtcttgctatgtatcttactatgcggattatgcgcatgtgcgtgctctgcctgttgcgatcttgaagcacagcccgaagaagatgaactgaataaaagcactgaaaactagccgtcgtatatttgcttaaatatggtttaagttttattttaaatttatgtaagagtatagacgatccataggtgttaagtcagacgttttatagaagacgatgcataatgcatattgcatattatcaaaattaatcaggcttaggtagaggctacagcatttctacatgacaataatttggctattgtgtgactgttcatagtttaaaagacatgcacatttaaattacgttgtacctacagttaggttagatcgtgcatttttttctcaaagtccgttgcacgtcgtccataagacttcaacaacttcgcaatgccaccaaatgcttataatttcgaatccaacaagataatttacgagaatgtatacatatatgaagatataatacaacctaggaacaatgatatcgaaactttttgataatgttcagagggaaagaacaatggattcatgacgagccaactaatgaaggaaatggagaagaggagaaatgctgcagtaaaagataaaaagaacaccgaaaacaccacaaaaaaaaagagaagaagagaaaacaagtggaggcgatcaaatgatgaaaattttgaaaggtttaacaatggatgcaaaatgcgtcaaaaaagataatgtaaatccggagacgagatcacacaattaaagaaggaagttaaagaacttaaagatcaacaaagcggctacaaagatgaaataagaaatctgcgagaaacaaacgaaagatcataaaacaaatacgtaaattagaaaagaaaattaccacagcaaacgaaaaaagaagtaaatttgagagaggaggaaggagaagaaatgtaataatacaaggattaaaaatgaatacaaataatctaaaagtattgcgagatactatggagagttttatggaaaaatacctatgagcatacaagtatcaatagatgtaaatggagcaaggaaggtagaagacaattctaccatagtggaacttatcagcgtaaaaagcaaaatcgaagtaattaaaaattaaattacattaaaaaaccaaaagaacgaatgaattttatattaattatgctatgccaaaggaaaaaagaatcatccagaaagaccgtagaagtacctaaggctatgatagagagacataagtcttgagtagaataacaaatgttgaggtcctcagaaagatgaaaaaggaaaaggaaatcatgaatacgactaagataagaaagttataatatctcggctacgttatgagagcggataaatatgtgttgctacaaaccataatgcagggaaaaatacagggaaaacgaagtattggaagaaaacgcatctcctaggtcaacaatctgagaaagtggtataattgcagttccgtcgacttgttcagagctgcaatctcaaaagtaaaaatagcggcgatgattgccaacctccttagggaccgttcaagtattacgtatcgcaggtggagggggacgattaaaaatcttcaaaaattgcgttacgcattagttaaactcccataagagtgcgttacgtagggggggggaggggttaaaaatcttcaaaaatcgtgttacttaatacttgaacactaccttacaggagacggtacctaaagaagttgtcatatttcctggtcttaaattatggtaatagtcagtcttttgtggtatattcttgccgaattaatgtaattaatatcatttttgttaggttttaatattttgaattttgacaacg

SEQ ID NO: 778 - DNA, 4707 bp, Diabrotica virgifera
gactaatctatctttgtaggtgtcgaaaaggataccaatgattagttgaaaatggtttgagaagtgaagaaaaagtaaccccatgaaaaagtgaagagggaaaccgtggcgaggcccctccacttgttcataaaattgatgtatgttttcttgtatctggcatatcacaagtgtaatactcgtgatgaggaagtgttgttcagttgtctgggaatactcccattaatagtcggagcaagaacagttttatttgtgtaagctcatataagaaccaaatttcaatatttatttgtgtttgtaagcccatgtatatggagtatgactaagaaccaagtttcaatattttttgtgtttgtaagcccatgtatatggagtatgactaagaaccaagtttcgatattatttgtgtttgtaagcccatgtgtatggagaatgtataaatgccctatgagtcttttgttccctgtttgtttgtctatcccttttttgtctggaaattctagagtctgttatcccgtaatgtctgttagcccatgtccctgatggagtttgattttttttggcgaatagttcgttgacctctcttgtgtttgttcattgaaagtaggccaagagcagaagctgtgacaaggctggtgagcttaggatctggccgcgttgagtacaggtgaagcttgctttcggtggataaatggaagtggtcgttcgtcggaattgtcattctttccaatgtccctttggtctttcccttgtgtgtttgctttcatccctgttttgaaaaagtagtctaaccccagtttggaagagtgaagtctactcatgttttggaaaaataaagtctacccattgttttggaaaagtaagatctactcatgttttggaaaagtaagatcatatccccggttttgaaaaataaagaatatcccagtttgtgatttgaaaatgagaaagttgtcttgtgaactttcatgaaaggcttttatgtcctaggtaggactgttgattgaaaacgtaatgatgtagtatttcctatgtcatgtgttacgttcatttttttttggtcttgattaaatagtttgatatcccgtttgaatccagtatactagtttttttggtcttttgtatgttgtcacacgcgttccccccccttgttggtcttgtttgaatgagttgttgagatgtcatttttgacattttatctcaacgaggtatttagactgcattgtctaaatcctccttttgcagaaccgttgccgaatgtcccgtgaaactcgctaggtgtttagagtttaagcagatgcctatctgctgagccaagagctcagaaagattttttagtttttgaaaaccaatcctggttaggcaacgaggtgatgaggctgtgtctgccctgctatatggtatatattatatggtatatatagtatatatgtcacttgtgttactgcagtggatgtcagcgaggtccacacagggcacaagattatttctttcccaagacacagaaactcttgtcacctacagttctttgtagagtcaagaaacatttaagtctactcgactttaaagagtctggcgattgatggcacgctagcccactccctaacaatgatgttttgtttttgtttaatccccactagccattatttaaatatttttgtattgttgtcctgtcacacccaagaagtcaatgttggatttttgtagttatcgaaaactgaattggtaatccagtttcctctcttccgaggaggctattgtagcagatggatttctactacaatattttataaaaaatatccattaattttaatcctatcccaagaaaaatattaatttttctaatatattttgcgagtttatatatctttaaaatttcctaagccgctcctgttcgaaatatttcagaatattttcgcaacaaagtaaaatcataggaaagttcctatttatttgagtagcatttaccaactacgtagatagttattgtgaaatcattcattattcgagaatgaatcctctaaaaggtttggtgtttttcctttaagttttgagcgataaaaatcccatgttattattggtctgcattttgaaagatccttgagttgtagttgacgattggtcaatagttttggccgaacgatcgagaagaaatgcatcgtttggacgcgagagagacgtgacgatgtaaagttagttctaaaagtacatcagctctgtaagcatctttttgttagaactcaaaaagtcgcactttgccggccaaaatggttttcttcttatagtaaaagaactaatggatttctaacatgtcaaggaatataatgacaatagtttcacggcattttaatggatatattattgtgaaacagttctattgttatgcagtttgatttgccggtaaaagaagtgcgtggtttcctggttcctgtcctttatgtagctgttgctatttttatgatgttttgatttgttcatgttccagtaagaaatgcccagatgatattatttggtatcgattttatccagttttgtaatgatttgaatatcttcccctcccagccccgtctgaatggaaaattttgaagttccaagtgttgtgacatggatttttgttttaacaaggtatgataatgtttattttaaataattcacaagtggatattattggtaaaggttttacataattaaaaatgtttgttttcaacatggaaaatatattatgtaaagtaaatattagatggcagtgacatttgacagccatgtcaaatttttgttttggtacactgctaaaaataaggttaaaaattgtaaaatcatgtattttgttattattattcatttctggtttgagaatgtgtctattctcaataaaaataaaaaggtattaaggtttaaataaacattataaaatgtacacatctttatttctgtaacctctttatttaagaaaattattaacagatatctaatacaagtgaataagttttagaacagaagaaaatataatggcatagaagccaaatgatgataatttgtagcccactataaccccaatgaggaatctacgatgaatgtcccccagttgctttccagtaagtactcgatatgagaatttgaggatttttcaaacggcgtcccaatttgtttaaatagtaggaaagtcctcaagtctgtgtaagtatcctttgcttatttggttatgtagtttagtcttctttaaaccctcctacccctcccaacgaatctacgacctgccaccgcacaaaaaatgagctgccgttcgcatgaaggtttgcgtgtctgttccttctgctagccccatttcgactccccagtatctctatagatagtctttccttgatcccattagagcagacaggtaaaacgcttcaactggcacccaacgtgtgaggccgattcatttttctgcctccttcagtatccagttgttgtcttgtccagttgaacgcttcaactgtcgccctagaacgtggggcatgtcttttttgcctccctcagaccccatttgcatgttcccactaccatgtccttttagcctcctttcggtctcatttgtactacaactgttaggcagtgcccgtccccttgggcagccgatctcagtttgtggtgcaggtgtttccgataacatggaagcttgacttttgtcatattttgtgtacgcccactgttacaagtctagcttgtagacatgttcaactagtagttagcctatctactagtccccaatgtctttagccaccccccacttagtgttacttgtaatacttgtaacgtacaccctgaagtttgacccgagtaaatatcgccccagtcttcccatgtagtttagcccagattcctcttgtcttgcccccagaaactgtttcatgtcttttagtgcccccgaaactgtttcagtctgttagtccccatgaaagagcccatttttgtagtttttgttgcagaatgttaataatttttccaaagaggtgtaagtatgtacacattttgttgtggtgttgatttggtcatgctgctgattgtataggcatgtaccatttcatacatcatagtgtatttacattgtaaccccatattatgtaaaccgtagtatactggtattgtattgtatgtatcgtacaagagaatagtatgtttaatattgtagcgtacttactatattgtattgatattgtacccatgatgaaagcattggttaaattttttggaaaatattgatgaattatatagacaaacagatgagtaaaaaataaagtataaaatttttttagaaaattttggtataagtaacgttaaaaattttttttaaaattttgctaaaagttacaattaaaatgtttagaatattgaatccacttatagagtataacaatatgttatatttttttgcatgtattcttgtagatcatcagttttttacagaataaacgttttttgtgattattgatttggtcgtttgagtagatgtgtgataatagttggtatggtccgtgtatgagctaattcggtatggtctgtgtgagtaagttccgtgattttccagcgaagcctatctatatttgggtatattattgccacaggttagttggagaagtcatccttgaagaagtaaccccatgaagaagtgaagagggaaactgaggcgaggcccctccacttattaatgaagaagtagacccc

SEQ ID NO: 779 - DNA, 4702 bp, Diabrotica virgifera
gactaatctatctttgtaggtgtcgaaaaggataccaatgattagttgaaaatggtttgagaagtgaagaaaaagtaaccccatgaaaaagtgaagagggaaaccgtggcgaggcccctccacttgttcataaaattgatgtatgttttcttgtatctggcatatcacaagtgtaatactcgtgatgaggaagtgttgttcagttgtctgggaatactcccattaatagtcggagcaagaacagttttatttgtgtaagctcatataagaaccaaatttcaatatttatttgtgtttgtaagcccatgtatatggagtatgactaagaaccaagtttcaatattttttgtgtttgtaagcccatgtatatggagtatgactaagaaccaagtttcgatattatttgtgtttgtaagcccatgtgtatggagaatgtataaatgccctatgagtcttttgttccctgtttgtttgtctatcccttttttgtctggaaattctagagtctgttatcccgtaatgtctgttagcccatgtccctgatggagtttgattttttttggcgaatagttcgttgacctctcttgtgtttgttcattgaaagtaggccaagagcagaagctgtgacaaggctggtgagcttaggatctggccgcgttgagtacaggtgaagcttgctttcggtggataaatggaagtggtcgttcgtcggaattgtcattctttccaatgtccctttggtctttcccttgtgtgtttgctttcatccctgttttgaaaaagtagtctaaccccagtttggaagagtgaagtctactcatgttttggaaaaataaagtctacccattgttttggaaaagtaagatctactcatgttttggaaaagtaagatcatatccccggttttgaaaaataaagaatatcccagtttgtgatttgaaaatgagaaagttgtcttgtgaactttcatgaaaggcttttatgtcctaggtaggactgttgattgaaaacgtaatgatgtagtatttcctatgtcatgtgttacgttcatttttttttggtcttgattaaatagtttgatatcccgtttgaatccagtatactagtttttttggtcttttgtatgttgtcacacgcgttccccccccttgttggtcttgtttgaatgagttgttgagatgtcatttttgacattttatctcaacgaggtatttagactgcattgtctaaatcctccttttgcagaaccgttgccgaatgtcccgtgaaactcgctaggtgtttagagtttaagcagatgcctatctgctgagccaagagctcagaaagattttttagtttttgaaaaccaatcctggttaggcaacgaggtgatgaggctgtgtctgccctgctatatggtatatattatatggtatatatagtatatatgtcacttgtgttactgcagtggatgtcagcgaggtccacacagggcacaagattatttctttcccaagacacagaaactcttgtcacctacagttctttgtagagtcaagaaacatttaagtctactcgactttaaagagtctggcgattgatggcacgctagcccactccctaacaatgatgttttgtttttgtttaatccccactagccattatttaaatatttttgtattgttgtcctgtcacacccaagaagtcaatgttggatttttgtagttatcgaaaactgaattggtaatccagtttcctctcttccgaggaggctattgtagcagatggatttctactacaatattttataaaaaatatccattaattttaatcctatcccaagaaaaatattaatttttctaatatattttgcgagtttatatatctttaaaatttcctaagccgctcctgttcgaaatatttcagaatattttcgcaacaaagtaaaatcataggaaagttcctatttatttgagtagcatttaccaactacgtagatagttattgtgaaatcattcattattcgagaatgaatcctctaaaaggtttggtgtttttcctttaagttttgagcgataaaaatcccatgttattattggtctgcattttgaaagatccttgagttgtagttgacgattggtcaatagttttggccgaacgatcgagaagaaatgcatcgtttggacgcgagagagacgtgacgatgtaaagttagttctaaaagtacatcagctctgtaagcatctttttgttagaactcaaaaagtcgcactttgccggccaaaatggttttcttcttatagtaaaagaactaatggatttctaacatgtcaaggaatataatgacaatagtttcacggcattttaatggatatattattgtgaaacagttctattgttatgcagtttgatttgccggtaaaagaagtgcgtggtttcctggttcctgtcctttatgtagctgttgctatttttatgatgttttgatttgttcatgttccagtaagaaatgcccagatgatattatttggtatcgattttatccagttttgtaatgatttgaatatcttcccctcccagccccgtctgaatggaaaattttgaagttccaagtgttgtgacatggatttttgttttaacaaggtatgataatgtttattttaaataattcacaagtggatattattggtaaaggttttacataattaaaaatgtttgttttcaacatggaaaatatattatgtaaagtaaatattagatggcagtgacatttgacagccatgtcaaatttttgttttggtacactgctaaaaataaggttaaaaattgtaaaatcatgtattttgttattattattcatttctggtttgagaatgtgtctattctcaataaaaataaaaaggtattaaggtttaaataaacattataaaatgtacacatctttatttctgtaacctctttatttaagaaaattattaacagatatctaatacaagtgaataagttttagaacagaagaaaatataatggcatagaagccaaatgatgataatttgtagcccactataaccccaatgaggaatctacgatgaatgtcccccagttgctttccagtaagtactcgatatgagaatttgaggatttttcaaacggcgtcccaatttgtttaaatagtaggaaagtcctcaagtctgtgtaagtatcctttgcttatttggttatgtagtttagtcttctttaaaccctcctacccctcccaacgaatctacgacctgccaccgcacaaaaaatgagctgccgttcgcatgaaggtttgcgtgtctgttccttctgctagccccatttcgactccccagtatctctatagatagtctttccttgatcccattagagcagacaggtaaaacgcttcaactggcacccaacgtgtgaggccgattcatttttctgcctccttcagtatccagttgttgtcttgtccagttgaacgcttcaactagcgccctgtacgtggggctcgatccatttttagcccccctgatcccattagcatgtgcccactaccatatccctttagcctcctttcggtctcatttgtactacaactgttaggcagtgcccgtcttgggtagccgatctcagtttgtggtgcaagtgtttccgataacatggaagctcgactcgtgtcatgttttgtatgcccattgttacaagtctagcttgtagacatgttcaactagtagttagcctatctactagtccccaatgtctttagccaccccccacttagtgttacttgtaatacttgtaacgtacaccctgaagtttgacccgagtaaatatcgccccagtcttcccatgtagtttagcccagattcctcttgtcttgcccccagaaactgtttcatgtcttttagtgcccccgaaactgtttcagtctgttagtccccatgaaagagcccatttttgtagtttttgttgcagaatgttaataatttttccaaagaggtgtaagtatgtacacattttgttgtggtgttgatttggtcatgctgctgattgtataggcatgtaccatttcatacatcatagtgtatttacattgtaaccccatattatgtaaaccgtagtatactggtattgtattgtatgtatcgtacaagagaatagtatgtttaatattgtagcgtacttactatattgtattgatattgtacccatgatgaaagcattggttaaattttttggaaaatattgatgaattatatagacaaacagatgagtaaaaaataaagtataaaatttttttagaaaattttggtataagtaacgttaaaaattttttttaaaattttgctaaaagttacaattaaaatgtttagaatattgaatccacttatagagtataacaatatgttatatttttttgcatgtattcttgtagatcatcagttttttacagaataaacgttttttgtgattattgatttggtcgtttgagtagatgtgtgataatagttggtatggtccgtgtatgagctaattcggtatggtctgtgtgagtaagttccgtgattttccagcgaagcctatctatatttgggtatattattgccacaggttagttggagaagtcatccttgaagaagtaaccccatgaagaagtgaagagggaaactgaggcgaggcccctccacttattaatgaagaagtagacccc

SEQ ID NO: 780 - DNA, 4675 bp, Diabrotica virgifera
gactaatctatctttgtaggtgtcgaaaaggataccaatgattagttgaaaatggtttgagaagtgaagaaaaagtaaccccatgaaaaagtgaagagggaaaccgtggcgaggcccctccacttgttcataaaattgatgtatgttttcttgtatctggcatatcacaagtgtaatactcgtgatgaggaagtgttgttcagttgtctgggaatactcccattaatagtcggagcaagaacagttttatttgtgtaagctcatataagaaccaaatttcaatatttatttgtgtttgtaagcccatgtatatggagtatgactaagaaccaagtttcaatattttttgtgtttgtaagcccatgtatatggagtatgactaagaaccaagtttcgatattatttgtgtttgtaagcccatgtgtatggagaatgtataaatgccctatgagtcttttgttccctgtttgtttgtctatcccttttttgtctggaaattctagagtctgttatcccgtaatgtctgttagcccatgtccctgatggagtttgattttttttggcgaatagttcgttgacctctcttgtgtttgttcattgaaagtaggccaagagcagaagctgtgacaaggctggtgagcttaggatctggccgcgttgagtacaggtgaagcttgctttcggtggataaatggaagtggtcgttcgtcggaattgtcattctttccaatgtccctttggtctttcccttgtgtgtttgctttcatccctgttttgaaaaagtagtctaaccccagtttggaagagtgaagtctactcatgttttggaaaaataaagtctacccattgttttggaaaagtaagatctactcatgttttggaaaagtaagatcatatccccggttttgaaaaataaagaatatcccagtttgtgatttgaaaatgagaaagttgtcttgtgaactttcatgaaaggcttttatgtcctaggtaggactgttgattgaaaacgtaatgatgtagtatttcctatgtcatgtgttacgttcatttttttttggtcttgattaaatagtttgatatcccgtttgaatccagtatactagtttttttggtcttttgtatgttgtcacacgcgttccccccccttgttggtcttgtttgaatgagttgttgagatgtcatttttgacattttatctcaacgaggtatttagactgcattgtctaaatcctccttttgcagaaccgttgccgaatgtcccgtgaaactcgctaggtgtttagagtttaagcagatgcctatctgctgagccaagagctcagaaagattttttagtttttgaaaaccaatcctggttaggcaacgaggtgatgaggctgtgtctgccctgctatatggtatatattatatggtatatatagtatatatgtcacttgtgttactgcagtggatgtcagcgaggtccacacagggcacaagattatttctttcccaagacacagaaactcttgtcacctacagttctttgtagagtcaagaaacatttaagtctactcgactttaaagagtctggcgattgatggcacgctagcccactccctaacaatgatgttttgtttttgtttaatccccactagccattatttaaatatttttgtattgttgtcctgtcacacccaagaagtcaatgttggatttttgtagttatcgaaaactgaattggtaatccagtttcctctcttccgaggaggctattgtagcagatggatttctactacaatattttataaaaaatatccattaattttaatcctatcccaagaaaaatattaatttttctaatatattttgcgagtttatatatctttaaaatttcctaagccgctcctgttcgcattgtaaaggttaggaaatttcctatttatttgtgtagcaataaccaactacgtagattgttattgaaaacatccattattcgagaatgaatcctctaaaaggttcagtgtttttcctttaagttttgagcgctaaaaatcccatgttattattggtctgcattttgaaagatccttgagttgtagttgacgattggtcaatagttttggccgaacgatcgagaagaaatgcatcgtttggacgcgagagagacgtgacgatgtaaagttagttctaaaagtacatcagctctgtaagcatctttttgttagaactcaaaaagtcgcactttgccggccaaaatggttttcttcttatagtaaaagaactaatggatttctaacatgtcaaggaatataatgacaatagtttcacggcattttaatggatatattattgtgaaacagttctattgttatgcagtttgatttgccggtaaaagaagtgcgtggtttcctggttcctgtcctttatgtagctgttgctatttttatgatgttttgatttgttcatgttccagtaagaaatgcccagatgatattatttggtatcgattttatccagttttgtaatgatttgaatatcttcccctcccagccccgtctgaatggaaaattttgaagttccaagtgttgtgacatggatttttgttttaacaaggtatgataatgtttattttaaataattcacaagtggatattattggtaaaggttttacataattaaaaatgtttgttttcaacatggaaaatatattatgtaaagtaaatattagatggcagtgacatttgacagccatgtcaaatttttgttttggtacactgctaaaaataaggttaaaaattgtaaaatcatgtattttgttattattattcatttctggtttgagaatgtgtctattctcaataaaaataaaaaggtattaaggtttaaataaacattataaaatgtacacatctttatttctgtaacctctttatttaagaaaattattaacagatatctaatacaagtgaataagttttagaacagaagaaaatataatggcatagaagccaaatgatgataatttgtagcccactataaccccaatgaggaatctacgatgaatgtcccccagttgctttccagtaagtactcgatatgagaatttgaggatttttcaaacggcgtcccaatttgtttaaatagtaggaaagtcctcaagtctgtgtaagtatcctttgcttatttggttatgtagtttagtcttctttaaaccctcctacccctcccaacgaatctacgacctgccaccgcacaaaaaatgagctgccgttcgcatgaaggtttgcgtgtctgttccttctgctagccccatttcgactccccagtatctctatagatagtctttccttgatcccattagagcagacaggtaaaacgcttcaactggcacccaacgtgtgaggccgattcatttttctgcctccttcagtatccagttgttgtcttgtccagttgaacgcttcaactgtcgccctagaacgtggggcatgtcttttttgcctccctcagaccccatttgcatgttcccactaccatgtccttttagcctcctttcggtctcatttgtactacaactgttaggcagtgcccgtcttgggtagccgatctcagtttgtggtgcaagtgtttccgataacatggaagctcgactcgtgtcatgttttgtatgcccattgttacaagtctagcttgtagacatgttcaactagtagttagcctatctactagtccccaatgtctttagccaccccccacttagtgttacttgtaatacttgtaacgtacaccctgaagtttgacccgagtaaatatcgccccagtcttcccatgtagtttagcccagattcctcttgtcttgcccccagaaactgtttcatgtcttttagtgcccccgaaactgtttcagtctgttagtccccatgaaagagcccatttttgtagtttttgttgcagaatgttaataatttttccaaagaggtgtaagtatgtacacattttgttgtggtgttgatttggtcatgctgctgattgtataggcatgtaccatttcatacatcatagtgtatttacattgtaaccccatattatgtaaaccgtagtatactggtattgtattgtatgtatcgtacaagagaatagtatgtttaatattgtagcgtacttactatattgtattgatattgtacccatgatgaaagcattggttaaattttttggaaaatattgatgaattatatagacaaacagatgagtaaaaaataaagtataaaatttttttagaaaattttggtataagtaacgttaaaaattttttttaaaattttgctaaaagttacaattaaaatgtttagaatattgaatccacttatagagtataacaatatgttatatttttttgcatgtattcttgtagatcatcagttttttacagaataaacgttttttgtgattattgatttggtcgtttgagtagatgtgtgataatagttggtatggtccgtgtatgagctaattcggtatggtctgtgtgagtaagttccgtgattttccagcgaagcctatctatatttgggtatattattgccacaggttagttggagaagtcatccttgaagaagtaaccccatgaagaagtgaagagggaaactgaggcgaggcccctccacttattaatgaagaagtagacccc

SEQ ID NO: 781 - DNA, 4717 bp, Diabrotica virgifera
gactaatctatctttgtaggtgtcgaaaaggataccaatgattagttgaaaatggtttgagaagtgaagaaaaagtaaccccatgaaaaagtgaagagggaaaccgtggcgaggcccctccacttgttcataaaattgatgtatgttttcttgtatctggcatatcacaagtgtaatactcgtgatgaggaagtgttgttcagttgtctgggaatactcccattaatagtcggagcaagaacagttttatttgtgtaagctcatataagaaccaaatttcaatatttatttgtgtttgtaagcccatgtatatggagtatgactaagaaccaagtttcaatattttttgtgtttgtaagcccatgtatatggagtatgactaagaaccaagtttcgatattatttgtgtttgtaagcccatgtgtatggagaatgtataaatgccctatgagtcttttgttccctgtttgtttgtctatcccttttttgtctggaaattctagagtctgttatcccgtaatgtctgttagcccatgtccctgatggagtttgattttttttggcgaatagttcgttgacctctcttgtgtttgttcattgaaagtaggccaagagcagaagctgtgacaaggctggtgagcttaggatctggccgcgttgagtacaggtgaagcttgctttcggtggataaatggaagtggtcgttcgtcggaattgtcattctttccaatgtccctttggtctttcccttgtgtgtttgctttcatccctgttttgaaaaagtagtctaaccccagtttggaagagtgaagtctactcatgttttggaaaaataaagtctacccattgttttggaaaagtaagatctactcatgttttggaaaagtaagatcatatccccggttttgaaaaataaagaatatcccagtttgtgatttgaaaatgagaaagttgtcttgtgaactttcatgaaaggcttttatgtcctaggtaggactgttgattgaaaacgtaatgatgtagtatttcctatgtcatgtgttacgttcatttttttttggtcttgattaaatagtttgatatcccgtttgaatccagtatactagtttttttggtcttttgtatgttgtcacacgcgttccccccccttgttggtcttgtttgaatgagttgttgagatgtcatttttgacattttatctcaacgaggtatttagactgcattgtctaaatcctccttttgcagaaccgttgccgaatgtcccgtgaaactcgctaggtgtttagagtttaagcagatgcctatctgctgagccaagagctcagaaagattttttagtttttgaaaaccaatcctggttaggcaacgaggtgatgaggctgtgtctgccctgctatatggtatatattatatggtatatatagtatatatgtcacttgtgttactgcagtggatgtcagcgaggtccacacagggcacaagattatttctttcccaagacacagaaactcttgtcacctacagttctttgtagagtcaagaaacatttaagtctactcgactttaaagagtctggcgattgatggcacgctagcccactccctaacaatgatgttttgtttttgtttaatccccactagccattatttaaatatttttgtattgttgtcctgtcacacccaagaagtcaatgttggatttttgtagttatcgaaaactgaattggtaatccagtttcctctcttccgaggaggctattgtagcagatggatttctactacaatattttataaaaaatatccattaattttaatcctatcccaagaaaaatattaatttttctaatatattttgcgagtttatatatctttaaaatttcctaagccgctcctgttcgaaatatttcagaatattttcgcaacaaagtaaaatcataggaaagttcctatttatttgagtagcatttaccaactacgtagatagttattgtgaaatcattcattattcgagaatgaatcctctaaaaggtttggtgtttttcctttaagttttgagcgataaaaatcccatgttattattggtctgcattttgaaagatccttgagttgtagttgacgattggtcaatagttttggccgaacgatcgagaagaaatgcatcgtttggacgcgagagagacgtgacgatgtaaagttagttctaaaagtacatcacttcagtaaacatctttttgttagaactcaaccaacagactcgtagaaagtcgcactttgccggcaaaatggttttatttttatggtaaaagaagtgaaagactggcagtttgcccagtaaatgtcaacgaatataatgacaatagtttcacggcattttaatggatatattattgtgaaacagttctattgttatgcagttagatttgccggtggtataaaaaagaagtgcgtggtttcctggttcctgtcctttatgtagctgttgctatttttatgatgttttgatttgttcatgttccagtaagaaatgcccagatgatattatttggtatcgattttatccagttttgtaatgatttgaatatcttccctccctccaatctcgaatggaaagttttgaagttccaagtgttgtgacatggatttttgttttaaggtatgataatgtttattttaaataaattcacaagtggatattaatggtaaaggttttacataattaaatgtttgttttcaacatggaaaatattttattgtaaagtaaatgtaaaatggcagtgacttttgacagccatgtcaaattttagttttggtacactgctaaaaataaataaggttaaaaattgtaaaaccatatatttgtttttattattcatttcttttttgagaatatgtttattctcggagtaagttttaaataaacattataaaatgtacacatctttatttctgtaacctctttatttaagaaaattattaacagatatctaatacaagtgaataagttttagaacagaagaaaatataatggcatagaagccaaatgatgataatttgtagcccactataaccccaatgaggaatctacgatgaatgtcccccagttgctttccagtaagtactcgatatgagaatttgaggatttttcaaacggcgtcccaatttgtttaaatagtaggaaagtcctcaagtctgtgtaagtatcctttgcttatttggttatgtagtttagtcttctttaaaccctcctacccctcccaacgaatctacgacctgccaccgcacaaaaaatgagctgccgttcgcatgaaggtttgcgtgtctgttccttctgctagccccatttcgactccccagtatctctatagatagtctttccttgatcccattagagcagacaggtaaaacgcttcaactggcacccaacgtgtgaggccgattcatttttctgcctccttcagtatccagttgttgtcttgtccagttgaacgcttcaactgtcgccctagaacgtggggcatgtcttttttgcctccctcagaccccatttgcatgttcccactaccatgtccttttagcctcctttcggtctcatttgtactacaactgttaggcagtgcccgtcttgggtagccgatctcagtttgtggtgcaagtgtttccgataacatggaagctcgactcgtgtcatgttttgtatgcccattgttacaagtctagcttgtagacatgttcaactagtagttagcctatctactagtccccaatgtctttagccaccccccacttagtgttacttgtaatacttgtaacgtacaccctgaagtttgacccgagtaaatatcgccccagtcttcccatgtagtttagcccagattcctcttgtcttgcccccagaaactgtttcatgtcttttagtgcccccgaaactgtttcagtctgttagtccccatgaaagagcccatttttgtagtttttgttgcagaatgttaataatttttccaaagaggtgtaagtatgtacacattttgttgtggtgttgatttggtcatgctgctgattgtataggcatgtaccatttcatacatcatagtgtatttacattgtaaccccatattatgtaaaccgtagtatactggtattgtattgtatgtatcgtacaagagaatagtatgtttaatattgtagcgtacttactatattgtattgatattgtacccatgatgaaagcattggttaaattttttggaaaatattgatgaattatatagacaaacagatgagtaaaaaataaagtataaaatttttttagaaaattttggtataagtaacgttaaaaattttttttaaaattttgctaaaagttacaattaaaatgtttagaatattgaatccacttatagagtataacaatatgttatatttttttgcatgtattcttgtagatcatcagttttttacagaataaacgttttttgtgattattgatttggtcgtttgagtagatgtgtgataatagttggtatggtccgtgtatgagctaattcggtatggtctgtgtgagtaagttccgtgattttccagcgaagcctatctatatttgggtatattattgccacaggttagttggagaagtcatccttgaagaagtaaccccatgaagaagtgaagagggaaactgaggcgaggcccctccacttattaatgaagaagtagacccc

SEQ ID NO: 782 - DNA, 4707 bp, Diabrotica virgifera
gactaatctatctttgtaggtgtcgaaaaggataccaatgattagttgaaaatggtttgagaagtgaagaaaaagtaaccccatgaaaaagtgaagagggaaaccgtggcgaggcccctccacttgttcataaaattgatgtatgttttcttgtatctggcatatcacaagtgtaatactcgtgatgaggaagtgttgttcagttgtctgggaatactcccattaatagtcggagcaagaacagttttatttgtgtaagctcatataagaaccaaatttcaatatttatttgtgtttgtaagcccatgtatatggagtatgactaagaaccaagtttcaatattttttgtgtttgtaagcccatgtatatggagtatgactaagaaccaagtttcgatattatttgtgtttgtaagcccatgtgtatggagaatgtataaatgccctatgagtcttttgttccctgtttgtttgtctatcccttttttgtctggaaattctagagtctgttatcccgtaatgtctgttagcccatgtccctgatggagtttgattttttttggcgaatagttcgttgacctctcttgtgtttgttcattgaaagtaggccaagagcagaagctgtgacaaggctggtgagcttaggatctggccgcgttgagtacaggtgaagcttgctttcggtggataaatggaagtggtcgttcgtcggaattgtcattctttccaatgtccctttggtctttcccttgtgtgtttgctttcatccctgttttgaaaaagtagtctaaccccagtttggaagagtgaagtctactcatgttttggaaaaataaagtctacccattgttttggaaaagtaagatctactcatgttttggaaaagtaagatcatatccccggttttgaaaaataaagaatatcccagtttgtgatttgaaaatgagaaagttgtcttgtgaactttcatgaaaggcttttatgtcctaggtaggactgttgattgaaaacgtaatgatgtagtatttcctatgtcatgtgttacgttcatttttttttggtcttgattaaatagtttgatatcccgtttgaatccagtatactagtttttttggtcttttgtatgttgtcacacgcgttccccccccttgttggtcttgtttgaatgagttgttgagatgtcatttttgacattttatctcaacgaggtatttagactgcattgtctaaatcctccttttgcagaaccgttgccgaatgtcccgtgaaactcgctaggtgtttagagtttaagcagatgcctatctgctgagccaagagctcagaaagattttttagtttttgaaaaccaatcctggttaggcaacgaggtgatgaggctgtgtctgccctgctatatggtatatattatatggtatatatagtatatatgtcacttgtgttactgcagtggatgtcagcgaggtccacacagggcacaagattatttctttcccaagacacagaaactcttgtcacctacagttctttgtagagtcaagaaacatttaagtctactcgactttaaagagtctggcgattgatggcacgctagcccactccctaacaatgatgttttgtttttgtttaatccccactagccattatttaaatatttttgtattgttgtcctgtcacacccaagaagtcaatgttggatttttgtagttatcgaaaactgaattggtaatccagtttcctctcttccgaggaggctattgtagcagatggatttctactacaatattttataaaaaatatccattaattttaatcctatcccaagaaaaatattaatttttctaatatattttgcgagtttatatatctttaaaatttcctaagccgctcctgttcgaaatatttcagaatattttcgcaacaaagtaaaatcataggaaagttcctatttatttgagtagcatttaccaactacgtagatagttattgtgaaatcattcattattcgagaatgaatcctctaaaaggtttggtgtttttcctttaagttttgagcgataaaaatcccatgttattattggtctgcattttgaaagatccttgagttgtagttgacgattggtcaatagttttggccgaacgatcgagaagaaatgcatcgtttggacgcgagagagacgtgacgatgtaaagttagttctaaaagtacatcagctctgtaagcatctttttgttagaactcaaaaagtcgcactttgccggccaaaatggttttcttcttatagtaaaagaactaatggatttctaacatgtcaaggaatataatgacaatagtttcacggcattttaatggatatattattgtgaaacagttctattgttatgcagtttgatttgccggtaaaagaagtgcgtggtttcctggttcctgtcctttatgtagctgttgctatttttatgatgttttgatttgttcatgttccagtaagaaatgcccagatgatattatttggtatcgattttatccagttttgtaatgatttgaatatcttcccctcccagccccgtctgaatggaaaattttgaagttccaagtgttgtgacatggatttttgttttaacaaggtatgataatgtttattttaaataattcacaagtggatattattggtaaaggttttacataattaaaaatgtttgttttcaacatggaaaatatattatgtaaagtaaatattagatggcagtgacatttgacagccatgtcaaatttttgttttggtacactgctaaaaataaggttaaaaattgtaaaatcatgtattttgttattattattcatttctggtttgagaatgtgtctattctcaataaaaataaaaaggtattaaggtttaaataaacattataaaatgtacacatctttatttctgtaacctctttatttaagaaaattattaacagatatctaatacaagtgaataagttttagaacagaagaaaatataatggcatagaagccaaatgatgataatttgtagcccactataaccccaatgaggaatctacgatgaatgtcccccagttgctttccagtaagtactcgatatgagaatttgaggatttttcaaacggcgtcccaatttgtttaaatagtaggaaagtcctcaagtctgtgtaagtatcctttgcttatttggttatgtagtttagtcttctttaaaccctcctacccctcccaacgaatctacgacctgccaccgcacaaaaaatgagctgccgttcgcatgaaggtttgcgtgtctgttccttctgctagccccatttcgactccccagtatctctatagatagtctttccttgatcccattagagcagacaggtaaaacgcttcaactggcacccaacgtgtgaggccgattcatttttctgcctccttcagtatccagttgttgtcttgtccagttgaacgcttcaactagcgccctgtacgtggggctcgatccatttttagcccccctgatcccattagcatgtgcccactaccatatccctttagcctcctttcggtctcatttgtactacaactgttaggcagtgcccgtccccttgggcagccgatctcagtttgtggtgcaggtgtttccgataacatggaagcttgacttttgtcatattttgtgtacgcccactgttacaagtctagcttgtagacatgttcaactagtagttagcctatctactagtccccaatgtctttagccaccccccacttagtgttacttgtaatacttgtaacgtacaccctgaagtttgacccgagtaaatatcgccccagtcttcccatgtagtttagcccagattcctcttgtcttgcccccagaaactgtttcatgtcttttagtgcccccgaaactgtttcagtctgttagtccccatgaaagagcccatttttgtagtttttgttgcagaatgttaataatttttccaaagaggtgtaagtatgtacacattttgttgtggtgttgatttggtcatgctgctgattgtataggcatgtaccatttcatacatcatagtgtatttacattgtaaccccatattatgtaaaccgtagtatactggtattgtattgtatgtatcgtacaagagaatagtatgtttaatattgtagcgtacttactatattgtattgatattgtacccatgatgaaagcattggttaaattttttggaaaatattgatgaattatatagacaaacagatgagtaaaaaataaagtataaaatttttttagaaaattttggtataagtaacgttaaaaattttttttaaaattttgctaaaagttacaattaaaatgtttagaatattgaatccacttatagagtataacaatatgttatatttttttgcatgtattcttgtagatcatcagttttttacagaataaacgttttttgtgattattgatttggtcgtttgagtagatgtgtgataatagttggtatggtccgtgtatgagctaattcggtatggtctgtgtgagtaagttccgtgattttccagcgaagcctatctatatttgggtatattattgccacaggttagttggagaagtcatccttgaagaagtaaccccatgaagaagtgaagagggaaactgaggcgaggcccctccacttattaatgaagaagtagacccc

SEQ ID NO: 783 - DNA, 4680 bp, Diabrotica virgifera
gactaatctatctttgtaggtgtcgaaaaggataccaatgattagttgaaaatggtttgagaagtgaagaaaaagtaaccccatgaaaaagtgaagagggaaaccgtggcgaggcccctccacttgttcataaaattgatgtatgttttcttgtatctggcatatcacaagtgtaatactcgtgatgaggaagtgttgttcagttgtctgggaatactcccattaatagtcggagcaagaacagttttatttgtgtaagctcatataagaaccaaatttcaatatttatttgtgtttgtaagcccatgtatatggagtatgactaagaaccaagtttcaatattttttgtgtttgtaagcccatgtatatggagtatgactaagaaccaagtttcgatattatttgtgtttgtaagcccatgtgtatggagaatgtataaatgccctatgagtcttttgttccctgtttgtttgtctatcccttttttgtctggaaattctagagtctgttatcccgtaatgtctgttagcccatgtccctgatggagtttgattttttttggcgaatagttcgttgacctctcttgtgtttgttcattgaaagtaggccaagagcagaagctgtgacaaggctggtgagcttaggatctggccgcgttgagtacaggtgaagcttgctttcggtggataaatggaagtggtcgttcgtcggaattgtcattctttccaatgtccctttggtctttcccttgtgtgtttgctttcatccctgttttgaaaaagtagtctaaccccagtttggaagagtgaagtctactcatgttttggaaaaataaagtctacccattgttttggaaaagtaagatctactcatgttttggaaaagtaagatcatatccccggttttgaaaaataaagaatatcccagtttgtgatttgaaaatgagaaagttgtcttgtgaactttcatgaaaggcttttatgtcctaggtaggactgttgattgaaaacgtaatgatgtagtatttcctatgtcatgtgttacgttcatttttttttggtcttgattaaatagtttgatatcccgtttgaatccagtatactagtttttttggtcttttgtatgttgtcacacgcgttccccccccttgttggtcttgtttgaatgagttgttgagatgtcatttttgacattttatctcaacgaggtatttagactgcattgtctaaatcctccttttgcagaaccgttgccgaatgtcccgtgaaactcgctaggtgtttagagtttaagcagatgcctatctgctgagccaagagctcagaaagattttttagtttttgaaaaccaatcctggttaggcaacgaggtgatgaggctgtgtctgccctgctatatggtatatattatatggtatatatagtatatatgtcacttgtgttactgcagtggatgtcagcgaggtccacacagggcacaagattatttctttcccaagacacagaaactcttgtcacctacagttctttgtagagtcaagaaacatttaagtctactcgactttaaagagtctggcgattgatggcacgctagcccactccctaacaatgatgttttgtttttgtttaatccccactagccattatttaaatatttttgtattgttgtcctgtcacacccaagaagtcaatgttggatttttgtagttatcgaaaactgaattggtaatccagtttcctctcttccgaggaggctattgtagcagatggatttctactacaatattttataaaaaatatccattaattttaatcctatcccaagaaaaatattaatttttctaatatattttgcgagtttatatatctttaaaatttcctaagccgctcctgttcgcattgtaaaggttaggaaatttcctatttatttgtgtagcaataaccaactacgtagattgttattgaaaacatccattattcgagaatgaatcctctaaaaggttcagtgtttttcctttaagttttgagcgctaaaaatcccatgttattattggtctgcattttgaaagatccttgagttgtagttgacgattggtcaatagttttggccgaacgatcgagaagaaatgcatcgtttggacgcgagagagacgtgacgatgtaaagttagttctaaaagtacatcagctctgtaagcatctttttgttagaactcaaaaagtcgcactttgccggccaaaatggttttcttcttatagtaaaagaactaatggatttctaacatgtcaaggaatataatgacaatagtttcacggcattttaatggatatattattgtgaaacagttctattgttatgcagtttgatttgccggtaaaagaagtgcgtggtttcctggttcctgtcctttatgtagctgttgctatttttatgatgttttgatttgttcatgttccagtaagaaatgcccagatgatattatttggtatcgattttatccagttttgtaatgatttgaatatcttcccctcccagccccgtctgaatggaaaattttgaagttccaagtgttgtgacatggatttttgttttaacaaggtatgataatgtttattttaaataattcacaagtggatattattggtaaaggttttacataattaaaaatgtttgttttcaacatggaaaatatattatgtaaagtaaatattagatggcagtgacatttgacagccatgtcaaatttttgttttggtacactgctaaaaataaggttaaaaattgtaaaatcatgtattttgttattattattcatttctggtttgagaatgtgtctattctcaataaaaataaaaaggtattaaggtttaaataaacattataaaatgtacacatctttatttctgtaacctctttatttaagaaaattattaacagatatctaatacaagtgaataagttttagaacagaagaaaatataatggcatagaagccaaatgatgataatttgtagcccactataaccccaatgaggaatctacgatgaatgtcccccagttgctttccagtaagtactcgatatgagaatttgaggatttttcaaacggcgtcccaatttgtttaaatagtaggaaagtcctcaagtctgtgtaagtatcctttgcttatttggttatgtagtttagtcttctttaaaccctcctacccctcccaacgaatctacgacctgccaccgcacaaaaaatgagctgccgttcgcatgaaggtttgcgtgtctgttccttctgctagccccatttcgactccccagtatctctatagatagtctttccttgatcccattagagcagacaggtaaaacgcttcaactggcacccaacgtgtgaggccgattcatttttctgcctccttcagtatccagttgttgtcttgtccagttgaacgcttcaactgtcgccctagaacgtggggcatgtcttttttgcctccctcagaccccatttgcatgttcccactaccatgtccttttagcctcctttcggtctcatttgtactacaactgttaggcagtgcccgtccccttgggcagccgatctcagtttgtggtgcaggtgtttccgataacatggaagcttgacttttgtcatattttgtgtacgcccactgttacaagtctagcttgtagacatgttcaactagtagttagcctatctactagtccccaatgtctttagccaccccccacttagtgttacttgtaatacttgtaacgtacaccctgaagtttgacccgagtaaatatcgccccagtcttcccatgtagtttagcccagattcctcttgtcttgcccccagaaactgtttcatgtcttttagtgcccccgaaactgtttcagtctgttagtccccatgaaagagcccatttttgtagtttttgttgcagaatgttaataatttttccaaagaggtgtaagtatgtacacattttgttgtggtgttgatttggtcatgctgctgattgtataggcatgtaccatttcatacatcatagtgtatttacattgtaaccccatattatgtaaaccgtagtatactggtattgtattgtatgtatcgtacaagagaatagtatgtttaatattgtagcgtacttactatattgtattgatattgtacccatgatgaaagcattggttaaattttttggaaaatattgatgaattatatagacaaacagatgagtaaaaaataaagtataaaatttttttagaaaattttggtataagtaacgttaaaaattttttttaaaattttgctaaaagttacaattaaaatgtttagaatattgaatccacttatagagtataacaatatgttatatttttttgcatgtattcttgtagatcatcagttttttacagaataaacgttttttgtgattattgatttggtcgtttgagtagatgtgtgataatagttggtatggtccgtgtatgagctaattcggtatggtctgtgtgagtaagttccgtgattttccagcgaagcctatctatatttgggtatattattgccacaggttagttggagaagtcatccttgaagaagtaaccccatgaagaagtgaagagggaaactgaggcgaggcccctccacttattaatgaagaagtagacccc

SEQ ID NO: 784 - DNA, 4675 bp, Diabrotica virgifera
gactaatctatctttgtaggtgtcgaaaaggataccaatgattagttgaaaatggtttgagaagtgaagaaaaagtaaccccatgaaaaagtgaagagggaaaccgtggcgaggcccctccacttgttcataaaattgatgtatgttttcttgtatctggcatatcacaagtgtaatactcgtgatgaggaagtgttgttcagttgtctgggaatactcccattaatagtcggagcaagaacagttttatttgtgtaagctcatataagaaccaaatttcaatatttatttgtgtttgtaagcccatgtatatggagtatgactaagaaccaagtttcaatattttttgtgtttgtaagcccatgtatatggagtatgactaagaaccaagtttcgatattatttgtgtttgtaagcccatgtgtatggagaatgtataaatgccctatgagtcttttgttccctgtttgtttgtctatcccttttttgtctggaaattctagagtctgttatcccgtaatgtctgttagcccatgtccctgatggagtttgattttttttggcgaatagttcgttgacctctcttgtgtttgttcattgaaagtaggccaagagcagaagctgtgacaaggctggtgagcttaggatctggccgcgttgagtacaggtgaagcttgctttcggtggataaatggaagtggtcgttcgtcggaattgtcattctttccaatgtccctttggtctttcccttgtgtgtttgctttcatccctgttttgaaaaagtagtctaaccccagtttggaagagtgaagtctactcatgttttggaaaaataaagtctacccattgttttggaaaagtaagatctactcatgttttggaaaagtaagatcatatccccggttttgaaaaataaagaatatcccagtttgtgatttgaaaatgagaaagttgtcttgtgaactttcatgaaaggcttttatgtcctaggtaggactgttgattgaaaacgtaatgatgtagtatttcctatgtcatgtgttacgttcatttttttttggtcttgattaaatagtttgatatcccgtttgaatccagtatactagtttttttggtcttttgtatgttgtcacacgcgttccccccccttgttggtcttgtttgaatgagttgttgagatgtcatttttgacattttatctcaacgaggtatttagactgcattgtctaaatcctccttttgcagaaccgttgccgaatgtcccgtgaaactcgctaggtgtttagagtttaagcagatgcctatctgctgagccaagagctcagaaagattttttagtttttgaaaaccaatcctggttaggcaacgaggtgatgaggctgtgtctgccctgctatatggtatatattatatggtatatatagtatatatgtcacttgtgttactgcagtggatgtcagcgaggtccacacagggcacaagattatttctttcccaagacacagaaactcttgtcacctacagttctttgtagagtcaagaaacatttaagtctactcgactttaaagagtctggcgattgatggcacgctagcccactccctaacaatgatgttttgtttttgtttaatccccactagccattatttaaatatttttgtattgttgtcctgtcacacccaagaagtcaatgttggatttttgtagttatcgaaaactgaattggtaatccagtttcctctcttccgaggaggctattgtagcagatggatttctactacaatattttataaaaaatatccattaattttaatcctatcccaagaaaaatattaatttttctaatatattttgcgagtttatatatctttaaaatttcctaagccgctcctgttcgcattgtaaaggttaggaaatttcctatttatttgtgtagcaataaccaactacgtagattgttattgaaaacatccattattcgagaatgaatcctctaaaaggttcagtgtttttcctttaagttttgagcgctaaaaatcccatgttattattggtctgcattttgaaagatccttgagttgtagttgacgattggtcaatagttttggccgaacgatcgagaagaaatgcatcgtttggacgcgagagagacgtgacgatgtaaagttagttctaaaagtacatcagctctgtaagcatctttttgttagaactcaaaaagtcgcactttgccggccaaaatggttttcttcttatagtaaaagaactaatggatttctaacatgtcaaggaatataatgacaatagtttcacggcattttaatggatatattattgtgaaacagttctattgttatgcagtttgatttgccggtaaaagaagtgcgtggtttcctggttcctgtcctttatgtagctgttgctatttttatgatgttttgatttgttcatgttccagtaagaaatgcccagatgatattatttggtatcgattttatccagttttgtaatgatttgaatatcttcccctcccagccccgtctgaatggaaaattttgaagttccaagtgttgtgacatggatttttgttttaacaaggtatgataatgtttattttaaataattcacaagtggatattattggtaaaggttttacataattaaaaatgtttgttttcaacatggaaaatatattatgtaaagtaaatattagatggcagtgacatttgacagccatgtcaaatttttgttttggtacactgctaaaaataaggttaaaaattgtaaaatcatgtattttgttattattattcatttctggtttgagaatgtgtctattctcaataaaaataaaaaggtattaaggtttaaataaacattataaaatgtacacatctttatttctgtaacctctttatttaagaaaattattaacagatatctaatacaagtgaataagttttagaacagaagaaaatataatggcatagaagccaaatgatgataatttgtagcccactataaccccaatgaggaatctacgatgaatgtcccccagttgctttccagtaagtactcgatatgagaatttgaggatttttcaaacggcgtcccaatttgtttaaatagtaggaaagtcctcaagtctgtgtaagtatcctttgcttatttggttatgtagtttagtcttctttaaaccctcctacccctcccaacgaatctacgacctgccaccgcacaaaaaatgagctgccgttcgcatgaaggtttgcgtgtctgttccttctgctagccccatttcgactccccagtatctctatagatagtctttccttgatcccattagagcagacaggtaaaacgcttcaactggcacccaacgtgtgaggccgattcatttttctgcctccttcagtatccagttgttgtcttgtccagttgaacgcttcaactagcgccctgtacgtggggctcgatccatttttagcccccctgatcccattagcatgtgcccactaccatatccctttagcctcctttcggtctcatttgtactacaactgttaggcagtgcccgtcttgggtagccgatctcagtttgtggtgcaagtgtttccgataacatggaagctcgactcgtgtcatgttttgtatgcccattgttacaagtctagcttgtagacatgttcaactagtagttagcctatctactagtccccaatgtctttagccaccccccacttagtgttacttgtaatacttgtaacgtacaccctgaagtttgacccgagtaaatatcgccccagtcttcccatgtagtttagcccagattcctcttgtcttgcccccagaaactgtttcatgtcttttagtgcccccgaaactgtttcagtctgttagtccccatgaaagagcccatttttgtagtttttgttgcagaatgttaataatttttccaaagaggtgtaagtatgtacacattttgttgtggtgttgatttggtcatgctgctgattgtataggcatgtaccatttcatacatcatagtgtatttacattgtaaccccatattatgtaaaccgtagtatactggtattgtattgtatgtatcgtacaagagaatagtatgtttaatattgtagcgtacttactatattgtattgatattgtacccatgatgaaagcattggttaaattttttggaaaatattgatgaattatatagacaaacagatgagtaaaaaataaagtataaaatttttttagaaaattttggtataagtaacgttaaaaattttttttaaaattttgctaaaagttacaattaaaatgtttagaatattgaatccacttatagagtataacaatatgttatatttttttgcatgtattcttgtagatcatcagttttttacagaataaacgttttttgtgattattgatttggtcgtttgagtagatgtgtgataatagttggtatggtccgtgtatgagctaattcggtatggtctgtgtgagtaagttccgtgattttccagcgaagcctatctatatttgggtatattattgccacaggttagttggagaagtcatccttgaagaagtaaccccatgaagaagtgaagagggaaactgaggcgaggcccctccacttattaatgaagaagtagacccc

SEQ ID NO: 785 - DNA, 4722 bp, Diabrotica virgifera
gactaatctatctttgtaggtgtcgaaaaggataccaatgattagttgaaaatggtttgagaagtgaagaaaaagtaaccccatgaaaaagtgaagagggaaaccgtggcgaggcccctccacttgttcataaaattgatgtatgttttcttgtatctggcatatcacaagtgtaatactcgtgatgaggaagtgttgttcagttgtctgggaatactcccattaatagtcggagcaagaacagttttatttgtgtaagctcatataagaaccaaatttcaatatttatttgtgtttgtaagcccatgtatatggagtatgactaagaaccaagtttcaatattttttgtgtttgtaagcccatgtatatggagtatgactaagaaccaagtttcgatattatttgtgtttgtaagcccatgtgtatggagaatgtataaatgccctatgagtcttttgttccctgtttgtttgtctatcccttttttgtctggaaattctagagtctgttatcccgtaatgtctgttagcccatgtccctgatggagtttgattttttttggcgaatagttcgttgacctctcttgtgtttgttcattgaaagtaggccaagagcagaagctgtgacaaggctggtgagcttaggatctggccgcgttgagtacaggtgaagcttgctttcggtggataaatggaagtggtcgttcgtcggaattgtcattctttccaatgtccctttggtctttcccttgtgtgtttgctttcatccctgttttgaaaaagtagtctaaccccagtttggaagagtgaagtctactcatgttttggaaaaataaagtctacccattgttttggaaaagtaagatctactcatgttttggaaaagtaagatcatatccccggttttgaaaaataaagaatatcccagtttgtgatttgaaaatgagaaagttgtcttgtgaactttcatgaaaggcttttatgtcctaggtaggactgttgattgaaaacgtaatgatgtagtatttcctatgtcatgtgttacgttcatttttttttggtcttgattaaatagtttgatatcccgtttgaatccagtatactagtttttttggtcttttgtatgttgtcacacgcgttccccccccttgttggtcttgtttgaatgagttgttgagatgtcatttttgacattttatctcaacgaggtatttagactgcattgtctaaatcctccttttgcagaaccgttgccgaatgtcccgtgaaactcgctaggtgtttagagtttaagcagatgcctatctgctgagccaagagctcagaaagattttttagtttttgaaaaccaatcctggttaggcaacgaggtgatgaggctgtgtctgccctgctatatggtatatattatatggtatatatagtatatatgtcacttgtgttactgcagtggatgtcagcgaggtccacacagggcacaagattatttctttcccaagacacagaaactcttgtcacctacagttctttgtagagtcaagaaacatttaagtctactcgactttaaagagtctggcgattgatggcacgctagcccactccctaacaatgatgttttgtttttgtttaatccccactagccattatttaaatatttttgtattgttgtcctgtcacacccaagaagtcaatgttggatttttgtagttatcgaaaactgaattggtaatccagtttcctctcttccgaggaggctattgtagcagatggatttctactacaatattttataaaaaatatccattaattttaatcctatcccaagaaaaatattaatttttctaatatattttgcgagtttatatatctttaaaatttcctaagccgctcctgttcgaaatatttcagaatattttcgcaacaaagtaaaatcataggaaagttcctatttatttgagtagcatttaccaactacgtagatagttattgtgaaatcattcattattcgagaatgaatcctctaaaaggtttggtgtttttcctttaagttttgagcgataaaaatcccatgttattattggtctgcattttgaaagatccttgagttgtagttgacgattggtcaatagttttggccgaacgatcgagaagaaatgcatcgtttggacgcgagagagacgtgacgatgtaaagttagttctaaaagtacatcacttcagtaaacatctttttgttagaactcaaccaacagactcgtagaaagtcgcactttgccggcaaaatggttttatttttatggtaaaagaagtgaaagactggcagtttgcccagtaaatgtcaacgaatataatgacaatagtttcacggcattttaatggatatattattgtgaaacagttctattgttatgcagttagatttgccggtggtataaaaaagaagtgcgtggtttcctggttcctgtcctttatgtagctgttgctatttttatgatgttttgatttgttcatgttccagtaagaaatgcccagatgatattatttggtatcgattttatccagttttgtaatgatttgaatatcttccctccctccaatctcgaatggaaagttttgaagttccaagtgttgtgacatggatttttgttttaaggtatgataatgtttattttaaataaattcacaagtggatattaatggtaaaggttttacataattaaatgtttgttttcaacatggaaaatattttattgtaaagtaaatgtaaaatggcagtgacttttgacagccatgtcaaattttagttttggtacactgctaaaaataaataaggttaaaaattgtaaaaccatatatttgtttttattattcatttcttttttgagaatatgtttattctcggagtaagttttaaataaacattataaaatgtacacatctttatttctgtaacctctttatttaagaaaattattaacagatatctaatacaagtgaataagttttagaacagaagaaaatataatggcatagaagccaaatgatgataatttgtagcccactataaccccaatgaggaatctacgatgaatgtcccccagttgctttccagtaagtactcgatatgagaatttgaggatttttcaaacggcgtcccaatttgtttaaatagtaggaaagtcctcaagtctgtgtaagtatcctttgcttatttggttatgtagtttagtcttctttaaaccctcctacccctcccaacgaatctacgacctgccaccgcacaaaaaatgagctgccgttcgcatgaaggtttgcgtgtctgttccttctgctagccccatttcgactccccagtatctctatagatagtctttccttgatcccattagagcagacaggtaaaacgcttcaactggcacccaacgtgtgaggccgattcatttttctgcctccttcagtatccagttgttgtcttgtccagttgaacgcttcaactgtcgccctagaacgtggggcatgtcttttttgcctccctcagaccccatttgcatgttcccactaccatgtccttttagcctcctttcggtctcatttgtactacaactgttaggcagtgcccgtccccttgggcagccgatctcagtttgtggtgcaggtgtttccgataacatggaagcttgacttttgtcatattttgtgtacgcccactgttacaagtctagcttgtagacatgttcaactagtagttagcctatctactagtccccaatgtctttagccaccccccacttagtgttacttgtaatacttgtaacgtacaccctgaagtttgacccgagtaaatatcgccccagtcttcccatgtagtttagcccagattcctcttgtcttgcccccagaaactgtttcatgtcttttagtgcccccgaaactgtttcagtctgttagtccccatgaaagagcccatttttgtagtttttgttgcagaatgttaataatttttccaaagaggtgtaagtatgtacacattttgttgtggtgttgatttggtcatgctgctgattgtataggcatgtaccatttcatacatcatagtgtatttacattgtaaccccatattatgtaaaccgtagtatactggtattgtattgtatgtatcgtacaagagaatagtatgtttaatattgtagcgtacttactatattgtattgatattgtacccatgatgaaagcattggttaaattttttggaaaatattgatgaattatatagacaaacagatgagtaaaaaataaagtataaaatttttttagaaaattttggtataagtaacgttaaaaattttttttaaaattttgctaaaagttacaattaaaatgtttagaatattgaatccacttatagagtataacaatatgttatatttttttgcatgtattcttgtagatcatcagttttttacagaataaacgttttttgtgattattgatttggtcgtttgagtagatgtgtgataatagttggtatggtccgtgtatgagctaattcggtatggtctgtgtgagtaagttccgtgattttccagcgaagcctatctatatttgggtatattattgccacaggttagttggagaagtcatccttgaagaagtaaccccatgaagaagtgaagagggaaactgaggcgaggcccctccacttattaatgaagaagtagacccc

SEQ ID NO: 786 - DNA, 4717 bp, Diabrotica virgifera
gactaatctatctttgtaggtgtcgaaaaggataccaatgattagttgaaaatggtttgagaagtgaagaaaaagtaaccccatgaaaaagtgaagagggaaaccgtggcgaggcccctccacttgttcataaaattgatgtatgttttcttgtatctggcatatcacaagtgtaatactcgtgatgaggaagtgttgttcagttgtctgggaatactcccattaatagtcggagcaagaacagttttatttgtgtaagctcatataagaaccaaatttcaatatttatttgtgtttgtaagcccatgtatatggagtatgactaagaaccaagtttcaatattttttgtgtttgtaagcccatgtatatggagtatgactaagaaccaagtttcgatattatttgtgtttgtaagcccatgtgtatggagaatgtataaatgccctatgagtcttttgttccctgtttgtttgtctatcccttttttgtctggaaattctagagtctgttatcccgtaatgtctgttagcccatgtccctgatggagtttgattttttttggcgaatagttcgttgacctctcttgtgtttgttcattgaaagtaggccaagagcagaagctgtgacaaggctggtgagcttaggatctggccgcgttgagtacaggtgaagcttgctttcggtggataaatggaagtggtcgttcgtcggaattgtcattctttccaatgtccctttggtctttcccttgtgtgtttgctttcatccctgttttgaaaaagtagtctaaccccagtttggaagagtgaagtctactcatgttttggaaaaataaagtctacccattgttttggaaaagtaagatctactcatgttttggaaaagtaagatcatatccccggttttgaaaaataaagaatatcccagtttgtgatttgaaaatgagaaagttgtcttgtgaactttcatgaaaggcttttatgtcctaggtaggactgttgattgaaaacgtaatgatgtagtatttcctatgtcatgtgttacgttcatttttttttggtcttgattaaatagtttgatatcccgtttgaatccagtatactagtttttttggtcttttgtatgttgtcacacgcgttccccccccttgttggtcttgtttgaatgagttgttgagatgtcatttttgacattttatctcaacgaggtatttagactgcattgtctaaatcctccttttgcagaaccgttgccgaatgtcccgtgaaactcgctaggtgtttagagtttaagcagatgcctatctgctgagccaagagctcagaaagattttttagtttttgaaaaccaatcctggttaggcaacgaggtgatgaggctgtgtctgccctgctatatggtatatattatatggtatatatagtatatatgtcacttgtgttactgcagtggatgtcagcgaggtccacacagggcacaagattatttctttcccaagacacagaaactcttgtcacctacagttctttgtagagtcaagaaacatttaagtctactcgactttaaagagtctggcgattgatggcacgctagcccactccctaacaatgatgttttgtttttgtttaatccccactagccattatttaaatatttttgtattgttgtcctgtcacacccaagaagtcaatgttggatttttgtagttatcgaaaactgaattggtaatccagtttcctctcttccgaggaggctattgtagcagatggatttctactacaatattttataaaaaatatccattaattttaatcctatcccaagaaaaatattaatttttctaatatattttgcgagtttatatatctttaaaatttcctaagccgctcctgttcgaaatatttcagaatattttcgcaacaaagtaaaatcataggaaagttcctatttatttgagtagcatttaccaactacgtagatagttattgtgaaatcattcattattcgagaatgaatcctctaaaaggtttggtgtttttcctttaagttttgagcgataaaaatcccatgttattattggtctgcattttgaaagatccttgagttgtagttgacgattggtcaatagttttggccgaacgatcgagaagaaatgcatcgtttggacgcgagagagacgtgacgatgtaaagttagttctaaaagtacatcacttcagtaaacatctttttgttagaactcaaccaacagactcgtagaaagtcgcactttgccggcaaaatggttttatttttatggtaaaagaagtgaaagactggcagtttgcccagtaaatgtcaacgaatataatgacaatagtttcacggcattttaatggatatattattgtgaaacagttctattgttatgcagttagatttgccggtggtataaaaaagaagtgcgtggtttcctggttcctgtcctttatgtagctgttgctatttttatgatgttttgatttgttcatgttccagtaagaaatgcccagatgatattatttggtatcgattttatccagttttgtaatgatttgaatatcttccctccctccaatctcgaatggaaagttttgaagttccaagtgttgtgacatggatttttgttttaaggtatgataatgtttattttaaataaattcacaagtggatattaatggtaaaggttttacataattaaatgtttgttttcaacatggaaaatattttattgtaaagtaaatgtaaaatggcagtgacttttgacagccatgtcaaattttagttttggtacactgctaaaaataaataaggttaaaaattgtaaaaccatatatttgtttttattattcatttcttttttgagaatatgtttattctcggagtaagttttaaataaacattataaaatgtacacatctttatttctgtaacctctttatttaagaaaattattaacagatatctaatacaagtgaataagttttagaacagaagaaaatataatggcatagaagccaaatgatgataatttgtagcccactataaccccaatgaggaatctacgatgaatgtcccccagttgctttccagtaagtactcgatatgagaatttgaggatttttcaaacggcgtcccaatttgtttaaatagtaggaaagtcctcaagtctgtgtaagtatcctttgcttatttggttatgtagtttagtcttctttaaaccctcctacccctcccaacgaatctacgacctgccaccgcacaaaaaatgagctgccgttcgcatgaaggtttgcgtgtctgttccttctgctagccccatttcgactccccagtatctctatagatagtctttccttgatcccattagagcagacaggtaaaacgcttcaactggcacccaacgtgtgaggccgattcatttttctgcctccttcagtatccagttgttgtcttgtccagttgaacgcttcaactagcgccctgtacgtggggctcgatccatttttagcccccctgatcccattagcatgtgcccactaccatatccctttagcctcctttcggtctcatttgtactacaactgttaggcagtgcccgtcttgggtagccgatctcagtttgtggtgcaagtgtttccgataacatggaagctcgactcgtgtcatgttttgtatgcccattgttacaagtctagcttgtagacatgttcaactagtagttagcctatctactagtccccaatgtctttagccaccccccacttagtgttacttgtaatacttgtaacgtacaccctgaagtttgacccgagtaaatatcgccccagtcttcccatgtagtttagcccagattcctcttgtcttgcccccagaaactgtttcatgtcttttagtgcccccgaaactgtttcagtctgttagtccccatgaaagagcccatttttgtagtttttgttgcagaatgttaataatttttccaaagaggtgtaagtatgtacacattttgttgtggtgttgatttggtcatgctgctgattgtataggcatgtaccatttcatacatcatagtgtatttacattgtaaccccatattatgtaaaccgtagtatactggtattgtattgtatgtatcgtacaagagaatagtatgtttaatattgtagcgtacttactatattgtattgatattgtacccatgatgaaagcattggttaaattttttggaaaatattgatgaattatatagacaaacagatgagtaaaaaataaagtataaaatttttttagaaaattttggtataagtaacgttaaaaattttttttaaaattttgctaaaagttacaattaaaatgtttagaatattgaatccacttatagagtataacaatatgttatatttttttgcatgtattcttgtagatcatcagttttttacagaataaacgttttttgtgattattgatttggtcgtttgagtagatgtgtgataatagttggtatggtccgtgtatgagctaattcggtatggtctgtgtgagtaagttccgtgattttccagcgaagcctatctatatttgggtatattattgccacaggttagttggagaagtcatccttgaagaagtaaccccatgaagaagtgaagagggaaactgaggcgaggcccctccacttattaatgaagaagtagacccc

SEQ ID NO: 787 - DNA, 4690 bp, Diabrotica virgifera
gactaatctatctttgtaggtgtcgaaaaggataccaatgattagttgaaaatggtttgagaagtgaagaaaaagtaaccccatgaaaaagtgaagagggaaaccgtggcgaggcccctccacttgttcataaaattgatgtatgttttcttgtatctggcatatcacaagtgtaatactcgtgatgaggaagtgttgttcagttgtctgggaatactcccattaatagtcggagcaagaacagttttatttgtgtaagctcatataagaaccaaatttcaatatttatttgtgtttgtaagcccatgtatatggagtatgactaagaaccaagtttcaatattttttgtgtttgtaagcccatgtatatggagtatgactaagaaccaagtttcgatattatttgtgtttgtaagcccatgtgtatggagaatgtataaatgccctatgagtcttttgttccctgtttgtttgtctatcccttttttgtctggaaattctagagtctgttatcccgtaatgtctgttagcccatgtccctgatggagtttgattttttttggcgaatagttcgttgacctctcttgtgtttgttcattgaaagtaggccaagagcagaagctgtgacaaggctggtgagcttaggatctggccgcgttgagtacaggtgaagcttgctttcggtggataaatggaagtggtcgttcgtcggaattgtcattctttccaatgtccctttggtctttcccttgtgtgtttgctttcatccctgttttgaaaaagtagtctaaccccagtttggaagagtgaagtctactcatgttttggaaaaataaagtctacccattgttttggaaaagtaagatctactcatgttttggaaaagtaagatcatatccccggttttgaaaaataaagaatatcccagtttgtgatttgaaaatgagaaagttgtcttgtgaactttcatgaaaggcttttatgtcctaggtaggactgttgattgaaaacgtaatgatgtagtatttcctatgtcatgtgttacgttcatttttttttggtcttgattaaatagtttgatatcccgtttgaatccagtatactagtttttttggtcttttgtatgttgtcacacgcgttccccccccttgttggtcttgtttgaatgagttgttgagatgtcatttttgacattttatctcaacgaggtatttagactgcattgtctaaatcctccttttgcagaaccgttgccgaatgtcccgtgaaactcgctaggtgtttagagtttaagcagatgcctatctgctgagccaagagctcagaaagattttttagtttttgaaaaccaatcctggttaggcaacgaggtgatgaggctgtgtctgccctgctatatggtatatattatatggtatatatagtatatatgtcacttgtgttactgcagtggatgtcagcgaggtccacacagggcacaagattatttctttcccaagacacagaaactcttgtcacctacagttctttgtagagtcaagaaacatttaagtctactcgactttaaagagtctggcgattgatggcacgctagcccactccctaacaatgatgttttgtttttgtttaatccccactagccattatttaaatatttttgtattgttgtcctgtcacacccaagaagtcaatgttggatttttgtagttatcgaaaactgaattggtaatccagtttcctctcttccgaggaggctattgtagcagatggatttctactacaatattttataaaaaatatccattaattttaatcctatcccaagaaaaatattaatttttctaatatattttgcgagtttatatatctttaaaatttcctaagccgctcctgttcgcattgtaaaggttaggaaatttcctatttatttgtgtagcaataaccaactacgtagattgttattgaaaacatccattattcgagaatgaatcctctaaaaggttcagtgtttttcctttaagttttgagcgctaaaaatcccatgttattattggtctgcattttgaaagatccttgagttgtagttgacgattggtcaatagttttggccgaacgatcgagaagaaatgcatcgtttggacgcgagagagacgtgacgatgtaaagttagttctaaaagtacatcacttcagtaaacatctttttgttagaactcaaccaacagactcgtagaaagtcgcactttgccggcaaaatggttttatttttatggtaaaagaagtgaaagactggcagtttgcccagtaaatgtcaacgaatataatgacaatagtttcacggcattttaatggatatattattgtgaaacagttctattgttatgcagttagatttgccggtggtataaaaaagaagtgcgtggtttcctggttcctgtcctttatgtagctgttgctatttttatgatgttttgatttgttcatgttccagtaagaaatgcccagatgatattatttggtatcgattttatccagttttgtaatgatttgaatatcttccctccctccaatctcgaatggaaagttttgaagttccaagtgttgtgacatggatttttgttttaaggtatgataatgtttattttaaataaattcacaagtggatattaatggtaaaggttttacataattaaatgtttgttttcaacatggaaaatattttattgtaaagtaaatgtaaaatggcagtgacttttgacagccatgtcaaattttagttttggtacactgctaaaaataaataaggttaaaaattgtaaaaccatatatttgtttttattattcatttcttttttgagaatatgtttattctcggagtaagttttaaataaacattataaaatgtacacatctttatttctgtaacctctttatttaagaaaattattaacagatatctaatacaagtgaataagttttagaacagaagaaaatataatggcatagaagccaaatgatgataatttgtagcccactataaccccaatgaggaatctacgatgaatgtcccccagttgctttccagtaagtactcgatatgagaatttgaggatttttcaaacggcgtcccaatttgtttaaatagtaggaaagtcctcaagtctgtgtaagtatcctttgcttatttggttatgtagtttagtcttctttaaaccctcctacccctcccaacgaatctacgacctgccaccgcacaaaaaatgagctgccgttcgcatgaaggtttgcgtgtctgttccttctgctagccccatttcgactccccagtatctctatagatagtctttccttgatcccattagagcagacaggtaaaacgcttcaactggcacccaacgtgtgaggccgattcatttttctgcctccttcagtatccagttgttgtcttgtccagttgaacgcttcaactgtcgccctagaacgtggggcatgtcttttttgcctccctcagaccccatttgcatgttcccactaccatgtccttttagcctcctttcggtctcatttgtactacaactgttaggcagtgcccgtcttgggtagccgatctcagtttgtggtgcaagtgtttccgataacatggaagctcgactcgtgtcatgttttgtatgcccattgttacaagtctagcttgtagacatgttcaactagtagttagcctatctactagtccccaatgtctttagccaccccccacttagtgttacttgtaatacttgtaacgtacaccctgaagtttgacccgagtaaatatcgccccagtcttcccatgtagtttagcccagattcctcttgtcttgcccccagaaactgtttcatgtcttttagtgcccccgaaactgtttcagtctgttagtccccatgaaagagcccatttttgtagtttttgttgcagaatgttaataatttttccaaagaggtgtaagtatgtacacattttgttgtggtgttgatttggtcatgctgctgattgtataggcatgtaccatttcatacatcatagtgtatttacattgtaaccccatattatgtaaaccgtagtatactggtattgtattgtatgtatcgtacaagagaatagtatgtttaatattgtagcgtacttactatattgtattgatattgtacccatgatgaaagcattggttaaattttttggaaaatattgatgaattatatagacaaacagatgagtaaaaaataaagtataaaatttttttagaaaattttggtataagtaacgttaaaaattttttttaaaattttgctaaaagttacaattaaaatgtttagaatattgaatccacttatagagtataacaatatgttatatttttttgcatgtattcttgtagatcatcagttttttacagaataaacgttttttgtgattattgatttggtcgtttgagtagatgtgtgataatagttggtatggtccgtgtatgagctaattcggtatggtctgtgtgagtaagttccgtgattttccagcgaagcctatctatatttgggtatattattgccacaggttagttggagaagtcatccttgaagaagtaaccccatgaagaagtgaagagggaaactgaggcgaggcccctccacttattaatgaagaagtagacccc

SEQ ID NO: 788 - DNA, 4734 bp, Diabrotica virgifera
gactaatctatctttgtaggtgtcgaaaaggataccaatgattagttgaaaatggtttgagaagtgaagaaaaagtaaccccatgaaaaagtgaagagggaaaccgtggcgaggcccctccacttgttcataaaattgatgtatgttttcttgtatctggcatatcacaagtgtaatactcgtgatgaggaagtgttgttcagttgtctgggaatactcccattaatagtcggagcaagaacagttttatttgtgtaagctcatataagaaccaaatttcaatatttatttgtgtttgtaagcccatgtatatggagtatgactaagaaccaagtttcaatattttttgtgtttgtaagcccatgtatatggagtatgactaagaaccaagtttcgatattatttgtgtttgtaagcccatgtgtatggagaatgtataaatgccctatgagtcttttgttccctgtttgtttgtctatcccttttttgtctggaaattctagagtctgttatcccgtaatgtctgttagcccatgtccctgatggagtttgattttttttggcgaatagttcgttgacctctcttgtgtttgttcattgaaagtaggccaagagcagaagctgtgacaaggctggtgagcttaggatctggccgcgttgagtacaggtgaagcttgctttcggtggataaatggaagtggtcgttcgtcggaattgtcattctttccaatgtccctttggtctttcccttgtgtgtttgctttcatccctgttttgaaaaagtagtctaaccccagtttggaagagtgaagtctactcatgttttggaaaaataaagtctacccattgttttggaaaagtaagatctactcatgttttggaaaagtaagatcatatccccggttttgaaaaataaagaatatcccagtttgtgatttgaaaatgagaaagttgtcttgtgaactttcatgaaaggcttttatgtcctaggtaggactgttgattgaaaacgtaatgatgtagtatttcctatgtcatgtgttacgttcatttttttttggtcttgattaaatagtttgatatcccgtttgaatccagtatactagtttttttggtcttttgtatgttgtcacacgcgttccccccccttgttggtcttgtttgaatgagttgttgagatgtcatttttgacattttatctcaacgaggtatttagactgcattgtctaaatcctccttttgcagaaccgttgccgaatgtcccgtgaaactcgctaggtgtttagagtttaagcagatgcctatctgctgagccaagagctcagaaagattttttagtttttgaaaaccaatcctggttaggcaacgaggtgatgaggctgtgtctgccctgctatatggtatatattatatggtatatatagtatatatgtcacttgtgttactgcagtggatgtcagcgaggtccacacagggcacaagattatttctttcccaagacacagaaactcttgtcacctacagttctttgtagagtcaagaaacatttaagtctactcgactttaaagagtctggcgattgatggcacgctagcccactccctaacaatgatgttttgtttttgtttaatccccactagccattatttaaatatttttgtattgttgtcctgtcacacccaagaagtcaatgttggatttttgtagttatcgaaaactgaattggtaatccagtttcctctcttccgaggaggctattgtagcagatggatttctactacaatattttataaaaaatatccattaattttaatcctatcccaagaaaaatattaatttttctaatatattttgcgagtttatatatctttaaaatttcctaagccgctcctgttcgaaatatttcagaatattttcgcaacaaagtaaaatcataggaaagttcctatttatttgagtagcatttaccaactacgtagatagttattgtgaaatcattcattattcgagaatgaatcctctaaaaggtttggtgtttttcctttaagttttgagcgataaaaatcccatgttattattggtctgcattttgaaagatccttgagttgtagttgacgattggtcaatagttttggccgaacgatcgagaagaaatgcatcgtttggacgcgagagagacgtgacgatgtaaagttagttctaaaagtacatcacttcagtaaacatctttttgttagaactcaaccaacagactcgtagaaagtcgcactttgccggcaaaatggttttatttttatggtaaaagaagtgaaagactggcagtttgcccagtaaatgtcaacgaatataatgacaatagtttcacggcattttaatggatatattattgtgaaacagttctattgttatgcagttagatttgccggtggtataaaaaagaagtgcgtggtttcctggttcctgtcctttatgtagctgttgctatttttatgatgttttgatttgttcatgttccagtaagaaatgcccagatgatattatttggtatcgattttatccagttttgtaatgatttgaatatcttcccctcccagccccgtctgaatggaaaattttgaagttccaagtgttgtgacatggatttttgttttaacaaggtatgataatgtttattttaaataattcacaagtggatattattggtaaaggttttacataattaaaaatgtttgttttcaacatggaaaatatattatgtaaagtaaatattagatggcagtgacatttgacagccatgtcaaatttttgttttggtacactgctaaaaataaggttaaaaattgtaaaatcatgtattttgttattattattcatttctggtttgagaatgtgtctattctcaataaaaataaaaaggtattaaggtttaaataaacattataaaatgtacacatctttatttctgtaacctctttatttaagaaaattattaacagatatctaatacaagtgaataagttttagaacagaagaaaatataatggcatagaagccaaatgatgataatttgtagcccactataaccccaatgaggaatctacgatgaatgtcccccagttgctttccagtaagtactcgatatgagaatttgaggatttttcaaacggcgtcccaatttgtttaaatagtaggaaagtcctcaagtctgtgtaagtatcctttgcttatttggttatgtagtttagtcttctttaaaccctcctacccctcccaacgaatctacgacctgccaccgcacaaaaaatgagctgccgttcgcatgaaggtttgcgtgtctgttccttctgctagccccatttcgactccccagtatctctatagatagtctttccttgatcccattagagcagacaggtaaaacgcttcaactggcacccaacgtgtgaggccgattcatttttctgcctccttcagtatccagttgttgtcttgtccagttgaacgcttcaactgtcgccctagaacgtggggcatgtcttttttgcctccctcagaccccatttgcatgttcccactaccatgtccttttagcctcctttcggtctcatttgtactacaactgttaggcagtgcccgtcttgggtagccgatctcagtttgtggtgcaagtgtttccgataacatggaagctcgactcgtgtcatgttttgtatgcccattgttacaagtctagcttgtagacatgttcaactagtagttagcctatctactagtccccaatgtctttagccaccccccacttagtgttacttgtaatacttgtaacgtacaccctgaagtttgacccgagtaaatatcgccccagtcttcccatgtagtttagcccagattcctcttgtcttgcccccagaaactgtttcatgtcttttagtgcccccgaaactgtttcagtctgttagtccccatgaaagagcccatttttgtagtttttgttgcagaatgttaataatttttccaaagaggtgtaagtatgtacacattttgttgtggtgttgatttggtcatgctgctgattgtataggcatgtaccatttcatacatcatagtgtatttacattgtaaccccatattatgtaaaccgtagtatactggtattgtattgtatgtatcgtacaagagaatagtatgtttaatattgtagcgtacttactatattgtattgatattgtacccatgatgaaagcattggttaaattttttggaaaatattgatgaattatatagacaaacagatgagtaaaaaataaagtataaaatttttttagaaaattttggtataagtaacgttaaaaattttttttaaaattttgctaaaagttacaattaaaatgtttagaatattgaatccacttatagagtataacaatatgttatatttttttgcatgtattcttgtagatcatcagttttttacagaataaacgttttttgtgattattgatttggtcgtttgagtagatgtgtgataatagttggtatggtccgtgtatgagctaattcggtatggtctgtgtgagtaagttccgtgattttccagcgaagcctatctatatttgggtatattattgccacaggttagttggagaagtcatccttgaagaagtaaccccatgaagaagtgaagagggaaactgaggcgaggcccctccacttattaatgaagaagtagacccc

SEQ ID NO: 789 - DNA, 4680 bp, Diabrotica virgifera
gactaatctatctttgtaggtgtcgaaaaggataccaatgattagttgaaaatggtttgagaagtgaagaaaaagtaaccccatgaaaaagtgaagagggaaaccgtggcgaggcccctccacttgttcataaaattgatgtatgttttcttgtatctggcatatcacaagtgtaatactcgtgatgaggaagtgttgttcagttgtctgggaatactcccattaatagtcggagcaagaacagttttatttgtgtaagctcatataagaaccaaatttcaatatttatttgtgtttgtaagcccatgtatatggagtatgactaagaaccaagtttcaatattttttgtgtttgtaagcccatgtatatggagtatgactaagaaccaagtttcgatattatttgtgtttgtaagcccatgtgtatggagaatgtataaatgccctatgagtcttttgttccctgtttgtttgtctatcccttttttgtctggaaattctagagtctgttatcccgtaatgtctgttagcccatgtccctgatggagtttgattttttttggcgaatagttcgttgacctctcttgtgtttgttcattgaaagtaggccaagagcagaagctgtgacaaggctggtgagcttaggatctggccgcgttgagtacaggtgaagcttgctttcggtggataaatggaagtggtcgttcgtcggaattgtcattctttccaatgtccctttggtctttcccttgtgtgtttgctttcatccctgttttgaaaaagtagtctaaccccagtttggaagagtgaagtctactcatgttttggaaaaataaagtctacccattgttttggaaaagtaagatctactcatgttttggaaaagtaagatcatatccccggttttgaaaaataaagaatatcccagtttgtgatttgaaaatgagaaagttgtcttgtgaactttcatgaaaggcttttatgtcctaggtaggactgttgattgaaaacgtaatgatgtagtatttcctatgtcatgtgttacgttcatttttttttggtcttgattaaatagtttgatatcccgtttgaatccagtatactagtttttttggtcttttgtatgttgtcacacgcgttccccccccttgttggtcttgtttgaatgagttgttgagatgtcatttttgacattttatctcaacgaggtatttagactgcattgtctaaatcctccttttgcagaaccgttgccgaatgtcccgtgaaactcgctaggtgtttagagtttaagcagatgcctatctgctgagccaagagctcagaaagattttttagtttttgaaaaccaatcctggttaggcaacgaggtgatgaggctgtgtctgccctgctatatggtatatattatatggtatatatagtatatatgtcacttgtgttactgcagtggatgtcagcgaggtccacacagggcacaagattatttctttcccaagacacagaaactcttgtcacctacagttctttgtagagtcaagaaacatttaagtctactcgactttaaagagtctggcgattgatggcacgctagcccactccctaacaatgatgttttgtttttgtttaatccccactagccattatttaaatatttttgtattgttgtcctgtcacacccaagaagtcaatgttggatttttgtagttatcgaaaactgaattggtaatccagtttcctctcttccgaggaggctattgtagcagatggatttctactacaatattttataaaaaatatccattaattttaatcctatcccaagaaaaatattaatttttctaatatattttgcgagtttatatatctttaaaatttcctaagccgctcctgttcgcattgtaaaggttaggaaatttcctatttatttgtgtagcaataaccaactacgtagattgttattgaaaacatccattattcgagaatgaatcctctaaaaggttcagtgtttttcctttaagttttgagcgctaaaaatcccatgttattattggtctgcattttgaaagatccttgagttgtagttgacgattggtcaatagttttggccgaacgatcgagaagaaatgcatcgtttggacgcgagagagacgtgacgatgtaaagttagttctaaaagtacatcagctctgtaagcatctttttgttagaactcaaaaagtcgcactttgccggccaaaatggttttcttcttatagtaaaagaactaatggatttctaacatgtcaaggaatataatgacaatagtttcacggcattttaatggatatattattgtgaaacagttctattgttatgcagtttgatttgccggtaaaagaagtgcgtggtttcctggttcctgtcctttatgtagctgttgctatttttatgatgttttgatttgttcatgttccagtaagaaatgcccagatgatattatttggtatcgattttatccagttttgtaatgatttgaatatcttcccctcccagccccgtctgaatggaaaattttgaagttccaagtgttgtgacatggatttttgttttaacaaggtatgataatgtttattttaaataattcacaagtggatattattggtaaaggttttacataattaaaaatgtttgttttcaacatggaaaatatattatgtaaagtaaatattagatggcagtgacatttgacagccatgtcaaatttttgttttggtacactgctaaaaataaggttaaaaattgtaaaatcatgtattttgttattattattcatttctggtttgagaatgtgtctattctcaataaaaataaaaaggtattaaggtttaaataaacattataaaatgtacacatctttatttctgtaacctctttatttaagaaaattattaacagatatctaatacaagtgaataagttttagaacagaagaaaatataatggcatagaagccaaatgatgataatttgtagcccactataaccccaatgaggaatctacgatgaatgtcccccagttgctttccagtaagtactcgatatgagaatttgaggatttttcaaacggcgtcccaatttgtttaaatagtaggaaagtcctcaagtctgtgtaagtatcctttgcttatttggttatgtagtttagtcttctttaaaccctcctacccctcccaacgaatctacgacctgccaccgcacaaaaaatgagctgccgttcgcatgaaggtttgcgtgtctgttccttctgctagccccatttcgactccccagtatctctatagatagtctttccttgatcccattagagcagacaggtaaaacgcttcaactggcacccaacgtgtgaggccgattcatttttctgcctccttcagtatccagttgttgtcttgtccagttgaacgcttcaactagcgccctgtacgtggggctcgatccatttttagcccccctgatcccattagcatgtgcccactaccatatccctttagcctcctttcggtctcatttgtactacaactgttaggcagtgcccgtccccttgggcagccgatctcagtttgtggtgcaggtgtttccgataacatggaagcttgacttttgtcatattttgtgtacgcccactgttacaagtctagcttgtagacatgttcaactagtagttagcctatctactagtccccaatgtctttagccaccccccacttagtgttacttgtaatacttgtaacgtacaccctgaagtttgacccgagtaaatatcgccccagtcttcccatgtagtttagcccagattcctcttgtcttgcccccagaaactgtttcatgtcttttagtgcccccgaaactgtttcagtctgttagtccccatgaaagagcccatttttgtagtttttgttgcagaatgttaataatttttccaaagaggtgtaagtatgtacacattttgttgtggtgttgatttggtcatgctgctgattgtataggcatgtaccatttcatacatcatagtgtatttacattgtaaccccatattatgtaaaccgtagtatactggtattgtattgtatgtatcgtacaagagaatagtatgtttaatattgtagcgtacttactatattgtattgatattgtacccatgatgaaagcattggttaaattttttggaaaatattgatgaattatatagacaaacagatgagtaaaaaataaagtataaaatttttttagaaaattttggtataagtaacgttaaaaattttttttaaaattttgctaaaagttacaattaaaatgtttagaatattgaatccacttatagagtataacaatatgttatatttttttgcatgtattcttgtagatcatcagttttttacagaataaacgttttttgtgattattgatttggtcgtttgagtagatgtgtgataatagttggtatggtccgtgtatgagctaattcggtatggtctgtgtgagtaagttccgtgattttccagcgaagcctatctatatttgggtatattattgccacaggttagttggagaagtcatccttgaagaagtaaccccatgaagaagtgaagagggaaactgaggcgaggcccctccacttattaatgaagaagtagacccc

SEQ ID NO: 790 - DNA, 4722 bp, Diabrotica virgifera
gactaatctatctttgtaggtgtcgaaaaggataccaatgattagttgaaaatggtttgagaagtgaagaaaaagtaaccccatgaaaaagtgaagagggaaaccgtggcgaggcccctccacttgttcataaaattgatgtatgttttcttgtatctggcatatcacaagtgtaatactcgtgatgaggaagtgttgttcagttgtctgggaatactcccattaatagtcggagcaagaacagttttatttgtgtaagctcatataagaaccaaatttcaatatttatttgtgtttgtaagcccatgtatatggagtatgactaagaaccaagtttcaatattttttgtgtttgtaagcccatgtatatggagtatgactaagaaccaagtttcgatattatttgtgtttgtaagcccatgtgtatggagaatgtataaatgccctatgagtcttttgttccctgtttgtttgtctatcccttttttgtctggaaattctagagtctgttatcccgtaatgtctgttagcccatgtccctgatggagtttgattttttttggcgaatagttcgttgacctctcttgtgtttgttcattgaaagtaggccaagagcagaagctgtgacaaggctggtgagcttaggatctggccgcgttgagtacaggtgaagcttgctttcggtggataaatggaagtggtcgttcgtcggaattgtcattctttccaatgtccctttggtctttcccttgtgtgtttgctttcatccctgttttgaaaaagtagtctaaccccagtttggaagagtgaagtctactcatgttttggaaaaataaagtctacccattgttttggaaaagtaagatctactcatgttttggaaaagtaagatcatatccccggttttgaaaaataaagaatatcccagtttgtgatttgaaaatgagaaagttgtcttgtgaactttcatgaaaggcttttatgtcctaggtaggactgttgattgaaaacgtaatgatgtagtatttcctatgtcatgtgttacgttcatttttttttggtcttgattaaatagtttgatatcccgtttgaatccagtatactagtttttttggtcttttgtatgttgtcacacgcgttccccccccttgttggtcttgtttgaatgagttgttgagatgtcatttttgacattttatctcaacgaggtatttagactgcattgtctaaatcctccttttgcagaaccgttgccgaatgtcccgtgaaactcgctaggtgtttagagtttaagcagatgcctatctgctgagccaagagctcagaaagattttttagtttttgaaaaccaatcctggttaggcaacgaggtgatgaggctgtgtctgccctgctatatggtatatattatatggtatatatagtatatatgtcacttgtgttactgcagtggatgtcagcgaggtccacacagggcacaagattatttctttcccaagacacagaaactcttgtcacctacagttctttgtagagtcaagaaacatttaagtctactcgactttaaagagtctggcgattgatggcacgctagcccactccctaacaatgatgttttgtttttgtttaatccccactagccattatttaaatatttttgtattgttgtcctgtcacacccaagaagtcaatgttggatttttgtagttatcgaaaactgaattggtaatccagtttcctctcttccgaggaggctattgtagcagatggatttctactacaatattttataaaaaatatccattaattttaatcctatcccaagaaaaatattaatttttctaatatattttgcgagtttatatatctttaaaatttcctaagccgctcctgttcgaaatatttcagaatattttcgcaacaaagtaaaatcataggaaagttcctatttatttgagtagcatttaccaactacgtagatagttattgtgaaatcattcattattcgagaatgaatcctctaaaaggtttggtgtttttcctttaagttttgagcgataaaaatcccatgttattattggtctgcattttgaaagatccttgagttgtagttgacgattggtcaatagttttggccgaacgatcgagaagaaatgcatcgtttggacgcgagagagacgtgacgatgtaaagttagttctaaaagtacatcacttcagtaaacatctttttgttagaactcaaccaacagactcgtagaaagtcgcactttgccggcaaaatggttttatttttatggtaaaagaagtgaaagactggcagtttgcccagtaaatgtcaacgaatataatgacaatagtttcacggcattttaatggatatattattgtgaaacagttctattgttatgcagttagatttgccggtggtataaaaaagaagtgcgtggtttcctggttcctgtcctttatgtagctgttgctatttttatgatgttttgatttgttcatgttccagtaagaaatgcccagatgatattatttggtatcgattttatccagttttgtaatgatttgaatatcttccctccctccaatctcgaatggaaagttttgaagttccaagtgttgtgacatggatttttgttttaaggtatgataatgtttattttaaataaattcacaagtggatattaatggtaaaggttttacataattaaatgtttgttttcaacatggaaaatattttattgtaaagtaaatgtaaaatggcagtgacttttgacagccatgtcaaattttagttttggtacactgctaaaaataaataaggttaaaaattgtaaaaccatatatttgtttttattattcatttcttttttgagaatatgtttattctcggagtaagttttaaataaacattataaaatgtacacatctttatttctgtaacctctttatttaagaaaattattaacagatatctaatacaagtgaataagttttagaacagaagaaaatataatggcatagaagccaaatgatgataatttgtagcccactataaccccaatgaggaatctacgatgaatgtcccccagttgctttccagtaagtactcgatatgagaatttgaggatttttcaaacggcgtcccaatttgtttaaatagtaggaaagtcctcaagtctgtgtaagtatcctttgcttatttggttatgtagtttagtcttctttaaaccctcctacccctcccaacgaatctacgacctgccaccgcacaaaaaatgagctgccgttcgcatgaaggtttgcgtgtctgttccttctgctagccccatttcgactccccagtatctctatagatagtctttccttgatcccattagagcagacaggtaaaacgcttcaactggcacccaacgtgtgaggccgattcatttttctgcctccttcagtatccagttgttgtcttgtccagttgaacgcttcaactagcgccctgtacgtggggctcgatccatttttagcccccctgatcccattagcatgtgcccactaccatatccctttagcctcctttcggtctcatttgtactacaactgttaggcagtgcccgtccccttgggcagccgatctcagtttgtggtgcaggtgtttccgataacatggaagcttgacttttgtcatattttgtgtacgcccactgttacaagtctagcttgtagacatgttcaactagtagttagcctatctactagtccccaatgtctttagccaccccccacttagtgttacttgtaatacttgtaacgtacaccctgaagtttgacccgagtaaatatcgccccagtcttcccatgtagtttagcccagattcctcttgtcttgcccccagaaactgtttcatgtcttttagtgcccccgaaactgtttcagtctgttagtccccatgaaagagcccatttttgtagtttttgttgcagaatgttaataatttttccaaagaggtgtaagtatgtacacattttgttgtggtgttgatttggtcatgctgctgattgtataggcatgtaccatttcatacatcatagtgtatttacattgtaaccccatattatgtaaaccgtagtatactggtattgtattgtatgtatcgtacaagagaatagtatgtttaatattgtagcgtacttactatattgtattgatattgtacccatgatgaaagcattggttaaattttttggaaaatattgatgaattatatagacaaacagatgagtaaaaaataaagtataaaatttttttagaaaattttggtataagtaacgttaaaaattttttttaaaattttgctaaaagttacaattaaaatgtttagaatattgaatccacttatagagtataacaatatgttatatttttttgcatgtattcttgtagatcatcagttttttacagaataaacgttttttgtgattattgatttggtcgtttgagtagatgtgtgataatagttggtatggtccgtgtatgagctaattcggtatggtctgtgtgagtaagttccgtgattttccagcgaagcctatctatatttgggtatattattgccacaggttagttggagaagtcatccttgaagaagtaaccccatgaagaagtgaagagggaaactgaggcgaggcccctccacttattaatgaagaagtagacccc

SEQ ID NO: 791 - DNA, 4695 bp, Diabrotica virgifera
gactaatctatctttgtaggtgtcgaaaaggataccaatgattagttgaaaatggtttgagaagtgaagaaaaagtaaccccatgaaaaagtgaagagggaaaccgtggcgaggcccctccacttgttcataaaattgatgtatgttttcttgtatctggcatatcacaagtgtaatactcgtgatgaggaagtgttgttcagttgtctgggaatactcccattaatagtcggagcaagaacagttttatttgtgtaagctcatataagaaccaaatttcaatatttatttgtgtttgtaagcccatgtatatggagtatgactaagaaccaagtttcaatattttttgtgtttgtaagcccatgtatatggagtatgactaagaaccaagtttcgatattatttgtgtttgtaagcccatgtgtatggagaatgtataaatgccctatgagtcttttgttccctgtttgtttgtctatcccttttttgtctggaaattctagagtctgttatcccgtaatgtctgttagcccatgtccctgatggagtttgattttttttggcgaatagttcgttgacctctcttgtgtttgttcattgaaagtaggccaagagcagaagctgtgacaaggctggtgagcttaggatctggccgcgttgagtacaggtgaagcttgctttcggtggataaatggaagtggtcgttcgtcggaattgtcattctttccaatgtccctttggtctttcccttgtgtgtttgctttcatccctgttttgaaaaagtagtctaaccccagtttggaagagtgaagtctactcatgttttggaaaaataaagtctacccattgttttggaaaagtaagatctactcatgttttggaaaagtaagatcatatccccggttttgaaaaataaagaatatcccagtttgtgatttgaaaatgagaaagttgtcttgtgaactttcatgaaaggcttttatgtcctaggtaggactgttgattgaaaacgtaatgatgtagtatttcctatgtcatgtgttacgttcatttttttttggtcttgattaaatagtttgatatcccgtttgaatccagtatactagtttttttggtcttttgtatgttgtcacacgcgttccccccccttgttggtcttgtttgaatgagttgttgagatgtcatttttgacattttatctcaacgaggtatttagactgcattgtctaaatcctccttttgcagaaccgttgccgaatgtcccgtgaaactcgctaggtgtttagagtttaagcagatgcctatctgctgagccaagagctcagaaagattttttagtttttgaaaaccaatcctggttaggcaacgaggtgatgaggctgtgtctgccctgctatatggtatatattatatggtatatatagtatatatgtcacttgtgttactgcagtggatgtcagcgaggtccacacagggcacaagattatttctttcccaagacacagaaactcttgtcacctacagttctttgtagagtcaagaaacatttaagtctactcgactttaaagagtctggcgattgatggcacgctagcccactccctaacaatgatgttttgtttttgtttaatccccactagccattatttaaatatttttgtattgttgtcctgtcacacccaagaagtcaatgttggatttttgtagttatcgaaaactgaattggtaatccagtttcctctcttccgaggaggctattgtagcagatggatttctactacaatattttataaaaaatatccattaattttaatcctatcccaagaaaaatattaatttttctaatatattttgcgagtttatatatctttaaaatttcctaagccgctcctgttcgcattgtaaaggttaggaaatttcctatttatttgtgtagcaataaccaactacgtagattgttattgaaaacatccattattcgagaatgaatcctctaaaaggttcagtgtttttcctttaagttttgagcgctaaaaatcccatgttattattggtctgcattttgaaagatccttgagttgtagttgacgattggtcaatagttttggccgaacgatcgagaagaaatgcatcgtttggacgcgagagagacgtgacgatgtaaagttagttctaaaagtacatcacttcagtaaacatctttttgttagaactcaaccaacagactcgtagaaagtcgcactttgccggcaaaatggttttatttttatggtaaaagaagtgaaagactggcagtttgcccagtaaatgtcaacgaatataatgacaatagtttcacggcattttaatggatatattattgtgaaacagttctattgttatgcagttagatttgccggtggtataaaaaagaagtgcgtggtttcctggttcctgtcctttatgtagctgttgctatttttatgatgttttgatttgttcatgttccagtaagaaatgcccagatgatattatttggtatcgattttatccagttttgtaatgatttgaatatcttccctccctccaatctcgaatggaaagttttgaagttccaagtgttgtgacatggatttttgttttaaggtatgataatgtttattttaaataaattcacaagtggatattaatggtaaaggttttacataattaaatgtttgttttcaacatggaaaatattttattgtaaagtaaatgtaaaatggcagtgacttttgacagccatgtcaaattttagttttggtacactgctaaaaataaataaggttaaaaattgtaaaaccatatatttgtttttattattcatttcttttttgagaatatgtttattctcggagtaagttttaaataaacattataaaatgtacacatctttatttctgtaacctctttatttaagaaaattattaacagatatctaatacaagtgaataagttttagaacagaagaaaatataatggcatagaagccaaatgatgataatttgtagcccactataaccccaatgaggaatctacgatgaatgtcccccagttgctttccagtaagtactcgatatgagaatttgaggatttttcaaacggcgtcccaatttgtttaaatagtaggaaagtcctcaagtctgtgtaagtatcctttgcttatttggttatgtagtttagtcttctttaaaccctcctacccctcccaacgaatctacgacctgccaccgcacaaaaaatgagctgccgttcgcatgaaggtttgcgtgtctgttccttctgctagccccatttcgactccccagtatctctatagatagtctttccttgatcccattagagcagacaggtaaaacgcttcaactggcacccaacgtgtgaggccgattcatttttctgcctccttcagtatccagttgttgtcttgtccagttgaacgcttcaactgtcgccctagaacgtggggcatgtcttttttgcctccctcagaccccatttgcatgttcccactaccatgtccttttagcctcctttcggtctcatttgtactacaactgttaggcagtgcccgtccccttgggcagccgatctcagtttgtggtgcaggtgtttccgataacatggaagcttgacttttgtcatattttgtgtacgcccactgttacaagtctagcttgtagacatgttcaactagtagttagcctatctactagtccccaatgtctttagccaccccccacttagtgttacttgtaatacttgtaacgtacaccctgaagtttgacccgagtaaatatcgccccagtcttcccatgtagtttagcccagattcctcttgtcttgcccccagaaactgtttcatgtcttttagtgcccccgaaactgtttcagtctgttagtccccatgaaagagcccatttttgtagtttttgttgcagaatgttaataatttttccaaagaggtgtaagtatgtacacattttgttgtggtgttgatttggtcatgctgctgattgtataggcatgtaccatttcatacatcatagtgtatttacattgtaaccccatattatgtaaaccgtagtatactggtattgtattgtatgtatcgtacaagagaatagtatgtttaatattgtagcgtacttactatattgtattgatattgtacccatgatgaaagcattggttaaattttttggaaaatattgatgaattatatagacaaacagatgagtaaaaaataaagtataaaatttttttagaaaattttggtataagtaacgttaaaaattttttttaaaattttgctaaaagttacaattaaaatgtttagaatattgaatccacttatagagtataacaatatgttatatttttttgcatgtattcttgtagatcatcagttttttacagaataaacgttttttgtgattattgatttggtcgtttgagtagatgtgtgataatagttggtatggtccgtgtatgagctaattcggtatggtctgtgtgagtaagttccgtgattttccagcgaagcctatctatatttgggtatattattgccacaggttagttggagaagtcatccttgaagaagtaaccccatgaagaagtgaagagggaaactgaggcgaggcccctccacttattaatgaagaagtagacccc

SEQ ID NO: 792 - DNA, 4690 bp, Diabrotica virgifera
gactaatctatctttgtaggtgtcgaaaaggataccaatgattagttgaaaatggtttgagaagtgaagaaaaagtaaccccatgaaaaagtgaagagggaaaccgtggcgaggcccctccacttgttcataaaattgatgtatgttttcttgtatctggcatatcacaagtgtaatactcgtgatgaggaagtgttgttcagttgtctgggaatactcccattaatagtcggagcaagaacagttttatttgtgtaagctcatataagaaccaaatttcaatatttatttgtgtttgtaagcccatgtatatggagtatgactaagaaccaagtttcaatattttttgtgtttgtaagcccatgtatatggagtatgactaagaaccaagtttcgatattatttgtgtttgtaagcccatgtgtatggagaatgtataaatgccctatgagtcttttgttccctgtttgtttgtctatcccttttttgtctggaaattctagagtctgttatcccgtaatgtctgttagcccatgtccctgatggagtttgattttttttggcgaatagttcgttgacctctcttgtgtttgttcattgaaagtaggccaagagcagaagctgtgacaaggctggtgagcttaggatctggccgcgttgagtacaggtgaagcttgctttcggtggataaatggaagtggtcgttcgtcggaattgtcattctttccaatgtccctttggtctttcccttgtgtgtttgctttcatccctgttttgaaaaagtagtctaaccccagtttggaagagtgaagtctactcatgttttggaaaaataaagtctacccattgttttggaaaagtaagatctactcatgttttggaaaagtaagatcatatccccggttttgaaaaataaagaatatcccagtttgtgatttgaaaatgagaaagttgtcttgtgaactttcatgaaaggcttttatgtcctaggtaggactgttgattgaaaacgtaatgatgtagtatttcctatgtcatgtgttacgttcatttttttttggtcttgattaaatagtttgatatcccgtttgaatccagtatactagtttttttggtcttttgtatgttgtcacacgcgttccccccccttgttggtcttgtttgaatgagttgttgagatgtcatttttgacattttatctcaacgaggtatttagactgcattgtctaaatcctccttttgcagaaccgttgccgaatgtcccgtgaaactcgctaggtgtttagagtttaagcagatgcctatctgctgagccaagagctcagaaagattttttagtttttgaaaaccaatcctggttaggcaacgaggtgatgaggctgtgtctgccctgctatatggtatatattatatggtatatatagtatatatgtcacttgtgttactgcagtggatgtcagcgaggtccacacagggcacaagattatttctttcccaagacacagaaactcttgtcacctacagttctttgtagagtcaagaaacatttaagtctactcgactttaaagagtctggcgattgatggcacgctagcccactccctaacaatgatgttttgtttttgtttaatccccactagccattatttaaatatttttgtattgttgtcctgtcacacccaagaagtcaatgttggatttttgtagttatcgaaaactgaattggtaatccagtttcctctcttccgaggaggctattgtagcagatggatttctactacaatattttataaaaaatatccattaattttaatcctatcccaagaaaaatattaatttttctaatatattttgcgagtttatatatctttaaaatttcctaagccgctcctgttcgcattgtaaaggttaggaaatttcctatttatttgtgtagcaataaccaactacgtagattgttattgaaaacatccattattcgagaatgaatcctctaaaaggttcagtgtttttcctttaagttttgagcgctaaaaatcccatgttattattggtctgcattttgaaagatccttgagttgtagttgacgattggtcaatagttttggccgaacgatcgagaagaaatgcatcgtttggacgcgagagagacgtgacgatgtaaagttagttctaaaagtacatcacttcagtaaacatctttttgttagaactcaaccaacagactcgtagaaagtcgcactttgccggcaaaatggttttatttttatggtaaaagaagtgaaagactggcagtttgcccagtaaatgtcaacgaatataatgacaatagtttcacggcattttaatggatatattattgtgaaacagttctattgttatgcagttagatttgccggtggtataaaaaagaagtgcgtggtttcctggttcctgtcctttatgtagctgttgctatttttatgatgttttgatttgttcatgttccagtaagaaatgcccagatgatattatttggtatcgattttatccagttttgtaatgatttgaatatcttccctccctccaatctcgaatggaaagttttgaagttccaagtgttgtgacatggatttttgttttaaggtatgataatgtttattttaaataaattcacaagtggatattaatggtaaaggttttacataattaaatgtttgttttcaacatggaaaatattttattgtaaagtaaatgtaaaatggcagtgacttttgacagccatgtcaaattttagttttggtacactgctaaaaataaataaggttaaaaattgtaaaaccatatatttgtttttattattcatttcttttttgagaatatgtttattctcggagtaagttttaaataaacattataaaatgtacacatctttatttctgtaacctctttatttaagaaaattattaacagatatctaatacaagtgaataagttttagaacagaagaaaatataatggcatagaagccaaatgatgataatttgtagcccactataaccccaatgaggaatctacgatgaatgtcccccagttgctttccagtaagtactcgatatgagaatttgaggatttttcaaacggcgtcccaatttgtttaaatagtaggaaagtcctcaagtctgtgtaagtatcctttgcttatttggttatgtagtttagtcttctttaaaccctcctacccctcccaacgaatctacgacctgccaccgcacaaaaaatgagctgccgttcgcatgaaggtttgcgtgtctgttccttctgctagccccatttcgactccccagtatctctatagatagtctttccttgatcccattagagcagacaggtaaaacgcttcaactggcacccaacgtgtgaggccgattcatttttctgcctccttcagtatccagttgttgtcttgtccagttgaacgcttcaactagcgccctgtacgtggggctcgatccatttttagcccccctgatcccattagcatgtgcccactaccatatccctttagcctcctttcggtctcatttgtactacaactgttaggcagtgcccgtcttgggtagccgatctcagtttgtggtgcaagtgtttccgataacatggaagctcgactcgtgtcatgttttgtatgcccattgttacaagtctagcttgtagacatgttcaactagtagttagcctatctactagtccccaatgtctttagccaccccccacttagtgttacttgtaatacttgtaacgtacaccctgaagtttgacccgagtaaatatcgccccagtcttcccatgtagtttagcccagattcctcttgtcttgcccccagaaactgtttcatgtcttttagtgcccccgaaactgtttcagtctgttagtccccatgaaagagcccatttttgtagtttttgttgcagaatgttaataatttttccaaagaggtgtaagtatgtacacattttgttgtggtgttgatttggtcatgctgctgattgtataggcatgtaccatttcatacatcatagtgtatttacattgtaaccccatattatgtaaaccgtagtatactggtattgtattgtatgtatcgtacaagagaatagtatgtttaatattgtagcgtacttactatattgtattgatattgtacccatgatgaaagcattggttaaattttttggaaaatattgatgaattatatagacaaacagatgagtaaaaaataaagtataaaatttttttagaaaattttggtataagtaacgttaaaaattttttttaaaattttgctaaaagttacaattaaaatgtttagaatattgaatccacttatagagtataacaatatgttatatttttttgcatgtattcttgtagatcatcagttttttacagaataaacgttttttgtgattattgatttggtcgtttgagtagatgtgtgataatagttggtatggtccgtgtatgagctaattcggtatggtctgtgtgagtaagttccgtgattttccagcgaagcctatctatatttgggtatattattgccacaggttagttggagaagtcatccttgaagaagtaaccccatgaagaagtgaagagggaaactgaggcgaggcccctccacttattaatgaagaagtagacccc

SEQ ID NO: 793 - DNA, 4685 bp, Diabrotica virgifera
gactaatctatctttgtaggtgtcgaaaaggataccaatgattagttgaaaatggtttgagaagtgaagaaaaagtaaccccatgaaaaagtgaagagggaaaccgtggcgaggcccctccacttgttcataaaattgatgtatgttttcttgtatctggcatatcacaagtgtaatactcgtgatgaggaagtgttgttcagttgtctgggaatactcccattaatagtcggagcaagaacagttttatttgtgtaagctcatataagaaccaaatttcaatatttatttgtgtttgtaagcccatgtatatggagtatgactaagaaccaagtttcaatattttttgtgtttgtaagcccatgtatatggagtatgactaagaaccaagtttcgatattatttgtgtttgtaagcccatgtgtatggagaatgtataaatgccctatgagtcttttgttccctgtttgtttgtctatcccttttttgtctggaaattctagagtctgttatcccgtaatgtctgttagcccatgtccctgatggagtttgattttttttggcgaatagttcgttgacctctcttgtgtttgttcattgaaagtaggccaagagcagaagctgtgacaaggctggtgagcttaggatctggccgcgttgagtacaggtgaagcttgctttcggtggataaatggaagtggtcgttcgtcggaattgtcattctttccaatgtccctttggtctttcccttgtgtgtttgctttcatccctgttttgaaaaagtagtctaaccccagtttggaagagtgaagtctactcatgttttggaaaaataaagtctacccattgttttggaaaagtaagatctactcatgttttggaaaagtaagatcatatccccggttttgaaaaataaagaatatcccagtttgtgatttgaaaatgagaaagttgtcttgtgaactttcatgaaaggcttttatgtcctaggtaggactgttgattgaaaacgtaatgatgtagtatttcctatgtcatgtgttacgttcatttttttttggtcttgattaaatagtttgatatcccgtttgaatccagtatactagtttttttggtcttttgtatgttgtcacacgcgttccccccccttgttggtcttgtttgaatgagttgttgagatgtcatttttgacattttatctcaacgaggtatttagactgcattgtctaaatcctccttttgcagaaccgttgccgaatgtcccgtgaaactcgctaggtgtttagagtttaagcagatgcctatctgctgagccaagagctcagaaagattttttagtttttgaaaaccaatcctggttaggcaacgaggtgatgaggctgtgtctgccctgctatatggtatatattatatggtatatatagtatatatgtcacttgtgttactgcagtggatgtcagcgaggtccacacagggcacaagattatttctttcccaagacacagaaactcttgtcacctacagttctttgtagagtcaagaaacatttaagtctactcgactttaaagagtctggcgattgatggcacgctagcccactccctaacaatgatgttttgtttttgtttaatccccactagccattatttaaatatttttgtattgttgtcctgtcacacccaagaagtcaatgttggatttttgtagttatcgaaaactgaattggtaatccagtttcctctcttccgaggaggctattgtagcagatggatttctactacaatattttataaaaaatatccattaattttaatcctatcccaagaaaaatattaatttttctaatatattttgcgagtttatatatctttaaaatttcctaagccgctcctgttcgaaatatttcagaatattttcgcaacaaagtaaaatcataggaaagttcctatttatttgagtagcatttaccaactacgtagatagttattgtgaaatcattcattattcgagaatgaatcctctaaaaggtttggtgtttttcctttaagttttgagcgataaaaatcccatgttattattggtctgcattttgaaagatccttgagttgtagttgacgattggtcaatagttttggccgaacgatcgagaagaaatgcatcgtttggacgcgagagagacgtgacgatgtaaagttagttctaaaagtacatcagctctgtaagcatctttttgttagaactcaaaaagtcgcactttgccggccaaaatggttttcttcttatagtaaaagaactaatggatttctaacatgtcaaggaatataatgacaatagtttcacggcattttaatggatatattattgtgaaacagttctattgttatgcagtttgatttgccggtaaaagaagtgcgtggtttcctggttcctgtcctttatgtagctgttgctatttttatgatgttttgatttgttcatgttccagtaagaaatgcccagatgatattatttggtatcgattttatccagttttgtaatgatttgaatatcttccctccctccaatctcgaatggaaagttttgaagttccaagtgttgtgacatggatttttgttttaaggtatgataatgtttattttaaataaattcacaagtggatattaatggtaaaggttttacataattaaatgtttgttttcaacatggaaaatattttattgtaaagtaaatgtaaaatggcagtgacttttgacagccatgtcaaattttagttttggtacactgctaaaaataaataaggttaaaaattgtaaaaccatatatttgtttttattattcatttcttttttgagaatatgtttattctcggagtaagttttaaataaacattataaaatgtacacatctttatttctgtaacctctttatttaagaaaattattaacagatatctaatacaagtgaataagttttagaacagaagaaaatataatggcatagaagccaaatgatgataatttgtagcccactataaccccaatgaggaatctacgatgaatgtcccccagttgctttccagtaagtactcgatatgagaatttgaggatttttcaaacggcgtcccaatttgtttaaatagtaggaaagtcctcaagtctgtgtaagtatcctttgcttatttggttatgtagtttagtcttctttaaaccctcctacccctcccaacgaatctacgacctgccaccgcacaaaaaatgagctgccgttcgcatgaaggtttgcgtgtctgttccttctgctagccccatttcgactccccagtatctctatagatagtctttccttgatcccattagagcagacaggtaaaacgcttcaactggcacccaacgtgtgaggccgattcatttttctgcctccttcagtatccagttgttgtcttgtccagttgaacgcttcaactgtcgccctagaacgtggggcatgtcttttttgcctccctcagaccccatttgcatgttcccactaccatgtccttttagcctcctttcggtctcatttgtactacaactgttaggcagtgcccgtcttgggtagccgatctcagtttgtggtgcaagtgtttccgataacatggaagctcgactcgtgtcatgttttgtatgcccattgttacaagtctagcttgtagacatgttcaactagtagttagcctatctactagtccccaatgtctttagccaccccccacttagtgttacttgtaatacttgtaacgtacaccctgaagtttgacccgagtaaatatcgccccagtcttcccatgtagtttagcccagattcctcttgtcttgcccccagaaactgtttcatgtcttttagtgcccccgaaactgtttcagtctgttagtccccatgaaagagcccatttttgtagtttttgttgcagaatgttaataatttttccaaagaggtgtaagtatgtacacattttgttgtggtgttgatttggtcatgctgctgattgtataggcatgtaccatttcatacatcatagtgtatttacattgtaaccccatattatgtaaaccgtagtatactggtattgtattgtatgtatcgtacaagagaatagtatgtttaatattgtagcgtacttactatattgtattgatattgtacccatgatgaaagcattggttaaattttttggaaaatattgatgaattatatagacaaacagatgagtaaaaaataaagtataaaatttttttagaaaattttggtataagtaacgttaaaaattttttttaaaattttgctaaaagttacaattaaaatgtttagaatattgaatccacttatagagtataacaatatgttatatttttttgcatgtattcttgtagatcatcagttttttacagaataaacgttttttgtgattattgatttggtcgtttgagtagatgtgtgataatagttggtatggtccgtgtatgagctaattcggtatggtctgtgtgagtaagttccgtgattttccagcgaagcctatctatatttgggtatattattgccacaggttagttggagaagtcatccttgaagaagtaaccccatgaagaagtgaagagggaaactgaggcgaggcccctccacttattaatgaagaagtagacccc

SEQ ID NO: 794 - DNA, 4695 bp, Diabrotica virgifera
gactaatctatctttgtaggtgtcgaaaaggataccaatgattagttgaaaatggtttgagaagtgaagaaaaagtaaccccatgaaaaagtgaagagggaaaccgtggcgaggcccctccacttgttcataaaattgatgtatgttttcttgtatctggcatatcacaagtgtaatactcgtgatgaggaagtgttgttcagttgtctgggaatactcccattaatagtcggagcaagaacagttttatttgtgtaagctcatataagaaccaaatttcaatatttatttgtgtttgtaagcccatgtatatggagtatgactaagaaccaagtttcaatattttttgtgtttgtaagcccatgtatatggagtatgactaagaaccaagtttcgatattatttgtgtttgtaagcccatgtgtatggagaatgtataaatgccctatgagtcttttgttccctgtttgtttgtctatcccttttttgtctggaaattctagagtctgttatcccgtaatgtctgttagcccatgtccctgatggagtttgattttttttggcgaatagttcgttgacctctcttgtgtttgttcattgaaagtaggccaagagcagaagctgtgacaaggctggtgagcttaggatctggccgcgttgagtacaggtgaagcttgctttcggtggataaatggaagtggtcgttcgtcggaattgtcattctttccaatgtccctttggtctttcccttgtgtgtttgctttcatccctgttttgaaaaagtagtctaaccccagtttggaagagtgaagtctactcatgttttggaaaaataaagtctacccattgttttggaaaagtaagatctactcatgttttggaaaagtaagatcatatccccggttttgaaaaataaagaatatcccagtttgtgatttgaaaatgagaaagttgtcttgtgaactttcatgaaaggcttttatgtcctaggtaggactgttgattgaaaacgtaatgatgtagtatttcctatgtcatgtgttacgttcatttttttttggtcttgattaaatagtttgatatcccgtttgaatccagtatactagtttttttggtcttttgtatgttgtcacacgcgttccccccccttgttggtcttgtttgaatgagttgttgagatgtcatttttgacattttatctcaacgaggtatttagactgcattgtctaaatcctccttttgcagaaccgttgccgaatgtcccgtgaaactcgctaggtgtttagagtttaagcagatgcctatctgctgagccaagagctcagaaagattttttagtttttgaaaaccaatcctggttaggcaacgaggtgatgaggctgtgtctgccctgctatatggtatatattatatggtatatatagtatatatgtcacttgtgttactgcagtggatgtcagcgaggtccacacagggcacaagattatttctttcccaagacacagaaactcttgtcacctacagttctttgtagagtcaagaaacatttaagtctactcgactttaaagagtctggcgattgatggcacgctagcccactccctaacaatgatgttttgtttttgtttaatccccactagccattatttaaatatttttgtattgttgtcctgtcacacccaagaagtcaatgttggatttttgtagttatcgaaaactgaattggtaatccagtttcctctcttccgaggaggctattgtagcagatggatttctactacaatattttataaaaaatatccattaattttaatcctatcccaagaaaaatattaatttttctaatatattttgcgagtttatatatctttaaaatttcctaagccgctcctgttcgcattgtaaaggttaggaaatttcctatttatttgtgtagcaataaccaactacgtagattgttattgaaaacatccattattcgagaatgaatcctctaaaaggttcagtgtttttcctttaagttttgagcgctaaaaatcccatgttattattggtctgcattttgaaagatccttgagttgtagttgacgattggtcaatagttttggccgaacgatcgagaagaaatgcatcgtttggacgcgagagagacgtgacgatgtaaagttagttctaaaagtacatcacttcagtaaacatctttttgttagaactcaaccaacagactcgtagaaagtcgcactttgccggcaaaatggttttatttttatggtaaaagaagtgaaagactggcagtttgcccagtaaatgtcaacgaatataatgacaatagtttcacggcattttaatggatatattattgtgaaacagttctattgttatgcagttagatttgccggtggtataaaaaagaagtgcgtggtttcctggttcctgtcctttatgtagctgttgctatttttatgatgttttgatttgttcatgttccagtaagaaatgcccagatgatattatttggtatcgattttatccagttttgtaatgatttgaatatcttccctccctccaatctcgaatggaaagttttgaagttccaagtgttgtgacatggatttttgttttaaggtatgataatgtttattttaaataaattcacaagtggatattaatggtaaaggttttacataattaaatgtttgttttcaacatggaaaatattttattgtaaagtaaatgtaaaatggcagtgacttttgacagccatgtcaaattttagttttggtacactgctaaaaataaataaggttaaaaattgtaaaaccatatatttgtttttattattcatttcttttttgagaatatgtttattctcggagtaagttttaaataaacattataaaatgtacacatctttatttctgtaacctctttatttaagaaaattattaacagatatctaatacaagtgaataagttttagaacagaagaaaatataatggcatagaagccaaatgatgataatttgtagcccactataaccccaatgaggaatctacgatgaatgtcccccagttgctttccagtaagtactcgatatgagaatttgaggatttttcaaacggcgtcccaatttgtttaaatagtaggaaagtcctcaagtctgtgtaagtatcctttgcttatttggttatgtagtttagtcttctttaaaccctcctacccctcccaacgaatctacgacctgccaccgcacaaaaaatgagctgccgttcgcatgaaggtttgcgtgtctgttccttctgctagccccatttcgactccccagtatctctatagatagtctttccttgatcccattagagcagacaggtaaaacgcttcaactggcacccaacgtgtgaggccgattcatttttctgcctccttcagtatccagttgttgtcttgtccagttgaacgcttcaactagcgccctgtacgtggggctcgatccatttttagcccccctgatcccattagcatgtgcccactaccatatccctttagcctcctttcggtctcatttgtactacaactgttaggcagtgcccgtccccttgggcagccgatctcagtttgtggtgcaggtgtttccgataacatggaagcttgacttttgtcatattttgtgtacgcccactgttacaagtctagcttgtagacatgttcaactagtagttagcctatctactagtccccaatgtctttagccaccccccacttagtgttacttgtaatacttgtaacgtacaccctgaagtttgacccgagtaaatatcgccccagtcttcccatgtagtttagcccagattcctcttgtcttgcccccagaaactgtttcatgtcttttagtgcccccgaaactgtttcagtctgttagtccccatgaaagagcccatttttgtagtttttgttgcagaatgttaataatttttccaaagaggtgtaagtatgtacacattttgttgtggtgttgatttggtcatgctgctgattgtataggcatgtaccatttcatacatcatagtgtatttacattgtaaccccatattatgtaaaccgtagtatactggtattgtattgtatgtatcgtacaagagaatagtatgtttaatattgtagcgtacttactatattgtattgatattgtacccatgatgaaagcattggttaaattttttggaaaatattgatgaattatatagacaaacagatgagtaaaaaataaagtataaaatttttttagaaaattttggtataagtaacgttaaaaattttttttaaaattttgctaaaagttacaattaaaatgtttagaatattgaatccacttatagagtataacaatatgttatatttttttgcatgtattcttgtagatcatcagttttttacagaataaacgttttttgtgattattgatttggtcgtttgagtagatgtgtgataatagttggtatggtccgtgtatgagctaattcggtatggtctgtgtgagtaagttccgtgattttccagcgaagcctatctatatttgggtatattattgccacaggttagttggagaagtcatccttgaagaagtaaccccatgaagaagtgaagagggaaactgaggcgaggcccctccacttattaatgaagaagtagacccc

SEQ ID NO: 795 - DNA, 4690 bp, Diabrotica virgifera
gactaatctatctttgtaggtgtcgaaaaggataccaatgattagttgaaaatggtttgagaagtgaagaaaaagtaaccccatgaaaaagtgaagagggaaaccgtggcgaggcccctccacttgttcataaaattgatgtatgttttcttgtatctggcatatcacaagtgtaatactcgtgatgaggaagtgttgttcagttgtctgggaatactcccattaatagtcggagcaagaacagttttatttgtgtaagctcatataagaaccaaatttcaatatttatttgtgtttgtaagcccatgtatatggagtatgactaagaaccaagtttcaatattttttgtgtttgtaagcccatgtatatggagtatgactaagaaccaagtttcgatattatttgtgtttgtaagcccatgtgtatggagaatgtataaatgccctatgagtcttttgttccctgtttgtttgtctatcccttttttgtctggaaattctagagtctgttatcccgtaatgtctgttagcccatgtccctgatggagtttgattttttttggcgaatagttcgttgacctctcttgtgtttgttcattgaaagtaggccaagagcagaagctgtgacaaggctggtgagcttaggatctggccgcgttgagtacaggtgaagcttgctttcggtggataaatggaagtggtcgttcgtcggaattgtcattctttccaatgtccctttggtctttcccttgtgtgtttgctttcatccctgttttgaaaaagtagtctaaccccagtttggaagagtgaagtctactcatgttttggaaaaataaagtctacccattgttttggaaaagtaagatctactcatgttttggaaaagtaagatcatatccccggttttgaaaaataaagaatatcccagtttgtgatttgaaaatgagaaagttgtcttgtgaactttcatgaaaggcttttatgtcctaggtaggactgttgattgaaaacgtaatgatgtagtatttcctatgtcatgtgttacgttcatttttttttggtcttgattaaatagtttgatatcccgtttgaatccagtatactagtttttttggtcttttgtatgttgtcacacgcgttccccccccttgttggtcttgtttgaatgagttgttgagatgtcatttttgacattttatctcaacgaggtatttagactgcattgtctaaatcctccttttgcagaaccgttgccgaatgtcccgtgaaactcgctaggtgtttagagtttaagcagatgcctatctgctgagccaagagctcagaaagattttttagtttttgaaaaccaatcctggttaggcaacgaggtgatgaggctgtgtctgccctgctatatggtatatattatatggtatatatagtatatatgtcacttgtgttactgcagtggatgtcagcgaggtccacacagggcacaagattatttctttcccaagacacagaaactcttgtcacctacagttctttgtagagtcaagaaacatttaagtctactcgactttaaagagtctggcgattgatggcacgctagcccactccctaacaatgatgttttgtttttgtttaatccccactagccattatttaaatatttttgtattgttgtcctgtcacacccaagaagtcaatgttggatttttgtagttatcgaaaactgaattggtaatccagtttcctctcttccgaggaggctattgtagcagatggatttctactacaatattttataaaaaatatccattaattttaatcctatcccaagaaaaatattaatttttctaatatattttgcgagtttatatatctttaaaatttcctaagccgctcctgttcgaaatatttcagaatattttcgcaacaaagtaaaatcataggaaagttcctatttatttgagtagcatttaccaactacgtagatagttattgtgaaatcattcattattcgagaatgaatcctctaaaaggtttggtgtttttcctttaagttttgagcgataaaaatcccatgttattattggtctgcattttgaaagatccttgagttgtagttgacgattggtcaatagttttggccgaacgatcgagaagaaatgcatcgtttggacgcgagagagacgtgacgatgtaaagttagttctaaaagtacatcagctctgtaagcatctttttgttagaactcaaaaagtcgcactttgccggccaaaatggttttcttcttatagtaaaagaactaatggatttctaacatgtcaaggaatataatgacaatagtttcacggcattttaatggatatattattgtgaaacagttctattgttatgcagtttgatttgccggtaaaagaagtgcgtggtttcctggttcctgtcctttatgtagctgttgctatttttatgatgttttgatttgttcatgttccagtaagaaatgcccagatgatattatttggtatcgattttatccagttttgtaatgatttgaatatcttccctccctccaatctcgaatggaaagttttgaagttccaagtgttgtgacatggatttttgttttaaggtatgataatgtttattttaaataaattcacaagtggatattaatggtaaaggttttacataattaaatgtttgttttcaacatggaaaatattttattgtaaagtaaatgtaaaatggcagtgacttttgacagccatgtcaaattttagttttggtacactgctaaaaataaataaggttaaaaattgtaaaaccatatatttgtttttattattcatttcttttttgagaatatgtttattctcggagtaagttttaaataaacattataaaatgtacacatctttatttctgtaacctctttatttaagaaaattattaacagatatctaatacaagtgaataagttttagaacagaagaaaatataatggcatagaagccaaatgatgataatttgtagcccactataaccccaatgaggaatctacgatgaatgtcccccagttgctttccagtaagtactcgatatgagaatttgaggatttttcaaacggcgtcccaatttgtttaaatagtaggaaagtcctcaagtctgtgtaagtatcctttgcttatttggttatgtagtttagtcttctttaaaccctcctacccctcccaacgaatctacgacctgccaccgcacaaaaaatgagctgccgttcgcatgaaggtttgcgtgtctgttccttctgctagccccatttcgactccccagtatctctatagatagtctttccttgatcccattagagcagacaggtaaaacgcttcaactggcacccaacgtgtgaggccgattcatttttctgcctccttcagtatccagttgttgtcttgtccagttgaacgcttcaactgtcgccctagaacgtggggcatgtcttttttgcctccctcagaccccatttgcatgttcccactaccatgtccttttagcctcctttcggtctcatttgtactacaactgttaggcagtgcccgtccccttgggcagccgatctcagtttgtggtgcaggtgtttccgataacatggaagcttgacttttgtcatattttgtgtacgcccactgttacaagtctagcttgtagacatgttcaactagtagttagcctatctactagtccccaatgtctttagccaccccccacttagtgttacttgtaatacttgtaacgtacaccctgaagtttgacccgagtaaatatcgccccagtcttcccatgtagtttagcccagattcctcttgtcttgcccccagaaactgtttcatgtcttttagtgcccccgaaactgtttcagtctgttagtccccatgaaagagcccatttttgtagtttttgttgcagaatgttaataatttttccaaagaggtgtaagtatgtacacattttgttgtggtgttgatttggtcatgctgctgattgtataggcatgtaccatttcatacatcatagtgtatttacattgtaaccccatattatgtaaaccgtagtatactggtattgtattgtatgtatcgtacaagagaatagtatgtttaatattgtagcgtacttactatattgtattgatattgtacccatgatgaaagcattggttaaattttttggaaaatattgatgaattatatagacaaacagatgagtaaaaaataaagtataaaatttttttagaaaattttggtataagtaacgttaaaaattttttttaaaattttgctaaaagttacaattaaaatgtttagaatattgaatccacttatagagtataacaatatgttatatttttttgcatgtattcttgtagatcatcagttttttacagaataaacgttttttgtgattattgatttggtcgtttgagtagatgtgtgataatagttggtatggtccgtgtatgagctaattcggtatggtctgtgtgagtaagttccgtgattttccagcgaagcctatctatatttgggtatattattgccacaggttagttggagaagtcatccttgaagaagtaaccccatgaagaagtgaagagggaaactgaggcgaggcccctccacttattaatgaagaagtagacccc

SEQ ID NO: 796 - DNA, 4685 bp, Diabrotica virgifera
gactaatctatctttgtaggtgtcgaaaaggataccaatgattagttgaaaatggtttgagaagtgaagaaaaagtaaccccatgaaaaagtgaagagggaaaccgtggcgaggcccctccacttgttcataaaattgatgtatgttttcttgtatctggcatatcacaagtgtaatactcgtgatgaggaagtgttgttcagttgtctgggaatactcccattaatagtcggagcaagaacagttttatttgtgtaagctcatataagaaccaaatttcaatatttatttgtgtttgtaagcccatgtatatggagtatgactaagaaccaagtttcaatattttttgtgtttgtaagcccatgtatatggagtatgactaagaaccaagtttcgatattatttgtgtttgtaagcccatgtgtatggagaatgtataaatgccctatgagtcttttgttccctgtttgtttgtctatcccttttttgtctggaaattctagagtctgttatcccgtaatgtctgttagcccatgtccctgatggagtttgattttttttggcgaatagttcgttgacctctcttgtgtttgttcattgaaagtaggccaagagcagaagctgtgacaaggctggtgagcttaggatctggccgcgttgagtacaggtgaagcttgctttcggtggataaatggaagtggtcgttcgtcggaattgtcattctttccaatgtccctttggtctttcccttgtgtgtttgctttcatccctgttttgaaaaagtagtctaaccccagtttggaagagtgaagtctactcatgttttggaaaaataaagtctacccattgttttggaaaagtaagatctactcatgttttggaaaagtaagatcatatccccggttttgaaaaataaagaatatcccagtttgtgatttgaaaatgagaaagttgtcttgtgaactttcatgaaaggcttttatgtcctaggtaggactgttgattgaaaacgtaatgatgtagtatttcctatgtcatgtgttacgttcatttttttttggtcttgattaaatagtttgatatcccgtttgaatccagtatactagtttttttggtcttttgtatgttgtcacacgcgttccccccccttgttggtcttgtttgaatgagttgttgagatgtcatttttgacattttatctcaacgaggtatttagactgcattgtctaaatcctccttttgcagaaccgttgccgaatgtcccgtgaaactcgctaggtgtttagagtttaagcagatgcctatctgctgagccaagagctcagaaagattttttagtttttgaaaaccaatcctggttaggcaacgaggtgatgaggctgtgtctgccctgctatatggtatatattatatggtatatatagtatatatgtcacttgtgttactgcagtggatgtcagcgaggtccacacagggcacaagattatttctttcccaagacacagaaactcttgtcacctacagttctttgtagagtcaagaaacatttaagtctactcgactttaaagagtctggcgattgatggcacgctagcccactccctaacaatgatgttttgtttttgtttaatccccactagccattatttaaatatttttgtattgttgtcctgtcacacccaagaagtcaatgttggatttttgtagttatcgaaaactgaattggtaatccagtttcctctcttccgaggaggctattgtagcagatggatttctactacaatattttataaaaaatatccattaattttaatcctatcccaagaaaaatattaatttttctaatatattttgcgagtttatatatctttaaaatttcctaagccgctcctgttcgaaatatttcagaatattttcgcaacaaagtaaaatcataggaaagttcctatttatttgagtagcatttaccaactacgtagatagttattgtgaaatcattcattattcgagaatgaatcctctaaaaggtttggtgtttttcctttaagttttgagcgataaaaatcccatgttattattggtctgcattttgaaagatccttgagttgtagttgacgattggtcaatagttttggccgaacgatcgagaagaaatgcatcgtttggacgcgagagagacgtgacgatgtaaagttagttctaaaagtacatcagctctgtaagcatctttttgttagaactcaaaaagtcgcactttgccggccaaaatggttttcttcttatagtaaaagaactaatggatttctaacatgtcaaggaatataatgacaatagtttcacggcattttaatggatatattattgtgaaacagttctattgttatgcagtttgatttgccggtaaaagaagtgcgtggtttcctggttcctgtcctttatgtagctgttgctatttttatgatgttttgatttgttcatgttccagtaagaaatgcccagatgatattatttggtatcgattttatccagttttgtaatgatttgaatatcttccctccctccaatctcgaatggaaagttttgaagttccaagtgttgtgacatggatttttgttttaaggtatgataatgtttattttaaataaattcacaagtggatattaatggtaaaggttttacataattaaatgtttgttttcaacatggaaaatattttattgtaaagtaaatgtaaaatggcagtgacttttgacagccatgtcaaattttagttttggtacactgctaaaaataaataaggttaaaaattgtaaaaccatatatttgtttttattattcatttcttttttgagaatatgtttattctcggagtaagttttaaataaacattataaaatgtacacatctttatttctgtaacctctttatttaagaaaattattaacagatatctaatacaagtgaataagttttagaacagaagaaaatataatggcatagaagccaaatgatgataatttgtagcccactataaccccaatgaggaatctacgatgaatgtcccccagttgctttccagtaagtactcgatatgagaatttgaggatttttcaaacggcgtcccaatttgtttaaatagtaggaaagtcctcaagtctgtgtaagtatcctttgcttatttggttatgtagtttagtcttctttaaaccctcctacccctcccaacgaatctacgacctgccaccgcacaaaaaatgagctgccgttcgcatgaaggtttgcgtgtctgttccttctgctagccccatttcgactccccagtatctctatagatagtctttccttgatcccattagagcagacaggtaaaacgcttcaactggcacccaacgtgtgaggccgattcatttttctgcctccttcagtatccagttgttgtcttgtccagttgaacgcttcaactagcgccctgtacgtggggctcgatccatttttagcccccctgatcccattagcatgtgcccactaccatatccctttagcctcctttcggtctcatttgtactacaactgttaggcagtgcccgtcttgggtagccgatctcagtttgtggtgcaagtgtttccgataacatggaagctcgactcgtgtcatgttttgtatgcccattgttacaagtctagcttgtagacatgttcaactagtagttagcctatctactagtccccaatgtctttagccaccccccacttagtgttacttgtaatacttgtaacgtacaccctgaagtttgacccgagtaaatatcgccccagtcttcccatgtagtttagcccagattcctcttgtcttgcccccagaaactgtttcatgtcttttagtgcccccgaaactgtttcagtctgttagtccccatgaaagagcccatttttgtagtttttgttgcagaatgttaataatttttccaaagaggtgtaagtatgtacacattttgttgtggtgttgatttggtcatgctgctgattgtataggcatgtaccatttcatacatcatagtgtatttacattgtaaccccatattatgtaaaccgtagtatactggtattgtattgtatgtatcgtacaagagaatagtatgtttaatattgtagcgtacttactatattgtattgatattgtacccatgatgaaagcattggttaaattttttggaaaatattgatgaattatatagacaaacagatgagtaaaaaataaagtataaaatttttttagaaaattttggtataagtaacgttaaaaattttttttaaaattttgctaaaagttacaattaaaatgtttagaatattgaatccacttatagagtataacaatatgttatatttttttgcatgtattcttgtagatcatcagttttttacagaataaacgttttttgtgattattgatttggtcgtttgagtagatgtgtgataatagttggtatggtccgtgtatgagctaattcggtatggtctgtgtgagtaagttccgtgattttccagcgaagcctatctatatttgggtatattattgccacaggttagttggagaagtcatccttgaagaagtaaccccatgaagaagtgaagagggaaactgaggcgaggcccctccacttattaatgaagaagtagacccc

SEQ ID NO: 797 - DNA, 4658 bp, Diabrotica virgifera
gactaatctatctttgtaggtgtcgaaaaggataccaatgattagttgaaaatggtttgagaagtgaagaaaaagtaaccccatgaaaaagtgaagagggaaaccgtggcgaggcccctccacttgttcataaaattgatgtatgttttcttgtatctggcatatcacaagtgtaatactcgtgatgaggaagtgttgttcagttgtctgggaatactcccattaatagtcggagcaagaacagttttatttgtgtaagctcatataagaaccaaatttcaatatttatttgtgtttgtaagcccatgtatatggagtatgactaagaaccaagtttcaatattttttgtgtttgtaagcccatgtatatggagtatgactaagaaccaagtttcgatattatttgtgtttgtaagcccatgtgtatggagaatgtataaatgccctatgagtcttttgttccctgtttgtttgtctatcccttttttgtctggaaattctagagtctgttatcccgtaatgtctgttagcccatgtccctgatggagtttgattttttttggcgaatagttcgttgacctctcttgtgtttgttcattgaaagtaggccaagagcagaagctgtgacaaggctggtgagcttaggatctggccgcgttgagtacaggtgaagcttgctttcggtggataaatggaagtggtcgttcgtcggaattgtcattctttccaatgtccctttggtctttcccttgtgtgtttgctttcatccctgttttgaaaaagtagtctaaccccagtttggaagagtgaagtctactcatgttttggaaaaataaagtctacccattgttttggaaaagtaagatctactcatgttttggaaaagtaagatcatatccccggttttgaaaaataaagaatatcccagtttgtgatttgaaaatgagaaagttgtcttgtgaactttcatgaaaggcttttatgtcctaggtaggactgttgattgaaaacgtaatgatgtagtatttcctatgtcatgtgttacgttcatttttttttggtcttgattaaatagtttgatatcccgtttgaatccagtatactagtttttttggtcttttgtatgttgtcacacgcgttccccccccttgttggtcttgtttgaatgagttgttgagatgtcatttttgacattttatctcaacgaggtatttagactgcattgtctaaatcctccttttgcagaaccgttgccgaatgtcccgtgaaactcgctaggtgtttagagtttaagcagatgcctatctgctgagccaagagctcagaaagattttttagtttttgaaaaccaatcctggttaggcaacgaggtgatgaggctgtgtctgccctgctatatggtatatattatatggtatatatagtatatatgtcacttgtgttactgcagtggatgtcagcgaggtccacacagggcacaagattatttctttcccaagacacagaaactcttgtcacctacagttctttgtagagtcaagaaacatttaagtctactcgactttaaagagtctggcgattgatggcacgctagcccactccctaacaatgatgttttgtttttgtttaatccccactagccattatttaaatatttttgtattgttgtcctgtcacacccaagaagtcaatgttggatttttgtagttatcgaaaactgaattggtaatccagtttcctctcttccgaggaggctattgtagcagatggatttctactacaatattttataaaaaatatccattaattttaatcctatcccaagaaaaatattaatttttctaatatattttgcgagtttatatatctttaaaatttcctaagccgctcctgttcgcattgtaaaggttaggaaatttcctatttatttgtgtagcaataaccaactacgtagattgttattgaaaacatccattattcgagaatgaatcctctaaaaggttcagtgtttttcctttaagttttgagcgctaaaaatcccatgttattattggtctgcattttgaaagatccttgagttgtagttgacgattggtcaatagttttggccgaacgatcgagaagaaatgcatcgtttggacgcgagagagacgtgacgatgtaaagttagttctaaaagtacatcagctctgtaagcatctttttgttagaactcaaaaagtcgcactttgccggccaaaatggttttcttcttatagtaaaagaactaatggatttctaacatgtcaaggaatataatgacaatagtttcacggcattttaatggatatattattgtgaaacagttctattgttatgcagtttgatttgccggtaaaagaagtgcgtggtttcctggttcctgtcctttatgtagctgttgctatttttatgatgttttgatttgttcatgttccagtaagaaatgcccagatgatattatttggtatcgattttatccagttttgtaatgatttgaatatcttccctccctccaatctcgaatggaaagttttgaagttccaagtgttgtgacatggatttttgttttaaggtatgataatgtttattttaaataaattcacaagtggatattaatggtaaaggttttacataattaaatgtttgttttcaacatggaaaatattttattgtaaagtaaatgtaaaatggcagtgacttttgacagccatgtcaaattttagttttggtacactgctaaaaataaataaggttaaaaattgtaaaaccatatatttgtttttattattcatttcttttttgagaatatgtttattctcggagtaagttttaaataaacattataaaatgtacacatctttatttctgtaacctctttatttaagaaaattattaacagatatctaatacaagtgaataagttttagaacagaagaaaatataatggcatagaagccaaatgatgataatttgtagcccactataaccccaatgaggaatctacgatgaatgtcccccagttgctttccagtaagtactcgatatgagaatttgaggatttttcaaacggcgtcccaatttgtttaaatagtaggaaagtcctcaagtctgtgtaagtatcctttgcttatttggttatgtagtttagtcttctttaaaccctcctacccctcccaacgaatctacgacctgccaccgcacaaaaaatgagctgccgttcgcatgaaggtttgcgtgtctgttccttctgctagccccatttcgactccccagtatctctatagatagtctttccttgatcccattagagcagacaggtaaaacgcttcaactggcacccaacgtgtgaggccgattcatttttctgcctccttcagtatccagttgttgtcttgtccagttgaacgcttcaactgtcgccctagaacgtggggcatgtcttttttgcctccctcagaccccatttgcatgttcccactaccatgtccttttagcctcctttcggtctcatttgtactacaactgttaggcagtgcccgtcttgggtagccgatctcagtttgtggtgcaagtgtttccgataacatggaagctcgactcgtgtcatgttttgtatgcccattgttacaagtctagcttgtagacatgttcaactagtagttagcctatctactagtccccaatgtctttagccaccccccacttagtgttacttgtaatacttgtaacgtacaccctgaagtttgacccgagtaaatatcgccccagtcttcccatgtagtttagcccagattcctcttgtcttgcccccagaaactgtttcatgtcttttagtgcccccgaaactgtttcagtctgttagtccccatgaaagagcccatttttgtagtttttgttgcagaatgttaataatttttccaaagaggtgtaagtatgtacacattttgttgtggtgttgatttggtcatgctgctgattgtataggcatgtaccatttcatacatcatagtgtatttacattgtaaccccatattatgtaaaccgtagtatactggtattgtattgtatgtatcgtacaagagaatagtatgtttaatattgtagcgtacttactatattgtattgatattgtacccatgatgaaagcattggttaaattttttggaaaatattgatgaattatatagacaaacagatgagtaaaaaataaagtataaaatttttttagaaaattttggtataagtaacgttaaaaattttttttaaaattttgctaaaagttacaattaaaatgtttagaatattgaatccacttatagagtataacaatatgttatatttttttgcatgtattcttgtagatcatcagttttttacagaataaacgttttttgtgattattgatttggtcgtttgagtagatgtgtgataatagttggtatggtccgtgtatgagctaattcggtatggtctgtgtgagtaagttccgtgattttccagcgaagcctatctatatttgggtatattattgccacaggttagttggagaagtcatccttgaagaagtaaccccatgaagaagtgaagagggaaactgaggcgaggcccctccacttattaatgaagaagtagacccc

SEQ ID NO: 798 - DNA, 4690 bp, Diabrotica virgifera
gactaatctatctttgtaggtgtcgaaaaggataccaatgattagttgaaaatggtttgagaagtgaagaaaaagtaaccccatgaaaaagtgaagagggaaaccgtggcgaggcccctccacttgttcataaaattgatgtatgttttcttgtatctggcatatcacaagtgtaatactcgtgatgaggaagtgttgttcagttgtctgggaatactcccattaatagtcggagcaagaacagttttatttgtgtaagctcatataagaaccaaatttcaatatttatttgtgtttgtaagcccatgtatatggagtatgactaagaaccaagtttcaatattttttgtgtttgtaagcccatgtatatggagtatgactaagaaccaagtttcgatattatttgtgtttgtaagcccatgtgtatggagaatgtataaatgccctatgagtcttttgttccctgtttgtttgtctatcccttttttgtctggaaattctagagtctgttatcccgtaatgtctgttagcccatgtccctgatggagtttgattttttttggcgaatagttcgttgacctctcttgtgtttgttcattgaaagtaggccaagagcagaagctgtgacaaggctggtgagcttaggatctggccgcgttgagtacaggtgaagcttgctttcggtggataaatggaagtggtcgttcgtcggaattgtcattctttccaatgtccctttggtctttcccttgtgtgtttgctttcatccctgttttgaaaaagtagtctaaccccagtttggaagagtgaagtctactcatgttttggaaaaataaagtctacccattgttttggaaaagtaagatctactcatgttttggaaaagtaagatcatatccccggttttgaaaaataaagaatatcccagtttgtgatttgaaaatgagaaagttgtcttgtgaactttcatgaaaggcttttatgtcctaggtaggactgttgattgaaaacgtaatgatgtagtatttcctatgtcatgtgttacgttcatttttttttggtcttgattaaatagtttgatatcccgtttgaatccagtatactagtttttttggtcttttgtatgttgtcacacgcgttccccccccttgttggtcttgtttgaatgagttgttgagatgtcatttttgacattttatctcaacgaggtatttagactgcattgtctaaatcctccttttgcagaaccgttgccgaatgtcccgtgaaactcgctaggtgtttagagtttaagcagatgcctatctgctgagccaagagctcagaaagattttttagtttttgaaaaccaatcctggttaggcaacgaggtgatgaggctgtgtctgccctgctatatggtatatattatatggtatatatagtatatatgtcacttgtgttactgcagtggatgtcagcgaggtccacacagggcacaagattatttctttcccaagacacagaaactcttgtcacctacagttctttgtagagtcaagaaacatttaagtctactcgactttaaagagtctggcgattgatggcacgctagcccactccctaacaatgatgttttgtttttgtttaatccccactagccattatttaaatatttttgtattgttgtcctgtcacacccaagaagtcaatgttggatttttgtagttatcgaaaactgaattggtaatccagtttcctctcttccgaggaggctattgtagcagatggatttctactacaatattttataaaaaatatccattaattttaatcctatcccaagaaaaatattaatttttctaatatattttgcgagtttatatatctttaaaatttcctaagccgctcctgttcgaaatatttcagaatattttcgcaacaaagtaaaatcataggaaagttcctatttatttgagtagcatttaccaactacgtagatagttattgtgaaatcattcattattcgagaatgaatcctctaaaaggtttggtgtttttcctttaagttttgagcgataaaaatcccatgttattattggtctgcattttgaaagatccttgagttgtagttgacgattggtcaatagttttggccgaacgatcgagaagaaatgcatcgtttggacgcgagagagacgtgacgatgtaaagttagttctaaaagtacatcagctctgtaagcatctttttgttagaactcaaaaagtcgcactttgccggccaaaatggttttcttcttatagtaaaagaactaatggatttctaacatgtcaaggaatataatgacaatagtttcacggcattttaatggatatattattgtgaaacagttctattgttatgcagtttgatttgccggtaaaagaagtgcgtggtttcctggttcctgtcctttatgtagctgttgctatttttatgatgttttgatttgttcatgttccagtaagaaatgcccagatgatattatttggtatcgattttatccagttttgtaatgatttgaatatcttccctccctccaatctcgaatggaaagttttgaagttccaagtgttgtgacatggatttttgttttaaggtatgataatgtttattttaaataaattcacaagtggatattaatggtaaaggttttacataattaaatgtttgttttcaacatggaaaatattttattgtaaagtaaatgtaaaatggcagtgacttttgacagccatgtcaaattttagttttggtacactgctaaaaataaataaggttaaaaattgtaaaaccatatatttgtttttattattcatttcttttttgagaatatgtttattctcggagtaagttttaaataaacattataaaatgtacacatctttatttctgtaacctctttatttaagaaaattattaacagatatctaatacaagtgaataagttttagaacagaagaaaatataatggcatagaagccaaatgatgataatttgtagcccactataaccccaatgaggaatctacgatgaatgtcccccagttgctttccagtaagtactcgatatgagaatttgaggatttttcaaacggcgtcccaatttgtttaaatagtaggaaagtcctcaagtctgtgtaagtatcctttgcttatttggttatgtagtttagtcttctttaaaccctcctacccctcccaacgaatctacgacctgccaccgcacaaaaaatgagctgccgttcgcatgaaggtttgcgtgtctgttccttctgctagccccatttcgactccccagtatctctatagatagtctttccttgatcccattagagcagacaggtaaaacgcttcaactggcacccaacgtgtgaggccgattcatttttctgcctccttcagtatccagttgttgtcttgtccagttgaacgcttcaactagcgccctgtacgtggggctcgatccatttttagcccccctgatcccattagcatgtgcccactaccatatccctttagcctcctttcggtctcatttgtactacaactgttaggcagtgcccgtccccttgggcagccgatctcagtttgtggtgcaggtgtttccgataacatggaagcttgacttttgtcatattttgtgtacgcccactgttacaagtctagcttgtagacatgttcaactagtagttagcctatctactagtccccaatgtctttagccaccccccacttagtgttacttgtaatacttgtaacgtacaccctgaagtttgacccgagtaaatatcgccccagtcttcccatgtagtttagcccagattcctcttgtcttgcccccagaaactgtttcatgtcttttagtgcccccgaaactgtttcagtctgttagtccccatgaaagagcccatttttgtagtttttgttgcagaatgttaataatttttccaaagaggtgtaagtatgtacacattttgttgtggtgttgatttggtcatgctgctgattgtataggcatgtaccatttcatacatcatagtgtatttacattgtaaccccatattatgtaaaccgtagtatactggtattgtattgtatgtatcgtacaagagaatagtatgtttaatattgtagcgtacttactatattgtattgatattgtacccatgatgaaagcattggttaaattttttggaaaatattgatgaattatatagacaaacagatgagtaaaaaataaagtataaaatttttttagaaaattttggtataagtaacgttaaaaattttttttaaaattttgctaaaagttacaattaaaatgtttagaatattgaatccacttatagagtataacaatatgttatatttttttgcatgtattcttgtagatcatcagttttttacagaataaacgttttttgtgattattgatttggtcgtttgagtagatgtgtgataatagttggtatggtccgtgtatgagctaattcggtatggtctgtgtgagtaagttccgtgattttccagcgaagcctatctatatttgggtatattattgccacaggttagttggagaagtcatccttgaagaagtaaccccatgaagaagtgaagagggaaactgaggcgaggcccctccacttattaatgaagaagtagacccc

SEQ ID NO: 799 - DNA, 4739 bp, Diabrotica virgifera
gactaatctatctttgtaggtgtcgaaaaggataccaatgattagttgaaaatggtttgagaagtgaagaaaaagtaaccccatgaaaaagtgaagagggaaaccgtggcgaggcccctccacttgttcataaaattgatgtatgttttcttgtatctggcatatcacaagtgtaatactcgtgatgaggaagtgttgttcagttgtctgggaatactcccattaatagtcggagcaagaacagttttatttgtgtaagctcatataagaaccaaatttcaatatttatttgtgtttgtaagcccatgtatatggagtatgactaagaaccaagtttcaatattttttgtgtttgtaagcccatgtatatggagtatgactaagaaccaagtttcgatattatttgtgtttgtaagcccatgtgtatggagaatgtataaatgccctatgagtcttttgttccctgtttgtttgtctatcccttttttgtctggaaattctagagtctgttatcccgtaatgtctgttagcccatgtccctgatggagtttgattttttttggcgaatagttcgttgacctctcttgtgtttgttcattgaaagtaggccaagagcagaagctgtgacaaggctggtgagcttaggatctggccgcgttgagtacaggtgaagcttgctttcggtggataaatggaagtggtcgttcgtcggaattgtcattctttccaatgtccctttggtctttcccttgtgtgtttgctttcatccctgttttgaaaaagtagtctaaccccagtttggaagagtgaagtctactcatgttttggaaaaataaagtctacccattgttttggaaaagtaagatctactcatgttttggaaaagtaagatcatatccccggttttgaaaaataaagaatatcccagtttgtgatttgaaaatgagaaagttgtcttgtgaactttcatgaaaggcttttatgtcctaggtaggactgttgattgaaaacgtaatgatgtagtatttcctatgtcatgtgttacgttcatttttttttggtcttgattaaatagtttgatatcccgtttgaatccagtatactagtttttttggtcttttgtatgttgtcacacgcgttccccccccttgttggtcttgtttgaatgagttgttgagatgtcatttttgacattttatctcaacgaggtatttagactgcattgtctaaatcctccttttgcagaaccgttgccgaatgtcccgtgaaactcgctaggtgtttagagtttaagcagatgcctatctgctgagccaagagctcagaaagattttttagtttttgaaaaccaatcctggttaggcaacgaggtgatgaggctgtgtctgccctgctatatggtatatattatatggtatatatagtatatatgtcacttgtgttactgcagtggatgtcagcgaggtccacacagggcacaagattatttctttcccaagacacagaaactcttgtcacctacagttctttgtagagtcaagaaacatttaagtctactcgactttaaagagtctggcgattgatggcacgctagcccactccctaacaatgatgttttgtttttgtttaatccccactagccattatttaaatatttttgtattgttgtcctgtcacacccaagaagtcaatgttggatttttgtagttatcgaaaactgaattggtaatccagtttcctctcttccgaggaggctattgtagcagatggatttctactacaatattttataaaaaatatccattaattttaatcctatcccaagaaaaatattaatttttctaatatattttgcgagtttatatatctttaaaatttcctaagccgctcctgttcgaaatatttcagaatattttcgcaacaaagtaaaatcataggaaagttcctatttatttgagtagcatttaccaactacgtagatagttattgtgaaatcattcattattcgagaatgaatcctctaaaaggtttggtgtttttcctttaagttttgagcgataaaaatcccatgttattattggtctgcattttgaaagatccttgagttgtagttgacgattggtcaatagttttggccgaacgatcgagaagaaatgcatcgtttggacgcgagagagacgtgacgatgtaaagttagttctaaaagtacatcacttcagtaaacatctttttgttagaactcaaccaacagactcgtagaaagtcgcactttgccggcaaaatggttttatttttatggtaaaagaagtgaaagactggcagtttgcccagtaaatgtcaacgaatataatgacaatagtttcacggcattttaatggatatattattgtgaaacagttctattgttatgcagttagatttgccggtggtataaaaaagaagtgcgtggtttcctggttcctgtcctttatgtagctgttgctatttttatgatgttttgatttgttcatgttccagtaagaaatgcccagatgatattatttggtatcgattttatccagttttgtaatgatttgaatatcttcccctcccagccccgtctgaatggaaaattttgaagttccaagtgttgtgacatggatttttgttttaacaaggtatgataatgtttattttaaataattcacaagtggatattattggtaaaggttttacataattaaaaatgtttgttttcaacatggaaaatatattatgtaaagtaaatattagatggcagtgacatttgacagccatgtcaaatttttgttttggtacactgctaaaaataaggttaaaaattgtaaaatcatgtattttgttattattattcatttctggtttgagaatgtgtctattctcaataaaaataaaaaggtattaaggtttaaataaacattataaaatgtacacatctttatttctgtaacctctttatttaagaaaattattaacagatatctaatacaagtgaataagttttagaacagaagaaaatataatggcatagaagccaaatgatgataatttgtagcccactataaccccaatgaggaatctacgatgaatgtcccccagttgctttccagtaagtactcgatatgagaatttgaggatttttcaaacggcgtcccaatttgtttaaatagtaggaaagtcctcaagtctgtgtaagtatcctttgcttatttggttatgtagtttagtcttctttaaaccctcctacccctcccaacgaatctacgacctgccaccgcacaaaaaatgagctgccgttcgcatgaaggtttgcgtgtctgttccttctgctagccccatttcgactccccagtatctctatagatagtctttccttgatcccattagagcagacaggtaaaacgcttcaactggcacccaacgtgtgaggccgattcatttttctgcctccttcagtatccagttgttgtcttgtccagttgaacgcttcaactgtcgccctagaacgtggggcatgtcttttttgcctccctcagaccccatttgcatgttcccactaccatgtccttttagcctcctttcggtctcatttgtactacaactgttaggcagtgcccgtccccttgggcagccgatctcagtttgtggtgcaggtgtttccgataacatggaagcttgacttttgtcatattttgtgtacgcccactgttacaagtctagcttgtagacatgttcaactagtagttagcctatctactagtccccaatgtctttagccaccccccacttagtgttacttgtaatacttgtaacgtacaccctgaagtttgacccgagtaaatatcgccccagtcttcccatgtagtttagcccagattcctcttgtcttgcccccagaaactgtttcatgtcttttagtgcccccgaaactgtttcagtctgttagtccccatgaaagagcccatttttgtagtttttgttgcagaatgttaataatttttccaaagaggtgtaagtatgtacacattttgttgtggtgttgatttggtcatgctgctgattgtataggcatgtaccatttcatacatcatagtgtatttacattgtaaccccatattatgtaaaccgtagtatactggtattgtattgtatgtatcgtacaagagaatagtatgtttaatattgtagcgtacttactatattgtattgatattgtacccatgatgaaagcattggttaaattttttggaaaatattgatgaattatatagacaaacagatgagtaaaaaataaagtataaaatttttttagaaaattttggtataagtaacgttaaaaattttttttaaaattttgctaaaagttacaattaaaatgtttagaatattgaatccacttatagagtataacaatatgttatatttttttgcatgtattcttgtagatcatcagttttttacagaataaacgttttttgtgattattgatttggtcgtttgagtagatgtgtgataatagttggtatggtccgtgtatgagctaattcggtatggtctgtgtgagtaagttccgtgattttccagcgaagcctatctatatttgggtatattattgccacaggttagttggagaagtcatccttgaagaagtaaccccatgaagaagtgaagagggaaactgaggcgaggcccctccacttattaatgaagaagtagacccc

SEQ ID NO: 800 - DNA, 4663 bp, Diabrotica virgifera
gactaatctatctttgtaggtgtcgaaaaggataccaatgattagttgaaaatggtttgagaagtgaagaaaaagtaaccccatgaaaaagtgaagagggaaaccgtggcgaggcccctccacttgttcataaaattgatgtatgttttcttgtatctggcatatcacaagtgtaatactcgtgatgaggaagtgttgttcagttgtctgggaatactcccattaatagtcggagcaagaacagttttatttgtgtaagctcatataagaaccaaatttcaatatttatttgtgtttgtaagcccatgtatatggagtatgactaagaaccaagtttcaatattttttgtgtttgtaagcccatgtatatggagtatgactaagaaccaagtttcgatattatttgtgtttgtaagcccatgtgtatggagaatgtataaatgccctatgagtcttttgttccctgtttgtttgtctatcccttttttgtctggaaattctagagtctgttatcccgtaatgtctgttagcccatgtccctgatggagtttgattttttttggcgaatagttcgttgacctctcttgtgtttgttcattgaaagtaggccaagagcagaagctgtgacaaggctggtgagcttaggatctggccgcgttgagtacaggtgaagcttgctttcggtggataaatggaagtggtcgttcgtcggaattgtcattctttccaatgtccctttggtctttcccttgtgtgtttgctttcatccctgttttgaaaaagtagtctaaccccagtttggaagagtgaagtctactcatgttttggaaaaataaagtctacccattgttttggaaaagtaagatctactcatgttttggaaaagtaagatcatatccccggttttgaaaaataaagaatatcccagtttgtgatttgaaaatgagaaagttgtcttgtgaactttcatgaaaggcttttatgtcctaggtaggactgttgattgaaaacgtaatgatgtagtatttcctatgtcatgtgttacgttcatttttttttggtcttgattaaatagtttgatatcccgtttgaatccagtatactagtttttttggtcttttgtatgttgtcacacgcgttccccccccttgttggtcttgtttgaatgagttgttgagatgtcatttttgacattttatctcaacgaggtatttagactgcattgtctaaatcctccttttgcagaaccgttgccgaatgtcccgtgaaactcgctaggtgtttagagtttaagcagatgcctatctgctgagccaagagctcagaaagattttttagtttttgaaaaccaatcctggttaggcaacgaggtgatgaggctgtgtctgccctgctatatggtatatattatatggtatatatagtatatatgtcacttgtgttactgcagtggatgtcagcgaggtccacacagggcacaagattatttctttcccaagacacagaaactcttgtcacctacagttctttgtagagtcaagaaacatttaagtctactcgactttaaagagtctggcgattgatggcacgctagcccactccctaacaatgatgttttgtttttgtttaatccccactagccattatttaaatatttttgtattgttgtcctgtcacacccaagaagtcaatgttggatttttgtagttatcgaaaactgaattggtaatccagtttcctctcttccgaggaggctattgtagcagatggatttctactacaatattttataaaaaatatccattaattttaatcctatcccaagaaaaatattaatttttctaatatattttgcgagtttatatatctttaaaatttcctaagccgctcctgttcgcattgtaaaggttaggaaatttcctatttatttgtgtagcaataaccaactacgtagattgttattgaaaacatccattattcgagaatgaatcctctaaaaggttcagtgtttttcctttaagttttgagcgctaaaaatcccatgttattattggtctgcattttgaaagatccttgagttgtagttgacgattggtcaatagttttggccgaacgatcgagaagaaatgcatcgtttggacgcgagagagacgtgacgatgtaaagttagttctaaaagtacatcagctctgtaagcatctttttgttagaactcaaaaagtcgcactttgccggccaaaatggttttcttcttatagtaaaagaactaatggatttctaacatgtcaaggaatataatgacaatagtttcacggcattttaatggatatattattgtgaaacagttctattgttatgcagtttgatttgccggtaaaagaagtgcgtggtttcctggttcctgtcctttatgtagctgttgctatttttatgatgttttgatttgttcatgttccagtaagaaatgcccagatgatattatttggtatcgattttatccagttttgtaatgatttgaatatcttccctccctccaatctcgaatggaaagttttgaagttccaagtgttgtgacatggatttttgttttaaggtatgataatgtttattttaaataaattcacaagtggatattaatggtaaaggttttacataattaaatgtttgttttcaacatggaaaatattttattgtaaagtaaatgtaaaatggcagtgacttttgacagccatgtcaaattttagttttggtacactgctaaaaataaataaggttaaaaattgtaaaaccatatatttgtttttattattcatttcttttttgagaatatgtttattctcggagtaagttttaaataaacattataaaatgtacacatctttatttctgtaacctctttatttaagaaaattattaacagatatctaatacaagtgaataagttttagaacagaagaaaatataatggcatagaagccaaatgatgataatttgtagcccactataaccccaatgaggaatctacgatgaatgtcccccagttgctttccagtaagtactcgatatgagaatttgaggatttttcaaacggcgtcccaatttgtttaaatagtaggaaagtcctcaagtctgtgtaagtatcctttgcttatttggttatgtagtttagtcttctttaaaccctcctacccctcccaacgaatctacgacctgccaccgcacaaaaaatgagctgccgttcgcatgaaggtttgcgtgtctgttccttctgctagccccatttcgactccccagtatctctatagatagtctttccttgatcccattagagcagacaggtaaaacgcttcaactggcacccaacgtgtgaggccgattcatttttctgcctccttcagtatccagttgttgtcttgtccagttgaacgcttcaactgtcgccctagaacgtggggcatgtcttttttgcctccctcagaccccatttgcatgttcccactaccatgtccttttagcctcctttcggtctcatttgtactacaactgttaggcagtgcccgtccccttgggcagccgatctcagtttgtggtgcaggtgtttccgataacatggaagcttgacttttgtcatattttgtgtacgcccactgttacaagtctagcttgtagacatgttcaactagtagttagcctatctactagtccccaatgtctttagccaccccccacttagtgttacttgtaatacttgtaacgtacaccctgaagtttgacccgagtaaatatcgccccagtcttcccatgtagtttagcccagattcctcttgtcttgcccccagaaactgtttcatgtcttttagtgcccccgaaactgtttcagtctgttagtccccatgaaagagcccatttttgtagtttttgttgcagaatgttaataatttttccaaagaggtgtaagtatgtacacattttgttgtggtgttgatttggtcatgctgctgattgtataggcatgtaccatttcatacatcatagtgtatttacattgtaaccccatattatgtaaaccgtagtatactggtattgtattgtatgtatcgtacaagagaatagtatgtttaatattgtagcgtacttactatattgtattgatattgtacccatgatgaaagcattggttaaattttttggaaaatattgatgaattatatagacaaacagatgagtaaaaaataaagtataaaatttttttagaaaattttggtataagtaacgttaaaaattttttttaaaattttgctaaaagttacaattaaaatgtttagaatattgaatccacttatagagtataacaatatgttatatttttttgcatgtattcttgtagatcatcagttttttacagaataaacgttttttgtgattattgatttggtcgtttgagtagatgtgtgataatagttggtatggtccgtgtatgagctaattcggtatggtctgtgtgagtaagttccgtgattttccagcgaagcctatctatatttgggtatattattgccacaggttagttggagaagtcatccttgaagaagtaaccccatgaagaagtgaagagggaaactgaggcgaggcccctccacttattaatgaagaagtagacccc

SEQ ID NO: 801 - DNA, 4658 bp, Diabrotica virgifera
gactaatctatctttgtaggtgtcgaaaaggataccaatgattagttgaaaatggtttgagaagtgaagaaaaagtaaccccatgaaaaagtgaagagggaaaccgtggcgaggcccctccacttgttcataaaattgatgtatgttttcttgtatctggcatatcacaagtgtaatactcgtgatgaggaagtgttgttcagttgtctgggaatactcccattaatagtcggagcaagaacagttttatttgtgtaagctcatataagaaccaaatttcaatatttatttgtgtttgtaagcccatgtatatggagtatgactaagaaccaagtttcaatattttttgtgtttgtaagcccatgtatatggagtatgactaagaaccaagtttcgatattatttgtgtttgtaagcccatgtgtatggagaatgtataaatgccctatgagtcttttgttccctgtttgtttgtctatcccttttttgtctggaaattctagagtctgttatcccgtaatgtctgttagcccatgtccctgatggagtttgattttttttggcgaatagttcgttgacctctcttgtgtttgttcattgaaagtaggccaagagcagaagctgtgacaaggctggtgagcttaggatctggccgcgttgagtacaggtgaagcttgctttcggtggataaatggaagtggtcgttcgtcggaattgtcattctttccaatgtccctttggtctttcccttgtgtgtttgctttcatccctgttttgaaaaagtagtctaaccccagtttggaagagtgaagtctactcatgttttggaaaaataaagtctacccattgttttggaaaagtaagatctactcatgttttggaaaagtaagatcatatccccggttttgaaaaataaagaatatcccagtttgtgatttgaaaatgagaaagttgtcttgtgaactttcatgaaaggcttttatgtcctaggtaggactgttgattgaaaacgtaatgatgtagtatttcctatgtcatgtgttacgttcatttttttttggtcttgattaaatagtttgatatcccgtttgaatccagtatactagtttttttggtcttttgtatgttgtcacacgcgttccccccccttgttggtcttgtttgaatgagttgttgagatgtcatttttgacattttatctcaacgaggtatttagactgcattgtctaaatcctccttttgcagaaccgttgccgaatgtcccgtgaaactcgctaggtgtttagagtttaagcagatgcctatctgctgagccaagagctcagaaagattttttagtttttgaaaaccaatcctggttaggcaacgaggtgatgaggctgtgtctgccctgctatatggtatatattatatggtatatatagtatatatgtcacttgtgttactgcagtggatgtcagcgaggtccacacagggcacaagattatttctttcccaagacacagaaactcttgtcacctacagttctttgtagagtcaagaaacatttaagtctactcgactttaaagagtctggcgattgatggcacgctagcccactccctaacaatgatgttttgtttttgtttaatccccactagccattatttaaatatttttgtattgttgtcctgtcacacccaagaagtcaatgttggatttttgtagttatcgaaaactgaattggtaatccagtttcctctcttccgaggaggctattgtagcagatggatttctactacaatattttataaaaaatatccattaattttaatcctatcccaagaaaaatattaatttttctaatatattttgcgagtttatatatctttaaaatttcctaagccgctcctgttcgcattgtaaaggttaggaaatttcctatttatttgtgtagcaataaccaactacgtagattgttattgaaaacatccattattcgagaatgaatcctctaaaaggttcagtgtttttcctttaagttttgagcgctaaaaatcccatgttattattggtctgcattttgaaagatccttgagttgtagttgacgattggtcaatagttttggccgaacgatcgagaagaaatgcatcgtttggacgcgagagagacgtgacgatgtaaagttagttctaaaagtacatcagctctgtaagcatctttttgttagaactcaaaaagtcgcactttgccggccaaaatggttttcttcttatagtaaaagaactaatggatttctaacatgtcaaggaatataatgacaatagtttcacggcattttaatggatatattattgtgaaacagttctattgttatgcagtttgatttgccggtaaaagaagtgcgtggtttcctggttcctgtcctttatgtagctgttgctatttttatgatgttttgatttgttcatgttccagtaagaaatgcccagatgatattatttggtatcgattttatccagttttgtaatgatttgaatatcttccctccctccaatctcgaatggaaagttttgaagttccaagtgttgtgacatggatttttgttttaaggtatgataatgtttattttaaataaattcacaagtggatattaatggtaaaggttttacataattaaatgtttgttttcaacatggaaaatattttattgtaaagtaaatgtaaaatggcagtgacttttgacagccatgtcaaattttagttttggtacactgctaaaaataaataaggttaaaaattgtaaaaccatatatttgtttttattattcatttcttttttgagaatatgtttattctcggagtaagttttaaataaacattataaaatgtacacatctttatttctgtaacctctttatttaagaaaattattaacagatatctaatacaagtgaataagttttagaacagaagaaaatataatggcatagaagccaaatgatgataatttgtagcccactataaccccaatgaggaatctacgatgaatgtcccccagttgctttccagtaagtactcgatatgagaatttgaggatttttcaaacggcgtcccaatttgtttaaatagtaggaaagtcctcaagtctgtgtaagtatcctttgcttatttggttatgtagtttagtcttctttaaaccctcctacccctcccaacgaatctacgacctgccaccgcacaaaaaatgagctgccgttcgcatgaaggtttgcgtgtctgttccttctgctagccccatttcgactccccagtatctctatagatagtctttccttgatcccattagagcagacaggtaaaacgcttcaactggcacccaacgtgtgaggccgattcatttttctgcctccttcagtatccagttgttgtcttgtccagttgaacgcttcaactagcgccctgtacgtggggctcgatccatttttagcccccctgatcccattagcatgtgcccactaccatatccctttagcctcctttcggtctcatttgtactacaactgttaggcagtgcccgtcttgggtagccgatctcagtttgtggtgcaagtgtttccgataacatggaagctcgactcgtgtcatgttttgtatgcccattgttacaagtctagcttgtagacatgttcaactagtagttagcctatctactagtccccaatgtctttagccaccccccacttagtgttacttgtaatacttgtaacgtacaccctgaagtttgacccgagtaaatatcgccccagtcttcccatgtagtttagcccagattcctcttgtcttgcccccagaaactgtttcatgtcttttagtgcccccgaaactgtttcagtctgttagtccccatgaaagagcccatttttgtagtttttgttgcagaatgttaataatttttccaaagaggtgtaagtatgtacacattttgttgtggtgttgatttggtcatgctgctgattgtataggcatgtaccatttcatacatcatagtgtatttacattgtaaccccatattatgtaaaccgtagtatactggtattgtattgtatgtatcgtacaagagaatagtatgtttaatattgtagcgtacttactatattgtattgatattgtacccatgatgaaagcattggttaaattttttggaaaatattgatgaattatatagacaaacagatgagtaaaaaataaagtataaaatttttttagaaaattttggtataagtaacgttaaaaattttttttaaaattttgctaaaagttacaattaaaatgtttagaatattgaatccacttatagagtataacaatatgttatatttttttgcatgtattcttgtagatcatcagttttttacagaataaacgttttttgtgattattgatttggtcgtttgagtagatgtgtgataatagttggtatggtccgtgtatgagctaattcggtatggtctgtgtgagtaagttccgtgattttccagcgaagcctatctatatttgggtatattattgccacaggttagttggagaagtcatccttgaagaagtaaccccatgaagaagtgaagagggaaactgaggcgaggcccctccacttattaatgaagaagtagacccc

SEQ ID NO: 802 - DNA, 4663 bp, Diabrotica virgifera
gactaatctatctttgtaggtgtcgaaaaggataccaatgattagttgaaaatggtttgagaagtgaagaaaaagtaaccccatgaaaaagtgaagagggaaaccgtggcgaggcccctccacttgttcataaaattgatgtatgttttcttgtatctggcatatcacaagtgtaatactcgtgatgaggaagtgttgttcagttgtctgggaatactcccattaatagtcggagcaagaacagttttatttgtgtaagctcatataagaaccaaatttcaatatttatttgtgtttgtaagcccatgtatatggagtatgactaagaaccaagtttcaatattttttgtgtttgtaagcccatgtatatggagtatgactaagaaccaagtttcgatattatttgtgtttgtaagcccatgtgtatggagaatgtataaatgccctatgagtcttttgttccctgtttgtttgtctatcccttttttgtctggaaattctagagtctgttatcccgtaatgtctgttagcccatgtccctgatggagtttgattttttttggcgaatagttcgttgacctctcttgtgtttgttcattgaaagtaggccaagagcagaagctgtgacaaggctggtgagcttaggatctggccgcgttgagtacaggtgaagcttgctttcggtggataaatggaagtggtcgttcgtcggaattgtcattctttccaatgtccctttggtctttcccttgtgtgtttgctttcatccctgttttgaaaaagtagtctaaccccagtttggaagagtgaagtctactcatgttttggaaaaataaagtctacccattgttttggaaaagtaagatctactcatgttttggaaaagtaagatcatatccccggttttgaaaaataaagaatatcccagtttgtgatttgaaaatgagaaagttgtcttgtgaactttcatgaaaggcttttatgtcctaggtaggactgttgattgaaaacgtaatgatgtagtatttcctatgtcatgtgttacgttcatttttttttggtcttgattaaatagtttgatatcccgtttgaatccagtatactagtttttttggtcttttgtatgttgtcacacgcgttccccccccttgttggtcttgtttgaatgagttgttgagatgtcatttttgacattttatctcaacgaggtatttagactgcattgtctaaatcctccttttgcagaaccgttgccgaatgtcccgtgaaactcgctaggtgtttagagtttaagcagatgcctatctgctgagccaagagctcagaaagattttttagtttttgaaaaccaatcctggttaggcaacgaggtgatgaggctgtgtctgccctgctatatggtatatattatatggtatatatagtatatatgtcacttgtgttactgcagtggatgtcagcgaggtccacacagggcacaagattatttctttcccaagacacagaaactcttgtcacctacagttctttgtagagtcaagaaacatttaagtctactcgactttaaagagtctggcgattgatggcacgctagcccactccctaacaatgatgttttgtttttgtttaatccccactagccattatttaaatatttttgtattgttgtcctgtcacacccaagaagtcaatgttggatttttgtagttatcgaaaactgaattggtaatccagtttcctctcttccgaggaggctattgtagcagatggatttctactacaatattttataaaaaatatccattaattttaatcctatcccaagaaaaatattaatttttctaatatattttgcgagtttatatatctttaaaatttcctaagccgctcctgttcgcattgtaaaggttaggaaatttcctatttatttgtgtagcaataaccaactacgtagattgttattgaaaacatccattattcgagaatgaatcctctaaaaggttcagtgtttttcctttaagttttgagcgctaaaaatcccatgttattattggtctgcattttgaaagatccttgagttgtagttgacgattggtcaatagttttggccgaacgatcgagaagaaatgcatcgtttggacgcgagagagacgtgacgatgtaaagttagttctaaaagtacatcagctctgtaagcatctttttgttagaactcaaaaagtcgcactttgccggccaaaatggttttcttcttatagtaaaagaactaatggatttctaacatgtcaaggaatataatgacaatagtttcacggcattttaatggatatattattgtgaaacagttctattgttatgcagtttgatttgccggtaaaagaagtgcgtggtttcctggttcctgtcctttatgtagctgttgctatttttatgatgttttgatttgttcatgttccagtaagaaatgcccagatgatattatttggtatcgattttatccagttttgtaatgatttgaatatcttccctccctccaatctcgaatggaaagttttgaagttccaagtgttgtgacatggatttttgttttaaggtatgataatgtttattttaaataaattcacaagtggatattaatggtaaaggttttacataattaaatgtttgttttcaacatggaaaatattttattgtaaagtaaatgtaaaatggcagtgacttttgacagccatgtcaaattttagttttggtacactgctaaaaataaataaggttaaaaattgtaaaaccatatatttgtttttattattcatttcttttttgagaatatgtttattctcggagtaagttttaaataaacattataaaatgtacacatctttatttctgtaacctctttatttaagaaaattattaacagatatctaatacaagtgaataagttttagaacagaagaaaatataatggcatagaagccaaatgatgataatttgtagcccactataaccccaatgaggaatctacgatgaatgtcccccagttgctttccagtaagtactcgatatgagaatttgaggatttttcaaacggcgtcccaatttgtttaaatagtaggaaagtcctcaagtctgtgtaagtatcctttgcttatttggttatgtagtttagtcttctttaaaccctcctacccctcccaacgaatctacgacctgccaccgcacaaaaaatgagctgccgttcgcatgaaggtttgcgtgtctgttccttctgctagccccatttcgactccccagtatctctatagatagtctttccttgatcccattagagcagacaggtaaaacgcttcaactggcacccaacgtgtgaggccgattcatttttctgcctccttcagtatccagttgttgtcttgtccagttgaacgcttcaactagcgccctgtacgtggggctcgatccatttttagcccccctgatcccattagcatgtgcccactaccatatccctttagcctcctttcggtctcatttgtactacaactgttaggcagtgcccgtccccttgggcagccgatctcagtttgtggtgcaggtgtttccgataacatggaagcttgacttttgtcatattttgtgtacgcccactgttacaagtctagcttgtagacatgttcaactagtagttagcctatctactagtccccaatgtctttagccaccccccacttagtgttacttgtaatacttgtaacgtacaccctgaagtttgacccgagtaaatatcgccccagtcttcccatgtagtttagcccagattcctcttgtcttgcccccagaaactgtttcatgtcttttagtgcccccgaaactgtttcagtctgttagtccccatgaaagagcccatttttgtagtttttgttgcagaatgttaataatttttccaaagaggtgtaagtatgtacacattttgttgtggtgttgatttggtcatgctgctgattgtataggcatgtaccatttcatacatcatagtgtatttacattgtaaccccatattatgtaaaccgtagtatactggtattgtattgtatgtatcgtacaagagaatagtatgtttaatattgtagcgtacttactatattgtattgatattgtacccatgatgaaagcattggttaaattttttggaaaatattgatgaattatatagacaaacagatgagtaaaaaataaagtataaaatttttttagaaaattttggtataagtaacgttaaaaattttttttaaaattttgctaaaagttacaattaaaatgtttagaatattgaatccacttatagagtataacaatatgttatatttttttgcatgtattcttgtagatcatcagttttttacagaataaacgttttttgtgattattgatttggtcgtttgagtagatgtgtgataatagttggtatggtccgtgtatgagctaattcggtatggtctgtgtgagtaagttccgtgattttccagcgaagcctatctatatttgggtatattattgccacaggttagttggagaagtcatccttgaagaagtaaccccatgaagaagtgaagagggaaactgaggcgaggcccctccacttattaatgaagaagtagacccc

SEQ ID NO: 803 - DNA, 2881 bp, Diabrotica virgifera
gactaatctatctttgtaggtgtcgaaaaggataccaatgattagttgaaaatggtttgagaagtgaagaaaaagtaaccccatgaaaaagtgaagagggaaaccgtggcgaggcccctccacttgttcataaaattgatgtatgttttcttgtatctggcatatcacaagtgtaatactcgtgatgaggaagtgttgttcagttgtctgggaatactcccattaatagtcggagcaagaacagttttatttgtgtaagctcatataagaaccaaatttcaatatttatttgtgtttgtaagcccatgtatatggagtatgactaagaaccaagtttcaatattttttgtgtttgtaagcccatgtatatggagtatgactaagaaccaagtttcgatattatttgtgtttgtaagcccatgtgtatggagaatgtataaatgccctatgagtcttttgttccctgtttgtttgtctatcccttttttgtctggaaattctagagtctgttatcccgtaatgtctgttagcccatgtccctgatggagtttgattttttttggcgaatagttcgttgacctctcttgtgtttgttcattgaaagtaggccaagagcagaagctgtgacaaggctggtgagcttaggatctggccgcgttgagtacaggtgaagcttgctttcggtggataaatggaagtggtcgttcgtcggaattgtcattctttccaatgtccctttggtctttcccttgtgtgtttgctttcatccctgttttgaaaaagtagtctaaccccagtttggaagagtgaagtctactcatgttttggaaaaataaagtctacccattgttttggaaaagtaagatctactcatgttttggaaaagtaagatcatatccccggttttgaaaaataaagaatatcccagtttgtgatttgaaaatgagaaagttgtcttgtgaactttcatgaaaggcttttatgtcctaggtaggactgttgattgaaaacgtaatgatgtagtatttcctatgtcatgtgttacgttcatttttttttggtcttgattaaatagtttgatatcccgtttgaatccagtatactagtttttttggtcttttgtatgttgtcacacgcgttccccccccttgttggtcttgtttgaatgagttgttgagatgtcatttttgacattttatctcaacgaggtatttagactgcattgtctaaatcctccttttgcagaaccgttgccgaatgtcccgtgaaactcgctaggtgtttagagtttaagcagatgcctatctgctgagccaagagctcagaaagattttttagtttttgaaaaccaatcctggttaggcaacgaggtgatgaggctgtgtctgccctgctatatggtatatattatatggtatatatagtatatatgtcacttgtgttactgcagtggatgtcagcgaggtccacacagggcacaagattatttctttcccaagacacagaaactcttgtcacctacagttctttgtagagtcaagaaacatttaagtctactcgactttaaagagtctggcgattgatggcacgctagcccactccctaacaatgatgttttgtttttgtttaatccccactagccattatttaaatatttttgtattgttgtcctgtcacacccaagaagtcaatgttggatttttgtagttatcgaaaactgaattggtaatccagtttcctctcttccgaggaggctattgtagcagatggatttctactacaatattttataaaaaatatccattaattttaatcctatcccaagaaaaatattaatttttctaatatattttgcgagtttatatatctttaaaatttcctaagccgctcctgttcgaaatatttcagaatattttcgcaacaaagtaaaatcataggaaagttcctatttatttgagtagcatttaccaactacgtagatagttattgtgaaatcattcattattcgagaatgaatcctctaaaaggtttggtgtttttcctttaagttttgagcgataaaaatcccatgttattattggtctgcattttgaaagatccttgagttgtagttgacgattggtcaatagttttggccgaacgatcgagaagaaatgcatcgtttggacgcgagagagacgtgacgatgtaaagttagttctaaaagtacatcacttcagtaaacatctttttgttagaactcaaccaacagactcgtagaaagtcgcactttgccggcaaaatggttttatttttatggtaaaagaagtgaaagactggcagtttgcccagtaaatgtcaacgaatataatgacaatagtttcacggcattttaatggatatattattgtgaaacagttctattgttatgcagttagatttgccggtggtataaaaaagaagtgcgtggtttcctggttcctgtcctttatgtagctgttgctatttttatgatgttttgatttgttcatgttccagtaagaaatgcccagatgatattatttggtatcgattttatccagttttgtaatgatttgaatatcttcccctcccagccccgtctgaatggaaaattttgaagttccaagtgttgtgacatggatttttgttttaacaagagtcctagaccaataggtgaatttgtggttatagtaagatgtccccaaagggaagtgccatcattaccgctatgatattaatttgacaattgatagatttatggtttagctatggagactattatgtttgagactatggagactattatatggttctggcatgaccactactaggttaacaagcagtaacataccttcaagataggcgatgggtagttttaagt

SEQ ID NO: 804 - DNA, 2854 bp, Diabrotica virgifera
gactaatctatctttgtaggtgtcgaaaaggataccaatgattagttgaaaatggtttgagaagtgaagaaaaagtaaccccatgaaaaagtgaagagggaaaccgtggcgaggcccctccacttgttcataaaattgatgtatgttttcttgtatctggcatatcacaagtgtaatactcgtgatgaggaagtgttgttcagttgtctgggaatactcccattaatagtcggagcaagaacagttttatttgtgtaagctcatataagaaccaaatttcaatatttatttgtgtttgtaagcccatgtatatggagtatgactaagaaccaagtttcaatattttttgtgtttgtaagcccatgtatatggagtatgactaagaaccaagtttcgatattatttgtgtttgtaagcccatgtgtatggagaatgtataaatgccctatgagtcttttgttccctgtttgtttgtctatcccttttttgtctggaaattctagagtctgttatcccgtaatgtctgttagcccatgtccctgatggagtttgattttttttggcgaatagttcgttgacctctcttgtgtttgttcattgaaagtaggccaagagcagaagctgtgacaaggctggtgagcttaggatctggccgcgttgagtacaggtgaagcttgctttcggtggataaatggaagtggtcgttcgtcggaattgtcattctttccaatgtccctttggtctttcccttgtgtgtttgctttcatccctgttttgaaaaagtagtctaaccccagtttggaagagtgaagtctactcatgttttggaaaaataaagtctacccattgttttggaaaagtaagatctactcatgttttggaaaagtaagatcatatccccggttttgaaaaataaagaatatcccagtttgtgatttgaaaatgagaaagttgtcttgtgaactttcatgaaaggcttttatgtcctaggtaggactgttgattgaaaacgtaatgatgtagtatttcctatgtcatgtgttacgttcatttttttttggtcttgattaaatagtttgatatcccgtttgaatccagtatactagtttttttggtcttttgtatgttgtcacacgcgttccccccccttgttggtcttgtttgaatgagttgttgagatgtcatttttgacattttatctcaacgaggtatttagactgcattgtctaaatcctccttttgcagaaccgttgccgaatgtcccgtgaaactcgctaggtgtttagagtttaagcagatgcctatctgctgagccaagagctcagaaagattttttagtttttgaaaaccaatcctggttaggcaacgaggtgatgaggctgtgtctgccctgctatatggtatatattatatggtatatatagtatatatgtcacttgtgttactgcagtggatgtcagcgaggtccacacagggcacaagattatttctttcccaagacacagaaactcttgtcacctacagttctttgtagagtcaagaaacatttaagtctactcgactttaaagagtctggcgattgatggcacgctagcccactccctaacaatgatgttttgtttttgtttaatccccactagccattatttaaatatttttgtattgttgtcctgtcacacccaagaagtcaatgttggatttttgtagttatcgaaaactgaattggtaatccagtttcctctcttccgaggaggctattgtagcagatggatttctactacaatattttataaaaaatatccattaattttaatcctatcccaagaaaaatattaatttttctaatatattttgcgagtttatatatctttaaaatttcctaagccgctcctgttcgcattgtaaaggttaggaaatttcctatttatttgtgtagcaataaccaactacgtagattgttattgaaaacatccattattcgagaatgaatcctctaaaaggttcagtgtttttcctttaagttttgagcgctaaaaatcccatgttattattggtctgcattttgaaagatccttgagttgtagttgacgattggtcaatagttttggccgaacgatcgagaagaaatgcatcgtttggacgcgagagagacgtgacgatgtaaagttagttctaaaagtacatcacttcagtaaacatctttttgttagaactcaaccaacagactcgtagaaagtcgcactttgccggcaaaatggttttatttttatggtaaaagaagtgaaagactggcagtttgcccagtaaatgtcaacgaatataatgacaatagtttcacggcattttaatggatatattattgtgaaacagttctattgttatgcagttagatttgccggtggtataaaaaagaagtgcgtggtttcctggttcctgtcctttatgtagctgttgctatttttatgatgttttgatttgttcatgttccagtaagaaatgcccagatgatattatttggtatcgattttatccagttttgtaatgatttgaatatcttcccctcccagccccgtctgaatggaaaattttgaagttccaagtgttgtgacatggatttttgttttaacaagagtcctagaccaataggtgaatttgtggttatagtaagatgtccccaaagggaagtgccatcattaccgctatgatattaatttgacaattgatagatttatggtttagctatggagactattatgtttgagactatggagactattatatggttctggcatgaccactactaggttaacaagcagtaacataccttcaagataggcgatgggtagttttaagt

SEQ ID NO: 805 - DNA, 2849 bp, Diabrotica virgifera
gactaatctatctttgtaggtgtcgaaaaggataccaatgattagttgaaaatggtttgagaagtgaagaaaaagtaaccccatgaaaaagtgaagagggaaaccgtggcgaggcccctccacttgttcataaaattgatgtatgttttcttgtatctggcatatcacaagtgtaatactcgtgatgaggaagtgttgttcagttgtctgggaatactcccattaatagtcggagcaagaacagttttatttgtgtaagctcatataagaaccaaatttcaatatttatttgtgtttgtaagcccatgtatatggagtatgactaagaaccaagtttcaatattttttgtgtttgtaagcccatgtatatggagtatgactaagaaccaagtttcgatattatttgtgtttgtaagcccatgtgtatggagaatgtataaatgccctatgagtcttttgttccctgtttgtttgtctatcccttttttgtctggaaattctagagtctgttatcccgtaatgtctgttagcccatgtccctgatggagtttgattttttttggcgaatagttcgttgacctctcttgtgtttgttcattgaaagtaggccaagagcagaagctgtgacaaggctggtgagcttaggatctggccgcgttgagtacaggtgaagcttgctttcggtggataaatggaagtggtcgttcgtcggaattgtcattctttccaatgtccctttggtctttcccttgtgtgtttgctttcatccctgttttgaaaaagtagtctaaccccagtttggaagagtgaagtctactcatgttttggaaaaataaagtctacccattgttttggaaaagtaagatctactcatgttttggaaaagtaagatcatatccccggttttgaaaaataaagaatatcccagtttgtgatttgaaaatgagaaagttgtcttgtgaactttcatgaaaggcttttatgtcctaggtaggactgttgattgaaaacgtaatgatgtagtatttcctatgtcatgtgttacgttcatttttttttggtcttgattaaatagtttgatatcccgtttgaatccagtatactagtttttttggtcttttgtatgttgtcacacgcgttccccccccttgttggtcttgtttgaatgagttgttgagatgtcatttttgacattttatctcaacgaggtatttagactgcattgtctaaatcctccttttgcagaaccgttgccgaatgtcccgtgaaactcgctaggtgtttagagtttaagcagatgcctatctgctgagccaagagctcagaaagattttttagtttttgaaaaccaatcctggttaggcaacgaggtgatgaggctgtgtctgccctgctatatggtatatattatatggtatatatagtatatatgtcacttgtgttactgcagtggatgtcagcgaggtccacacagggcacaagattatttctttcccaagacacagaaactcttgtcacctacagttctttgtagagtcaagaaacatttaagtctactcgactttaaagagtctggcgattgatggcacgctagcccactccctaacaatgatgttttgtttttgtttaatccccactagccattatttaaatatttttgtattgttgtcctgtcacacccaagaagtcaatgttggatttttgtagttatcgaaaactgaattggtaatccagtttcctctcttccgaggaggctattgtagcagatggatttctactacaatattttataaaaaatatccattaattttaatcctatcccaagaaaaatattaatttttctaatatattttgcgagtttatatatctttaaaatttcctaagccgctcctgttcgaaatatttcagaatattttcgcaacaaagtaaaatcataggaaagttcctatttatttgagtagcatttaccaactacgtagatagttattgtgaaatcattcattattcgagaatgaatcctctaaaaggtttggtgtttttcctttaagttttgagcgataaaaatcccatgttattattggtctgcattttgaaagatccttgagttgtagttgacgattggtcaatagttttggccgaacgatcgagaagaaatgcatcgtttggacgcgagagagacgtgacgatgtaaagttagttctaaaagtacatcagctctgtaagcatctttttgttagaactcaaaaagtcgcactttgccggccaaaatggttttcttcttatagtaaaagaactaatggatttctaacatgtcaaggaatataatgacaatagtttcacggcattttaatggatatattattgtgaaacagttctattgttatgcagtttgatttgccggtaaaagaagtgcgtggtttcctggttcctgtcctttatgtagctgttgctatttttatgatgttttgatttgttcatgttccagtaagaaatgcccagatgatattatttggtatcgattttatccagttttgtaatgatttgaatatcttcccctcccagccccgtctgaatggaaaattttgaagttccaagtgttgtgacatggatttttgttttaacaagagtcctagaccaataggtgaatttgtggttatagtaagatgtccccaaagggaagtgccatcattaccgctatgatattaatttgacaattgatagatttatggtttagctatggagactattatgtttgagactatggagactattatatggttctggcatgaccactactaggttaacaagcagtaacataccttcaagataggcgatgggtagttttaagt

SEQ ID NO: 806 - DNA, 2822 bp, Diabrotica virgifera
gactaatctatctttgtaggtgtcgaaaaggataccaatgattagttgaaaatggtttgagaagtgaagaaaaagtaaccccatgaaaaagtgaagagggaaaccgtggcgaggcccctccacttgttcataaaattgatgtatgttttcttgtatctggcatatcacaagtgtaatactcgtgatgaggaagtgttgttcagttgtctgggaatactcccattaatagtcggagcaagaacagttttatttgtgtaagctcatataagaaccaaatttcaatatttatttgtgtttgtaagcccatgtatatggagtatgactaagaaccaagtttcaatattttttgtgtttgtaagcccatgtatatggagtatgactaagaaccaagtttcgatattatttgtgtttgtaagcccatgtgtatggagaatgtataaatgccctatgagtcttttgttccctgtttgtttgtctatcccttttttgtctggaaattctagagtctgttatcccgtaatgtctgttagcccatgtccctgatggagtttgattttttttggcgaatagttcgttgacctctcttgtgtttgttcattgaaagtaggccaagagcagaagctgtgacaaggctggtgagcttaggatctggccgcgttgagtacaggtgaagcttgctttcggtggataaatggaagtggtcgttcgtcggaattgtcattctttccaatgtccctttggtctttcccttgtgtgtttgctttcatccctgttttgaaaaagtagtctaaccccagtttggaagagtgaagtctactcatgttttggaaaaataaagtctacccattgttttggaaaagtaagatctactcatgttttggaaaagtaagatcatatccccggttttgaaaaataaagaatatcccagtttgtgatttgaaaatgagaaagttgtcttgtgaactttcatgaaaggcttttatgtcctaggtaggactgttgattgaaaacgtaatgatgtagtatttcctatgtcatgtgttacgttcatttttttttggtcttgattaaatagtttgatatcccgtttgaatccagtatactagtttttttggtcttttgtatgttgtcacacgcgttccccccccttgttggtcttgtttgaatgagttgttgagatgtcatttttgacattttatctcaacgaggtatttagactgcattgtctaaatcctccttttgcagaaccgttgccgaatgtcccgtgaaactcgctaggtgtttagagtttaagcagatgcctatctgctgagccaagagctcagaaagattttttagtttttgaaaaccaatcctggttaggcaacgaggtgatgaggctgtgtctgccctgctatatggtatatattatatggtatatatagtatatatgtcacttgtgttactgcagtggatgtcagcgaggtccacacagggcacaagattatttctttcccaagacacagaaactcttgtcacctacagttctttgtagagtcaagaaacatttaagtctactcgactttaaagagtctggcgattgatggcacgctagcccactccctaacaatgatgttttgtttttgtttaatccccactagccattatttaaatatttttgtattgttgtcctgtcacacccaagaagtcaatgttggatttttgtagttatcgaaaactgaattggtaatccagtttcctctcttccgaggaggctattgtagcagatggatttctactacaatattttataaaaaatatccattaattttaatcctatcccaagaaaaatattaatttttctaatatattttgcgagtttatatatctttaaaatttcctaagccgctcctgttcgcattgtaaaggttaggaaatttcctatttatttgtgtagcaataaccaactacgtagattgttattgaaaacatccattattcgagaatgaatcctctaaaaggttcagtgtttttcctttaagttttgagcgctaaaaatcccatgttattattggtctgcattttgaaagatccttgagttgtagttgacgattggtcaatagttttggccgaacgatcgagaagaaatgcatcgtttggacgcgagagagacgtgacgatgtaaagttagttctaaaagtacatcagctctgtaagcatctttttgttagaactcaaaaagtcgcactttgccggccaaaatggttttcttcttatagtaaaagaactaatggatttctaacatgtcaaggaatataatgacaatagtttcacggcattttaatggatatattattgtgaaacagttctattgttatgcagtttgatttgccggtaaaagaagtgcgtggtttcctggttcctgtcctttatgtagctgttgctatttttatgatgttttgatttgttcatgttccagtaagaaatgcccagatgatattatttggtatcgattttatccagttttgtaatgatttgaatatcttcccctcccagccccgtctgaatggaaaattttgaagttccaagtgttgtgacatggatttttgttttaacaagagtcctagaccaataggtgaatttgtggttatagtaagatgtccccaaagggaagtgccatcattaccgctatgatattaatttgacaattgatagatttatggtttagctatggagactattatgtttgagactatggagactattatatggttctggcatgaccactactaggttaacaagcagtaacataccttcaagataggcgatgggtagttttaagt

SEQ ID NO: 807 - DNA, 1356 bp, Diabrotica virgifera
gacatgtaaaacgcttcaaattgcgcccaacgtgtggggctcaaaacgctgcaaatgtcgcccaacgtgtgaggccgattcatttttctgcctccttcagtatccagtagttgtcttgtccagttgaatgcttcaactggccccgacaacgtggggcgtgttatttctaccccctgaccccattagcatgtgcccactaccatatccctttagcctcctttcggtctcatttgtactacaactgttaggcagtgcccgtcttgggtagccgatctcagtttgtggtgcaagtgtttccgataacatggaagctcgactcgtgtcatgttttgtatgcccattgttacaagtctagcttgtagacatgttcaactagtagttagcctatctactagtccccaatgtctttagccaccccccacttagtgttacttgtaatacttgtaacgtacaccctgaagtttgacccgagtaaatatcgccccagtcttcccatgtagtttagcccagattcctcttgtcttgcccccagaaactgtttcatgtcttttagtgcccccgaaactgtttcagtctgttagtccccatgaaagagcccatttttgtagtttttgttgcagaatgttaataatttttccaaagaggtgtaagtatgtacacattttgttgtggtgttgatttggtcatgctgctgattgtataggcatgtaccatttcatacatcatagtgtatttacattgtaaccccatattatgtaaaccgtagtatactggtattgtattgtatgtatcgtacaagagaatagtatgtttaatattgtagcgtacttactatattgtattgatattgtacccatgatgaaagcattggttaaattttttggaaaatattgatgaattatatagacaaacagatgagtaaaaaataaagtataaaatttttttagaaaattttggtataagtaacgttaaaaattttttttaaaattttgctaaaagttacaattaaaatgtttagaatattgaatccacttatagagtataacaatatgttatatttttttgcatgtattcttgtagatcatcagttttttacagaataaacgttttttgtgattattgatttggtcgtttgagtagatgtgtgataatagttggtatggtccgtgtatgagctaattcggtatggtctgtgtgagtaagttccgtgattttccagcgaagcctatctatatttgggtatattattgccacaggttagttggagaagtcatccttgaagaagtaaccccatgaagaagtgaagagggaaactgaggcgaggcccctccacttattaatgaagaagtagacccc

SEQ ID NO: 808 - DNA, 1361 bp, Diabrotica virgifera
gacatgtaaaacgcttcaaattgcgcccaacgtgtggggctcaaaacgctgcaaatgtcgcccaacgtgtgaggccgattcatttttctgcctccttcagtatccagtagttgtcttgtccagttgaatgcttcaactggccccgacaacgtggggcgtgttatttctaccccctgaccccattagcatgtgcccactaccatatccctttagcctcctttcggtctcatttgtactacaactgttaggcagtgcccgtccccttgggcagccgatctcagtttgtggtgcaggtgtttccgataacatggaagcttgacttttgtcatattttgtgtacgcccactgttacaagtctagcttgtagacatgttcaactagtagttagcctatctactagtccccaatgtctttagccaccccccacttagtgttacttgtaatacttgtaacgtacaccctgaagtttgacccgagtaaatatcgccccagtcttcccatgtagtttagcccagattcctcttgtcttgcccccagaaactgtttcatgtcttttagtgcccccgaaactgtttcagtctgttagtccccatgaaagagcccatttttgtagtttttgttgcagaatgttaataatttttccaaagaggtgtaagtatgtacacattttgttgtggtgttgatttggtcatgctgctgattgtataggcatgtaccatttcatacatcatagtgtatttacattgtaaccccatattatgtaaaccgtagtatactggtattgtattgtatgtatcgtacaagagaatagtatgtttaatattgtagcgtacttactatattgtattgatattgtacccatgatgaaagcattggttaaattttttggaaaatattgatgaattatatagacaaacagatgagtaaaaaataaagtataaaatttttttagaaaattttggtataagtaacgttaaaaattttttttaaaattttgctaaaagttacaattaaaatgtttagaatattgaatccacttatagagtataacaatatgttatatttttttgcatgtattcttgtagatcatcagttttttacagaataaacgttttttgtgattattgatttggtcgtttgagtagatgtgtgataatagttggtatggtccgtgtatgagctaattcggtatggtctgtgtgagtaagttccgtgattttccagcgaagcctatctatatttgggtatattattgccacaggttagttggagaagtcatccttgaagaagtaaccccatgaagaagtgaagagggaaactgaggcgaggcccctccacttattaatgaagaagtagacccc

SEQ ID NO: 809 - DNA, 1234 bp, Diabrotica virgifera
aacgcttcaactgtcgccctagaacgtggggcatgtcttttttgcctccctcagaccccatttgcatgttcccactaccatgtccttttagcctcctttcggtctcatttgtactacaactgttaggcagtgcccgtcttgggtagccgatctcagtttgtggtgcaagtgtttccgataacatggaagctcgactcgtgtcatgttttgtatgcccattgttacaagtctagcttgtagacatgttcaactagtagttagcctatctactagtccccaatgtctttagccaccccccacttagtgttacttgtaatacttgtaacgtacaccctgaagtttgacccgagtaaatatcgccccagtcttcccatgtagtttagcccagattcctcttgtcttgcccccagaaactgtttcatgtcttttagtgcccccgaaactgtttcagtctgttagtccccatgaaagagcccatttttgtagtttttgttgcagaatgttaataatttttccaaagaggtgtaagtatgtacacattttgttgtggtgttgatttggtcatgctgctgattgtataggcatgtaccatttcatacatcatagtgtatttacattgtaaccccatattatgtaaaccgtagtatactggtattgtattgtatgtatcgtacaagagaatagtatgtttaatattgtagcgtacttactatattgtattgatattgtacccatgatgaaagcattggttaaattttttggaaaatattgatgaattatatagacaaacagatgagtaaaaaataaagtataaaatttttttagaaaattttggtataagtaacgttaaaaattttttttaaaattttgctaaaagttacaattaaaatgtttagaatattgaatccacttatagagtataacaatatgttatatttttttgcatgtattcttgtagatcatcagttttttacagaataaacgttttttgtgattattgatttggtcgtttgagtagatgtgtgataatagttggtatggtccgtgtatgagctaattcggtatggtctgtgtgagtaagttccgtgattttccagcgaagcctatctatatttgggtatattattgccacaggttagttggagaagtcatccttgaagaagtaaccccatgaagaagtgaagagggaaactgaggcgaggcccctccacttattaatgaagaagtagacccc

SEQ ID NO: 810 - DNA, 4734 bp, Diabrotica virgifera
gactaatctatctttgtaggtgtcgaaaaggataccaatgattagttgaaaatggtttgagaagtgaagaaaaagtaaccccatgaaaaagtgaagagggaaaccgtggcgaggcccctccacttgttcataaaattgatgtatgttttcttgtatctggcatatcacaagtgtaatactcgtgatgaggaagtgttgttcagttgtctgggaatactcccattaatagtcggagcaagaacagttttatttgtgtaagctcatataagaaccaaatttcaatatttatttgtgtttgtaagcccatgtatatggagtatgactaagaaccaagtttcaatattttttgtgtttgtaagcccatgtatatggagtatgactaagaaccaagtttcgatattatttgtgtttgtaagcccatgtgtatggagaatgtataaatgccctatgagtcttttgttccctgtttgtttgtctatcccttttttgtctggaaattctagagtctgttatcccgtaatgtctgttagcccatgtccctgatggagtttgattttttttggcgaatagttcgttgacctctcttgtgtttgttcattgaaagtaggccaagagcagaagctgtgacaaggctggtgagcttaggatctggccgcgttgagtacaggtgaagcttgctttcggtggataaatggaagtggtcgttcgtcggaattgtcattctttccaatgtccctttggtctttcccttgtgtgtttgctttcatccctgttttgaaaaagtagtctaaccccagtttggaagagtgaagtctactcatgttttggaaaaataaagtctacccattgttttggaaaagtaagatctactcatgttttggaaaagtaagatcatatccccggttttgaaaaataaagaatatcccagtttgtgatttgaaaatgagaaagttgtcttgtgaactttcatgaaaggcttttatgtcctaggtaggactgttgattgaaaacgtaatgatgtagtatttcctatgtcatgtgttacgttcatttttttttggtcttgattaaatagtttgatatcccgtttgaatccagtatactagtttttttggtcttttgtatgttgtcacacgcgttccccccccttgttggtcttgtttgaatgagttgttgagatgtcatttttgacattttatctcaacgaggtatttagactgcattgtctaaatcctccttttgcagaaccgttgccgaatgtcccgtgaaactcgctaggtgtttagagtttaagcagatgcctatctgctgagccaagagctcagaaagattttttagtttttgaaaaccaatcctggttaggcaacgaggtgatgaggctgtgtctgccctgctatatggtatatattatatggtatatatagtatatatgtcacttgtgttactgcagtggatgtcagcgaggtccacacagggcacaagattatttctttcccaagacacagaaactcttgtcacctacagttctttgtagagtcaagaaacatttaagtctactcgactttaaagagtctggcgattgatggcacgctagcccactccctaacaatgatgttttgtttttgtttaatccccactagccattatttaaatatttttgtattgttgtcctgtcacacccaagaagtcaatgttggatttttgtagttatcgaaaactgaattggtaatccagtttcctctcttccgaggaggctattgtagcagatggatttctactacaatattttataaaaaatatccattaattttaatcctatcccaagaaaaatattaatttttctaatatattttgcgagtttatatatctttaaaatttcctaagccgctcctgttcgaaatatttcagaatattttcgcaacaaagtaaaatcataggaaagttcctatttatttgagtagcatttaccaactacgtagatagttattgtgaaatcattcattattcgagaatgaatcctctaaaaggtttggtgtttttcctttaagttttgagcgataaaaatcccatgttattattggtctgcattttgaaagatccttgagttgtagttgacgattggtcaatagttttggccgaacgatcgagaagaaatgcatcgtttggacgcgagagagacgtgacgatgtaaagttagttctaaaagtacatcacttcagtaaacatctttttgttagaactcaaccaacagactcgtagaaagtcgcactttgccggcaaaatggttttatttttatggtaaaagaagtgaaagactggcagtttgcccagtaaatgtcaacgaatataatgacaatagtttcacggcattttaatggatatattattgtgaaacagttctattgttatgcagttagatttgccggtggtataaaaaagaagtgcgtggtttcctggttcctgtcctttatgtagctgttgctatttttatgatgttttgatttgttcatgttccagtaagaaatgcccagatgatattatttggtatcgattttatccagttttgtaatgatttgaatatcttcccctcccagccccgtctgaatggaaaattttgaagttccaagtgttgtgacatggatttttgttttaacaaggtatgataatgtttattttaaataattcacaagtggatattattggtaaaggttttacataattaaaaatgtttgttttcaacatggaaaatatattatgtaaagtaaatattagatggcagtgacatttgacagccatgtcaaatttttgttttggtacactgctaaaaataaggttaaaaattgtaaaatcatgtattttgttattattattcatttctggtttgagaatgtgtctattctcaataaaaataaaaaggtattaaggtttaaataaacattataaaatgtacacatctttatttctgtaacctctttatttaagaaaattattaacagatatctaatacaagtgaataagttttagaacagaagaaaatataatggcatagaagccaaatgatgataatttgtagcccactataaccccaatgaggaatctacgatgaatgtcccccagttgctttccagtaagtactcgatatgagaatttgaggatttttcaaacggcgtcccaatttgtttaaatagtaggaaagtcctcaagtctgtgtaagtatcctttgcttatttggttatgtagtttagtcttctttaaaccctcctacccctcccaacgaatctacgacctgccaccgcacaaaaaatgagctgccgttcgcatgaaggtttgcgtgtctgttccttctgctagccccatttcgactccccagtatctctatagatagtctttccttgatcccattagagcagacaggtaaaacgcttcaactggcacccaacgtgtgaggccgattcatttttctgcctccttcagtatccagttgttgtcttgtccagttgaacgcttcaactagcgccctgtacgtggggctcgatccatttttagcccccctgatcccattagcatgtgcccactaccatatccctttagcctcctttcggtctcatttgtactacaactgttaggcagtgcccgtcttgggtagccgatctcagtttgtggtgcaagtgtttccgataacatggaagctcgactcgtgtcatgttttgtatgcccattgttacaagtctagcttgtagacatgttcaactagtagttagcctatctactagtccccaatgtctttagccaccccccacttagtgttacttgtaatacttgtaacgtacaccctgaagtttgacccgagtaaatatcgccccagtcttcccatgtagtttagcccagattcctcttgtcttgcccccagaaactgtttcatgtcttttagtgcccccgaaactgtttcagtctgttagtccccatgaaagagcccatttttgtagtttttgttgcagaatgttaataatttttccaaagaggtgtaagtatgtacacattttgttgtggtgttgatttggtcatgctgctgattgtataggcatgtaccatttcatacatcatagtgtatttacattgtaaccccatattatgtaaaccgtagtatactggtattgtattgtatgtatcgtacaagagaatagtatgtttaatattgtagcgtacttactatattgtattgatattgtacccatgatgaaagcattggttaaattttttggaaaatattgatgaattatatagacaaacagatgagtaaaaaataaagtataaaatttttttagaaaattttggtataagtaacgttaaaaattttttttaaaattttgctaaaagttacaattaaaatgtttagaatattgaatccacttatagagtataacaatatgttatatttttttgcatgtattcttgtagatcatcagttttttacagaataaacgttttttgtgattattgatttggtcgtttgagtagatgtgtgataatagttggtatggtccgtgtatgagctaattcggtatggtctgtgtgagtaagttccgtgattttccagcgaagcctatctatatttgggtatattattgccacaggttagttggagaagtcatccttgaagaagtaaccccatgaagaagtgaagagggaaactgaggcgaggcccctccacttattaatgaagaagtagacccc

SEQ ID NO: 811 - DNA, 1239 bp, Diabrotica virgifera
aacgcttcaactgtcgccctagaacgtggggcatgtcttttttgcctccctcagaccccatttgcatgttcccactaccatgtccttttagcctcctttcggtctcatttgtactacaactgttaggcagtgcccgtccccttgggcagccgatctcagtttgtggtgcaggtgtttccgataacatggaagcttgacttttgtcatattttgtgtacgcccactgttacaagtctagcttgtagacatgttcaactagtagttagcctatctactagtccccaatgtctttagccaccccccacttagtgttacttgtaatacttgtaacgtacaccctgaagtttgacccgagtaaatatcgccccagtcttcccatgtagtttagcccagattcctcttgtcttgcccccagaaactgtttcatgtcttttagtgcccccgaaactgtttcagtctgttagtccccatgaaagagcccatttttgtagtttttgttgcagaatgttaataatttttccaaagaggtgtaagtatgtacacattttgttgtggtgttgatttggtcatgctgctgattgtataggcatgtaccatttcatacatcatagtgtatttacattgtaaccccatattatgtaaaccgtagtatactggtattgtattgtatgtatcgtacaagagaatagtatgtttaatattgtagcgtacttactatattgtattgatattgtacccatgatgaaagcattggttaaattttttggaaaatattgatgaattatatagacaaacagatgagtaaaaaataaagtataaaatttttttagaaaattttggtataagtaacgttaaaaattttttttaaaattttgctaaaagttacaattaaaatgtttagaatattgaatccacttatagagtataacaatatgttatatttttttgcatgtattcttgtagatcatcagttttttacagaataaacgttttttgtgattattgatttggtcgtttgagtagatgtgtgataatagttggtatggtccgtgtatgagctaattcggtatggtctgtgtgagtaagttccgtgattttccagcgaagcctatctatatttgggtatattattgccacaggttagttggagaagtcatccttgaagaagtaaccccatgaagaagtgaagagggaaactgaggcgaggcccctccacttattaatgaagaagtagacccc

SEQ ID NO: 812 - DNA, 1234 bp, Diabrotica virgifera
aacgcttcaactagcgccctgtacgtggggctcgatccatttttagcccccctgatcccattagcatgtgcccactaccatatccctttagcctcctttcggtctcatttgtactacaactgttaggcagtgcccgtcttgggtagccgatctcagtttgtggtgcaagtgtttccgataacatggaagctcgactcgtgtcatgttttgtatgcccattgttacaagtctagcttgtagacatgttcaactagtagttagcctatctactagtccccaatgtctttagccaccccccacttagtgttacttgtaatacttgtaacgtacaccctgaagtttgacccgagtaaatatcgccccagtcttcccatgtagtttagcccagattcctcttgtcttgcccccagaaactgtttcatgtcttttagtgcccccgaaactgtttcagtctgttagtccccatgaaagagcccatttttgtagtttttgttgcagaatgttaataatttttccaaagaggtgtaagtatgtacacattttgttgtggtgttgatttggtcatgctgctgattgtataggcatgtaccatttcatacatcatagtgtatttacattgtaaccccatattatgtaaaccgtagtatactggtattgtattgtatgtatcgtacaagagaatagtatgtttaatattgtagcgtacttactatattgtattgatattgtacccatgatgaaagcattggttaaattttttggaaaatattgatgaattatatagacaaacagatgagtaaaaaataaagtataaaatttttttagaaaattttggtataagtaacgttaaaaattttttttaaaattttgctaaaagttacaattaaaatgtttagaatattgaatccacttatagagtataacaatatgttatatttttttgcatgtattcttgtagatcatcagttttttacagaataaacgttttttgtgattattgatttggtcgtttgagtagatgtgtgataatagttggtatggtccgtgtatgagctaattcggtatggtctgtgtgagtaagttccgtgattttccagcgaagcctatctatatttgggtatattattgccacaggttagttggagaagtcatccttgaagaagtaaccccatgaagaagtgaagagggaaactgaggcgaggcccctccacttattaatgaagaagtagacccc

SEQ ID NO: 813 - DNA, 1239 bp, Diabrotica virgifera
aacgcttcaactagcgccctgtacgtggggctcgatccatttttagcccccctgatcccattagcatgtgcccactaccatatccctttagcctcctttcggtctcatttgtactacaactgttaggcagtgcccgtccccttgggcagccgatctcagtttgtggtgcaggtgtttccgataacatggaagcttgacttttgtcatattttgtgtacgcccactgttacaagtctagcttgtagacatgttcaactagtagttagcctatctactagtccccaatgtctttagccaccccccacttagtgttacttgtaatacttgtaacgtacaccctgaagtttgacccgagtaaatatcgccccagtcttcccatgtagtttagcccagattcctcttgtcttgcccccagaaactgtttcatgtcttttagtgcccccgaaactgtttcagtctgttagtccccatgaaagagcccatttttgtagtttttgttgcagaatgttaataatttttccaaagaggtgtaagtatgtacacattttgttgtggtgttgatttggtcatgctgctgattgtataggcatgtaccatttcatacatcatagtgtatttacattgtaaccccatattatgtaaaccgtagtatactggtattgtattgtatgtatcgtacaagagaatagtatgtttaatattgtagcgtacttactatattgtattgatattgtacccatgatgaaagcattggttaaattttttggaaaatattgatgaattatatagacaaacagatgagtaaaaaataaagtataaaatttttttagaaaattttggtataagtaacgttaaaaattttttttaaaattttgctaaaagttacaattaaaatgtttagaatattgaatccacttatagagtataacaatatgttatatttttttgcatgtattcttgtagatcatcagttttttacagaataaacgttttttgtgattattgatttggtcgtttgagtagatgtgtgataatagttggtatggtccgtgtatgagctaattcggtatggtctgtgtgagtaagttccgtgattttccagcgaagcctatctatatttgggtatattattgccacaggttagttggagaagtcatccttgaagaagtaaccccatgaagaagtgaagagggaaactgaggcgaggcccctccacttattaatgaagaagtagacccc

SEQ ID NO: 814 - DNA, 4707 bp, Diabrotica virgifera
gactaatctatctttgtaggtgtcgaaaaggataccaatgattagttgaaaatggtttgagaagtgaagaaaaagtaaccccatgaaaaagtgaagagggaaaccgtggcgaggcccctccacttgttcataaaattgatgtatgttttcttgtatctggcatatcacaagtgtaatactcgtgatgaggaagtgttgttcagttgtctgggaatactcccattaatagtcggagcaagaacagttttatttgtgtaagctcatataagaaccaaatttcaatatttatttgtgtttgtaagcccatgtatatggagtatgactaagaaccaagtttcaatattttttgtgtttgtaagcccatgtatatggagtatgactaagaaccaagtttcgatattatttgtgtttgtaagcccatgtgtatggagaatgtataaatgccctatgagtcttttgttccctgtttgtttgtctatcccttttttgtctggaaattctagagtctgttatcccgtaatgtctgttagcccatgtccctgatggagtttgattttttttggcgaatagttcgttgacctctcttgtgtttgttcattgaaagtaggccaagagcagaagctgtgacaaggctggtgagcttaggatctggccgcgttgagtacaggtgaagcttgctttcggtggataaatggaagtggtcgttcgtcggaattgtcattctttccaatgtccctttggtctttcccttgtgtgtttgctttcatccctgttttgaaaaagtagtctaaccccagtttggaagagtgaagtctactcatgttttggaaaaataaagtctacccattgttttggaaaagtaagatctactcatgttttggaaaagtaagatcatatccccggttttgaaaaataaagaatatcccagtttgtgatttgaaaatgagaaagttgtcttgtgaactttcatgaaaggcttttatgtcctaggtaggactgttgattgaaaacgtaatgatgtagtatttcctatgtcatgtgttacgttcatttttttttggtcttgattaaatagtttgatatcccgtttgaatccagtatactagtttttttggtcttttgtatgttgtcacacgcgttccccccccttgttggtcttgtttgaatgagttgttgagatgtcatttttgacattttatctcaacgaggtatttagactgcattgtctaaatcctccttttgcagaaccgttgccgaatgtcccgtgaaactcgctaggtgtttagagtttaagcagatgcctatctgctgagccaagagctcagaaagattttttagtttttgaaaaccaatcctggttaggcaacgaggtgatgaggctgtgtctgccctgctatatggtatatattatatggtatatatagtatatatgtcacttgtgttactgcagtggatgtcagcgaggtccacacagggcacaagattatttctttcccaagacacagaaactcttgtcacctacagttctttgtagagtcaagaaacatttaagtctactcgactttaaagagtctggcgattgatggcacgctagcccactccctaacaatgatgttttgtttttgtttaatccccactagccattatttaaatatttttgtattgttgtcctgtcacacccaagaagtcaatgttggatttttgtagttatcgaaaactgaattggtaatccagtttcctctcttccgaggaggctattgtagcagatggatttctactacaatattttataaaaaatatccattaattttaatcctatcccaagaaaaatattaatttttctaatatattttgcgagtttatatatctttaaaatttcctaagccgctcctgttcgcattgtaaaggttaggaaatttcctatttatttgtgtagcaataaccaactacgtagattgttattgaaaacatccattattcgagaatgaatcctctaaaaggttcagtgtttttcctttaagttttgagcgctaaaaatcccatgttattattggtctgcattttgaaagatccttgagttgtagttgacgattggtcaatagttttggccgaacgatcgagaagaaatgcatcgtttggacgcgagagagacgtgacgatgtaaagttagttctaaaagtacatcacttcagtaaacatctttttgttagaactcaaccaacagactcgtagaaagtcgcactttgccggcaaaatggttttatttttatggtaaaagaagtgaaagactggcagtttgcccagtaaatgtcaacgaatataatgacaatagtttcacggcattttaatggatatattattgtgaaacagttctattgttatgcagttagatttgccggtggtataaaaaagaagtgcgtggtttcctggttcctgtcctttatgtagctgttgctatttttatgatgttttgatttgttcatgttccagtaagaaatgcccagatgatattatttggtatcgattttatccagttttgtaatgatttgaatatcttcccctcccagccccgtctgaatggaaaattttgaagttccaagtgttgtgacatggatttttgttttaacaaggtatgataatgtttattttaaataattcacaagtggatattattggtaaaggttttacataattaaaaatgtttgttttcaacatggaaaatatattatgtaaagtaaatattagatggcagtgacatttgacagccatgtcaaatttttgttttggtacactgctaaaaataaggttaaaaattgtaaaatcatgtattttgttattattattcatttctggtttgagaatgtgtctattctcaataaaaataaaaaggtattaaggtttaaataaacattataaaatgtacacatctttatttctgtaacctctttatttaagaaaattattaacagatatctaatacaagtgaataagttttagaacagaagaaaatataatggcatagaagccaaatgatgataatttgtagcccactataaccccaatgaggaatctacgatgaatgtcccccagttgctttccagtaagtactcgatatgagaatttgaggatttttcaaacggcgtcccaatttgtttaaatagtaggaaagtcctcaagtctgtgtaagtatcctttgcttatttggttatgtagtttagtcttctttaaaccctcctacccctcccaacgaatctacgacctgccaccgcacaaaaaatgagctgccgttcgcatgaaggtttgcgtgtctgttccttctgctagccccatttcgactccccagtatctctatagatagtctttccttgatcccattagagcagacaggtaaaacgcttcaactggcacccaacgtgtgaggccgattcatttttctgcctccttcagtatccagttgttgtcttgtccagttgaacgcttcaactgtcgccctagaacgtggggcatgtcttttttgcctccctcagaccccatttgcatgttcccactaccatgtccttttagcctcctttcggtctcatttgtactacaactgttaggcagtgcccgtcttgggtagccgatctcagtttgtggtgcaagtgtttccgataacatggaagctcgactcgtgtcatgttttgtatgcccattgttacaagtctagcttgtagacatgttcaactagtagttagcctatctactagtccccaatgtctttagccaccccccacttagtgttacttgtaatacttgtaacgtacaccctgaagtttgacccgagtaaatatcgccccagtcttcccatgtagtttagcccagattcctcttgtcttgcccccagaaactgtttcatgtcttttagtgcccccgaaactgtttcagtctgttagtccccatgaaagagcccatttttgtagtttttgttgcagaatgttaataatttttccaaagaggtgtaagtatgtacacattttgttgtggtgttgatttggtcatgctgctgattgtataggcatgtaccatttcatacatcatagtgtatttacattgtaaccccatattatgtaaaccgtagtatactggtattgtattgtatgtatcgtacaagagaatagtatgtttaatattgtagcgtacttactatattgtattgatattgtacccatgatgaaagcattggttaaattttttggaaaatattgatgaattatatagacaaacagatgagtaaaaaataaagtataaaatttttttagaaaattttggtataagtaacgttaaaaattttttttaaaattttgctaaaagttacaattaaaatgtttagaatattgaatccacttatagagtataacaatatgttatatttttttgcatgtattcttgtagatcatcagttttttacagaataaacgttttttgtgattattgatttggtcgtttgagtagatgtgtgataatagttggtatggtccgtgtatgagctaattcggtatggtctgtgtgagtaagttccgtgattttccagcgaagcctatctatatttgggtatattattgccacaggttagttggagaagtcatccttgaagaagtaaccccatgaagaagtgaagagggaaactgaggcgaggcccctccacttattaatgaagaagtagacccc

SEQ ID NO: 815 - DNA, 4739 bp, Diabrotica virgifera
gactaatctatctttgtaggtgtcgaaaaggataccaatgattagttgaaaatggtttgagaagtgaagaaaaagtaaccccatgaaaaagtgaagagggaaaccgtggcgaggcccctccacttgttcataaaattgatgtatgttttcttgtatctggcatatcacaagtgtaatactcgtgatgaggaagtgttgttcagttgtctgggaatactcccattaatagtcggagcaagaacagttttatttgtgtaagctcatataagaaccaaatttcaatatttatttgtgtttgtaagcccatgtatatggagtatgactaagaaccaagtttcaatattttttgtgtttgtaagcccatgtatatggagtatgactaagaaccaagtttcgatattatttgtgtttgtaagcccatgtgtatggagaatgtataaatgccctatgagtcttttgttccctgtttgtttgtctatcccttttttgtctggaaattctagagtctgttatcccgtaatgtctgttagcccatgtccctgatggagtttgattttttttggcgaatagttcgttgacctctcttgtgtttgttcattgaaagtaggccaagagcagaagctgtgacaaggctggtgagcttaggatctggccgcgttgagtacaggtgaagcttgctttcggtggataaatggaagtggtcgttcgtcggaattgtcattctttccaatgtccctttggtctttcccttgtgtgtttgctttcatccctgttttgaaaaagtagtctaaccccagtttggaagagtgaagtctactcatgttttggaaaaataaagtctacccattgttttggaaaagtaagatctactcatgttttggaaaagtaagatcatatccccggttttgaaaaataaagaatatcccagtttgtgatttgaaaatgagaaagttgtcttgtgaactttcatgaaaggcttttatgtcctaggtaggactgttgattgaaaacgtaatgatgtagtatttcctatgtcatgtgttacgttcatttttttttggtcttgattaaatagtttgatatcccgtttgaatccagtatactagtttttttggtcttttgtatgttgtcacacgcgttccccccccttgttggtcttgtttgaatgagttgttgagatgtcatttttgacattttatctcaacgaggtatttagactgcattgtctaaatcctccttttgcagaaccgttgccgaatgtcccgtgaaactcgctaggtgtttagagtttaagcagatgcctatctgctgagccaagagctcagaaagattttttagtttttgaaaaccaatcctggttaggcaacgaggtgatgaggctgtgtctgccctgctatatggtatatattatatggtatatatagtatatatgtcacttgtgttactgcagtggatgtcagcgaggtccacacagggcacaagattatttctttcccaagacacagaaactcttgtcacctacagttctttgtagagtcaagaaacatttaagtctactcgactttaaagagtctggcgattgatggcacgctagcccactccctaacaatgatgttttgtttttgtttaatccccactagccattatttaaatatttttgtattgttgtcctgtcacacccaagaagtcaatgttggatttttgtagttatcgaaaactgaattggtaatccagtttcctctcttccgaggaggctattgtagcagatggatttctactacaatattttataaaaaatatccattaattttaatcctatcccaagaaaaatattaatttttctaatatattttgcgagtttatatatctttaaaatttcctaagccgctcctgttcgaaatatttcagaatattttcgcaacaaagtaaaatcataggaaagttcctatttatttgagtagcatttaccaactacgtagatagttattgtgaaatcattcattattcgagaatgaatcctctaaaaggtttggtgtttttcctttaagttttgagcgataaaaatcccatgttattattggtctgcattttgaaagatccttgagttgtagttgacgattggtcaatagttttggccgaacgatcgagaagaaatgcatcgtttggacgcgagagagacgtgacgatgtaaagttagttctaaaagtacatcacttcagtaaacatctttttgttagaactcaaccaacagactcgtagaaagtcgcactttgccggcaaaatggttttatttttatggtaaaagaagtgaaagactggcagtttgcccagtaaatgtcaacgaatataatgacaatagtttcacggcattttaatggatatattattgtgaaacagttctattgttatgcagttagatttgccggtggtataaaaaagaagtgcgtggtttcctggttcctgtcctttatgtagctgttgctatttttatgatgttttgatttgttcatgttccagtaagaaatgcccagatgatattatttggtatcgattttatccagttttgtaatgatttgaatatcttcccctcccagccccgtctgaatggaaaattttgaagttccaagtgttgtgacatggatttttgttttaacaaggtatgataatgtttattttaaataattcacaagtggatattattggtaaaggttttacataattaaaaatgtttgttttcaacatggaaaatatattatgtaaagtaaatattagatggcagtgacatttgacagccatgtcaaatttttgttttggtacactgctaaaaataaggttaaaaattgtaaaatcatgtattttgttattattattcatttctggtttgagaatgtgtctattctcaataaaaataaaaaggtattaaggtttaaataaacattataaaatgtacacatctttatttctgtaacctctttatttaagaaaattattaacagatatctaatacaagtgaataagttttagaacagaagaaaatataatggcatagaagccaaatgatgataatttgtagcccactataaccccaatgaggaatctacgatgaatgtcccccagttgctttccagtaagtactcgatatgagaatttgaggatttttcaaacggcgtcccaatttgtttaaatagtaggaaagtcctcaagtctgtgtaagtatcctttgcttatttggttatgtagtttagtcttctttaaaccctcctacccctcccaacgaatctacgacctgccaccgcacaaaaaatgagctgccgttcgcatgaaggtttgcgtgtctgttccttctgctagccccatttcgactccccagtatctctatagatagtctttccttgatcccattagagcagacaggtaaaacgcttcaactggcacccaacgtgtgaggccgattcatttttctgcctccttcagtatccagttgttgtcttgtccagttgaacgcttcaactagcgccctgtacgtggggctcgatccatttttagcccccctgatcccattagcatgtgcccactaccatatccctttagcctcctttcggtctcatttgtactacaactgttaggcagtgcccgtccccttgggcagccgatctcagtttgtggtgcaggtgtttccgataacatggaagcttgacttttgtcatattttgtgtacgcccactgttacaagtctagcttgtagacatgttcaactagtagttagcctatctactagtccccaatgtctttagccaccccccacttagtgttacttgtaatacttgtaacgtacaccctgaagtttgacccgagtaaatatcgccccagtcttcccatgtagtttagcccagattcctcttgtcttgcccccagaaactgtttcatgtcttttagtgcccccgaaactgtttcagtctgttagtccccatgaaagagcccatttttgtagtttttgttgcagaatgttaataatttttccaaagaggtgtaagtatgtacacattttgttgtggtgttgatttggtcatgctgctgattgtataggcatgtaccatttcatacatcatagtgtatttacattgtaaccccatattatgtaaaccgtagtatactggtattgtattgtatgtatcgtacaagagaatagtatgtttaatattgtagcgtacttactatattgtattgatattgtacccatgatgaaagcattggttaaattttttggaaaatattgatgaattatatagacaaacagatgagtaaaaaataaagtataaaatttttttagaaaattttggtataagtaacgttaaaaattttttttaaaattttgctaaaagttacaattaaaatgtttagaatattgaatccacttatagagtataacaatatgttatatttttttgcatgtattcttgtagatcatcagttttttacagaataaacgttttttgtgattattgatttggtcgtttgagtagatgtgtgataatagttggtatggtccgtgtatgagctaattcggtatggtctgtgtgagtaagttccgtgattttccagcgaagcctatctatatttgggtatattattgccacaggttagttggagaagtcatccttgaagaagtaaccccatgaagaagtgaagagggaaactgaggcgaggcccctccacttattaatgaagaagtagacccc

SEQ ID NO: 816 - DNA, 4712 bp, Diabrotica virgifera
gactaatctatctttgtaggtgtcgaaaaggataccaatgattagttgaaaatggtttgagaagtgaagaaaaagtaaccccatgaaaaagtgaagagggaaaccgtggcgaggcccctccacttgttcataaaattgatgtatgttttcttgtatctggcatatcacaagtgtaatactcgtgatgaggaagtgttgttcagttgtctgggaatactcccattaatagtcggagcaagaacagttttatttgtgtaagctcatataagaaccaaatttcaatatttatttgtgtttgtaagcccatgtatatggagtatgactaagaaccaagtttcaatattttttgtgtttgtaagcccatgtatatggagtatgactaagaaccaagtttcgatattatttgtgtttgtaagcccatgtgtatggagaatgtataaatgccctatgagtcttttgttccctgtttgtttgtctatcccttttttgtctggaaattctagagtctgttatcccgtaatgtctgttagcccatgtccctgatggagtttgattttttttggcgaatagttcgttgacctctcttgtgtttgttcattgaaagtaggccaagagcagaagctgtgacaaggctggtgagcttaggatctggccgcgttgagtacaggtgaagcttgctttcggtggataaatggaagtggtcgttcgtcggaattgtcattctttccaatgtccctttggtctttcccttgtgtgtttgctttcatccctgttttgaaaaagtagtctaaccccagtttggaagagtgaagtctactcatgttttggaaaaataaagtctacccattgttttggaaaagtaagatctactcatgttttggaaaagtaagatcatatccccggttttgaaaaataaagaatatcccagtttgtgatttgaaaatgagaaagttgtcttgtgaactttcatgaaaggcttttatgtcctaggtaggactgttgattgaaaacgtaatgatgtagtatttcctatgtcatgtgttacgttcatttttttttggtcttgattaaatagtttgatatcccgtttgaatccagtatactagtttttttggtcttttgtatgttgtcacacgcgttccccccccttgttggtcttgtttgaatgagttgttgagatgtcatttttgacattttatctcaacgaggtatttagactgcattgtctaaatcctccttttgcagaaccgttgccgaatgtcccgtgaaactcgctaggtgtttagagtttaagcagatgcctatctgctgagccaagagctcagaaagattttttagtttttgaaaaccaatcctggttaggcaacgaggtgatgaggctgtgtctgccctgctatatggtatatattatatggtatatatagtatatatgtcacttgtgttactgcagtggatgtcagcgaggtccacacagggcacaagattatttctttcccaagacacagaaactcttgtcacctacagttctttgtagagtcaagaaacatttaagtctactcgactttaaagagtctggcgattgatggcacgctagcccactccctaacaatgatgttttgtttttgtttaatccccactagccattatttaaatatttttgtattgttgtcctgtcacacccaagaagtcaatgttggatttttgtagttatcgaaaactgaattggtaatccagtttcctctcttccgaggaggctattgtagcagatggatttctactacaatattttataaaaaatatccattaattttaatcctatcccaagaaaaatattaatttttctaatatattttgcgagtttatatatctttaaaatttcctaagccgctcctgttcgcattgtaaaggttaggaaatttcctatttatttgtgtagcaataaccaactacgtagattgttattgaaaacatccattattcgagaatgaatcctctaaaaggttcagtgtttttcctttaagttttgagcgctaaaaatcccatgttattattggtctgcattttgaaagatccttgagttgtagttgacgattggtcaatagttttggccgaacgatcgagaagaaatgcatcgtttggacgcgagagagacgtgacgatgtaaagttagttctaaaagtacatcacttcagtaaacatctttttgttagaactcaaccaacagactcgtagaaagtcgcactttgccggcaaaatggttttatttttatggtaaaagaagtgaaagactggcagtttgcccagtaaatgtcaacgaatataatgacaatagtttcacggcattttaatggatatattattgtgaaacagttctattgttatgcagttagatttgccggtggtataaaaaagaagtgcgtggtttcctggttcctgtcctttatgtagctgttgctatttttatgatgttttgatttgttcatgttccagtaagaaatgcccagatgatattatttggtatcgattttatccagttttgtaatgatttgaatatcttcccctcccagccccgtctgaatggaaaattttgaagttccaagtgttgtgacatggatttttgttttaacaaggtatgataatgtttattttaaataattcacaagtggatattattggtaaaggttttacataattaaaaatgtttgttttcaacatggaaaatatattatgtaaagtaaatattagatggcagtgacatttgacagccatgtcaaatttttgttttggtacactgctaaaaataaggttaaaaattgtaaaatcatgtattttgttattattattcatttctggtttgagaatgtgtctattctcaataaaaataaaaaggtattaaggtttaaataaacattataaaatgtacacatctttatttctgtaacctctttatttaagaaaattattaacagatatctaatacaagtgaataagttttagaacagaagaaaatataatggcatagaagccaaatgatgataatttgtagcccactataaccccaatgaggaatctacgatgaatgtcccccagttgctttccagtaagtactcgatatgagaatttgaggatttttcaaacggcgtcccaatttgtttaaatagtaggaaagtcctcaagtctgtgtaagtatcctttgcttatttggttatgtagtttagtcttctttaaaccctcctacccctcccaacgaatctacgacctgccaccgcacaaaaaatgagctgccgttcgcatgaaggtttgcgtgtctgttccttctgctagccccatttcgactccccagtatctctatagatagtctttccttgatcccattagagcagacaggtaaaacgcttcaactggcacccaacgtgtgaggccgattcatttttctgcctccttcagtatccagttgttgtcttgtccagttgaacgcttcaactgtcgccctagaacgtggggcatgtcttttttgcctccctcagaccccatttgcatgttcccactaccatgtccttttagcctcctttcggtctcatttgtactacaactgttaggcagtgcccgtccccttgggcagccgatctcagtttgtggtgcaggtgtttccgataacatggaagcttgacttttgtcatattttgtgtacgcccactgttacaagtctagcttgtagacatgttcaactagtagttagcctatctactagtccccaatgtctttagccaccccccacttagtgttacttgtaatacttgtaacgtacaccctgaagtttgacccgagtaaatatcgccccagtcttcccatgtagtttagcccagattcctcttgtcttgcccccagaaactgtttcatgtcttttagtgcccccgaaactgtttcagtctgttagtccccatgaaagagcccatttttgtagtttttgttgcagaatgttaataatttttccaaagaggtgtaagtatgtacacattttgttgtggtgttgatttggtcatgctgctgattgtataggcatgtaccatttcatacatcatagtgtatttacattgtaaccccatattatgtaaaccgtagtatactggtattgtattgtatgtatcgtacaagagaatagtatgtttaatattgtagcgtacttactatattgtattgatattgtacccatgatgaaagcattggttaaattttttggaaaatattgatgaattatatagacaaacagatgagtaaaaaataaagtataaaatttttttagaaaattttggtataagtaacgttaaaaattttttttaaaattttgctaaaagttacaattaaaatgtttagaatattgaatccacttatagagtataacaatatgttatatttttttgcatgtattcttgtagatcatcagttttttacagaataaacgttttttgtgattattgatttggtcgtttgagtagatgtgtgataatagttggtatggtccgtgtatgagctaattcggtatggtctgtgtgagtaagttccgtgattttccagcgaagcctatctatatttgggtatattattgccacaggttagttggagaagtcatccttgaagaagtaaccccatgaagaagtgaagagggaaactgaggcgaggcccctccacttattaatgaagaagtagacccc

SEQ ID NO: 817 - DNA, 4707 bp, Diabrotica virgifera
gactaatctatctttgtaggtgtcgaaaaggataccaatgattagttgaaaatggtttgagaagtgaagaaaaagtaaccccatgaaaaagtgaagagggaaaccgtggcgaggcccctccacttgttcataaaattgatgtatgttttcttgtatctggcatatcacaagtgtaatactcgtgatgaggaagtgttgttcagttgtctgggaatactcccattaatagtcggagcaagaacagttttatttgtgtaagctcatataagaaccaaatttcaatatttatttgtgtttgtaagcccatgtatatggagtatgactaagaaccaagtttcaatattttttgtgtttgtaagcccatgtatatggagtatgactaagaaccaagtttcgatattatttgtgtttgtaagcccatgtgtatggagaatgtataaatgccctatgagtcttttgttccctgtttgtttgtctatcccttttttgtctggaaattctagagtctgttatcccgtaatgtctgttagcccatgtccctgatggagtttgattttttttggcgaatagttcgttgacctctcttgtgtttgttcattgaaagtaggccaagagcagaagctgtgacaaggctggtgagcttaggatctggccgcgttgagtacaggtgaagcttgctttcggtggataaatggaagtggtcgttcgtcggaattgtcattctttccaatgtccctttggtctttcccttgtgtgtttgctttcatccctgttttgaaaaagtagtctaaccccagtttggaagagtgaagtctactcatgttttggaaaaataaagtctacccattgttttggaaaagtaagatctactcatgttttggaaaagtaagatcatatccccggttttgaaaaataaagaatatcccagtttgtgatttgaaaatgagaaagttgtcttgtgaactttcatgaaaggcttttatgtcctaggtaggactgttgattgaaaacgtaatgatgtagtatttcctatgtcatgtgttacgttcatttttttttggtcttgattaaatagtttgatatcccgtttgaatccagtatactagtttttttggtcttttgtatgttgtcacacgcgttccccccccttgttggtcttgtttgaatgagttgttgagatgtcatttttgacattttatctcaacgaggtatttagactgcattgtctaaatcctccttttgcagaaccgttgccgaatgtcccgtgaaactcgctaggtgtttagagtttaagcagatgcctatctgctgagccaagagctcagaaagattttttagtttttgaaaaccaatcctggttaggcaacgaggtgatgaggctgtgtctgccctgctatatggtatatattatatggtatatatagtatatatgtcacttgtgttactgcagtggatgtcagcgaggtccacacagggcacaagattatttctttcccaagacacagaaactcttgtcacctacagttctttgtagagtcaagaaacatttaagtctactcgactttaaagagtctggcgattgatggcacgctagcccactccctaacaatgatgttttgtttttgtttaatccccactagccattatttaaatatttttgtattgttgtcctgtcacacccaagaagtcaatgttggatttttgtagttatcgaaaactgaattggtaatccagtttcctctcttccgaggaggctattgtagcagatggatttctactacaatattttataaaaaatatccattaattttaatcctatcccaagaaaaatattaatttttctaatatattttgcgagtttatatatctttaaaatttcctaagccgctcctgttcgcattgtaaaggttaggaaatttcctatttatttgtgtagcaataaccaactacgtagattgttattgaaaacatccattattcgagaatgaatcctctaaaaggttcagtgtttttcctttaagttttgagcgctaaaaatcccatgttattattggtctgcattttgaaagatccttgagttgtagttgacgattggtcaatagttttggccgaacgatcgagaagaaatgcatcgtttggacgcgagagagacgtgacgatgtaaagttagttctaaaagtacatcacttcagtaaacatctttttgttagaactcaaccaacagactcgtagaaagtcgcactttgccggcaaaatggttttatttttatggtaaaagaagtgaaagactggcagtttgcccagtaaatgtcaacgaatataatgacaatagtttcacggcattttaatggatatattattgtgaaacagttctattgttatgcagttagatttgccggtggtataaaaaagaagtgcgtggtttcctggttcctgtcctttatgtagctgttgctatttttatgatgttttgatttgttcatgttccagtaagaaatgcccagatgatattatttggtatcgattttatccagttttgtaatgatttgaatatcttcccctcccagccccgtctgaatggaaaattttgaagttccaagtgttgtgacatggatttttgttttaacaaggtatgataatgtttattttaaataattcacaagtggatattattggtaaaggttttacataattaaaaatgtttgttttcaacatggaaaatatattatgtaaagtaaatattagatggcagtgacatttgacagccatgtcaaatttttgttttggtacactgctaaaaataaggttaaaaattgtaaaatcatgtattttgttattattattcatttctggtttgagaatgtgtctattctcaataaaaataaaaaggtattaaggtttaaataaacattataaaatgtacacatctttatttctgtaacctctttatttaagaaaattattaacagatatctaatacaagtgaataagttttagaacagaagaaaatataatggcatagaagccaaatgatgataatttgtagcccactataaccccaatgaggaatctacgatgaatgtcccccagttgctttccagtaagtactcgatatgagaatttgaggatttttcaaacggcgtcccaatttgtttaaatagtaggaaagtcctcaagtctgtgtaagtatcctttgcttatttggttatgtagtttagtcttctttaaaccctcctacccctcccaacgaatctacgacctgccaccgcacaaaaaatgagctgccgttcgcatgaaggtttgcgtgtctgttccttctgctagccccatttcgactccccagtatctctatagatagtctttccttgatcccattagagcagacaggtaaaacgcttcaactggcacccaacgtgtgaggccgattcatttttctgcctccttcagtatccagttgttgtcttgtccagttgaacgcttcaactagcgccctgtacgtggggctcgatccatttttagcccccctgatcccattagcatgtgcccactaccatatccctttagcctcctttcggtctcatttgtactacaactgttaggcagtgcccgtcttgggtagccgatctcagtttgtggtgcaagtgtttccgataacatggaagctcgactcgtgtcatgttttgtatgcccattgttacaagtctagcttgtagacatgttcaactagtagttagcctatctactagtccccaatgtctttagccaccccccacttagtgttacttgtaatacttgtaacgtacaccctgaagtttgacccgagtaaatatcgccccagtcttcccatgtagtttagcccagattcctcttgtcttgcccccagaaactgtttcatgtcttttagtgcccccgaaactgtttcagtctgttagtccccatgaaagagcccatttttgtagtttttgttgcagaatgttaataatttttccaaagaggtgtaagtatgtacacattttgttgtggtgttgatttggtcatgctgctgattgtataggcatgtaccatttcatacatcatagtgtatttacattgtaaccccatattatgtaaaccgtagtatactggtattgtattgtatgtatcgtacaagagaatagtatgtttaatattgtagcgtacttactatattgtattgatattgtacccatgatgaaagcattggttaaattttttggaaaatattgatgaattatatagacaaacagatgagtaaaaaataaagtataaaatttttttagaaaattttggtataagtaacgttaaaaattttttttaaaattttgctaaaagttacaattaaaatgtttagaatattgaatccacttatagagtataacaatatgttatatttttttgcatgtattcttgtagatcatcagttttttacagaataaacgttttttgtgattattgatttggtcgtttgagtagatgtgtgataatagttggtatggtccgtgtatgagctaattcggtatggtctgtgtgagtaagttccgtgattttccagcgaagcctatctatatttgggtatattattgccacaggttagttggagaagtcatccttgaagaagtaaccccatgaagaagtgaagagggaaactgaggcgaggcccctccacttattaatgaagaagtagacccc

SEQ ID NO: 818 - DNA, 4702 bp, Diabrotica virgifera
gactaatctatctttgtaggtgtcgaaaaggataccaatgattagttgaaaatggtttgagaagtgaagaaaaagtaaccccatgaaaaagtgaagagggaaaccgtggcgaggcccctccacttgttcataaaattgatgtatgttttcttgtatctggcatatcacaagtgtaatactcgtgatgaggaagtgttgttcagttgtctgggaatactcccattaatagtcggagcaagaacagttttatttgtgtaagctcatataagaaccaaatttcaatatttatttgtgtttgtaagcccatgtatatggagtatgactaagaaccaagtttcaatattttttgtgtttgtaagcccatgtatatggagtatgactaagaaccaagtttcgatattatttgtgtttgtaagcccatgtgtatggagaatgtataaatgccctatgagtcttttgttccctgtttgtttgtctatcccttttttgtctggaaattctagagtctgttatcccgtaatgtctgttagcccatgtccctgatggagtttgattttttttggcgaatagttcgttgacctctcttgtgtttgttcattgaaagtaggccaagagcagaagctgtgacaaggctggtgagcttaggatctggccgcgttgagtacaggtgaagcttgctttcggtggataaatggaagtggtcgttcgtcggaattgtcattctttccaatgtccctttggtctttcccttgtgtgtttgctttcatccctgttttgaaaaagtagtctaaccccagtttggaagagtgaagtctactcatgttttggaaaaataaagtctacccattgttttggaaaagtaagatctactcatgttttggaaaagtaagatcatatccccggttttgaaaaataaagaatatcccagtttgtgatttgaaaatgagaaagttgtcttgtgaactttcatgaaaggcttttatgtcctaggtaggactgttgattgaaaacgtaatgatgtagtatttcctatgtcatgtgttacgttcatttttttttggtcttgattaaatagtttgatatcccgtttgaatccagtatactagtttttttggtcttttgtatgttgtcacacgcgttccccccccttgttggtcttgtttgaatgagttgttgagatgtcatttttgacattttatctcaacgaggtatttagactgcattgtctaaatcctccttttgcagaaccgttgccgaatgtcccgtgaaactcgctaggtgtttagagtttaagcagatgcctatctgctgagccaagagctcagaaagattttttagtttttgaaaaccaatcctggttaggcaacgaggtgatgaggctgtgtctgccctgctatatggtatatattatatggtatatatagtatatatgtcacttgtgttactgcagtggatgtcagcgaggtccacacagggcacaagattatttctttcccaagacacagaaactcttgtcacctacagttctttgtagagtcaagaaacatttaagtctactcgactttaaagagtctggcgattgatggcacgctagcccactccctaacaatgatgttttgtttttgtttaatccccactagccattatttaaatatttttgtattgttgtcctgtcacacccaagaagtcaatgttggatttttgtagttatcgaaaactgaattggtaatccagtttcctctcttccgaggaggctattgtagcagatggatttctactacaatattttataaaaaatatccattaattttaatcctatcccaagaaaaatattaatttttctaatatattttgcgagtttatatatctttaaaatttcctaagccgctcctgttcgaaatatttcagaatattttcgcaacaaagtaaaatcataggaaagttcctatttatttgagtagcatttaccaactacgtagatagttattgtgaaatcattcattattcgagaatgaatcctctaaaaggtttggtgtttttcctttaagttttgagcgataaaaatcccatgttattattggtctgcattttgaaagatccttgagttgtagttgacgattggtcaatagttttggccgaacgatcgagaagaaatgcatcgtttggacgcgagagagacgtgacgatgtaaagttagttctaaaagtacatcagctctgtaagcatctttttgttagaactcaaaaagtcgcactttgccggccaaaatggttttcttcttatagtaaaagaactaatggatttctaacatgtcaaggaatataatgacaatagtttcacggcattttaatggatatattattgtgaaacagttctattgttatgcagtttgatttgccggtaaaagaagtgcgtggtttcctggttcctgtcctttatgtagctgttgctatttttatgatgttttgatttgttcatgttccagtaagaaatgcccagatgatattatttggtatcgattttatccagttttgtaatgatttgaatatcttcccctcccagccccgtctgaatggaaaattttgaagttccaagtgttgtgacatggatttttgttttaacaaggtatgataatgtttattttaaataattcacaagtggatattattggtaaaggttttacataattaaaaatgtttgttttcaacatggaaaatatattatgtaaagtaaatattagatggcagtgacatttgacagccatgtcaaatttttgttttggtacactgctaaaaataaggttaaaaattgtaaaatcatgtattttgttattattattcatttctggtttgagaatgtgtctattctcaataaaaataaaaaggtattaaggtttaaataaacattataaaatgtacacatctttatttctgtaacctctttatttaagaaaattattaacagatatctaatacaagtgaataagttttagaacagaagaaaatataatggcatagaagccaaatgatgataatttgtagcccactataaccccaatgaggaatctacgatgaatgtcccccagttgctttccagtaagtactcgatatgagaatttgaggatttttcaaacggcgtcccaatttgtttaaatagtaggaaagtcctcaagtctgtgtaagtatcctttgcttatttggttatgtagtttagtcttctttaaaccctcctacccctcccaacgaatctacgacctgccaccgcacaaaaaatgagctgccgttcgcatgaaggtttgcgtgtctgttccttctgctagccccatttcgactccccagtatctctatagatagtctttccttgatcccattagagcagacaggtaaaacgcttcaactggcacccaacgtgtgaggccgattcatttttctgcctccttcagtatccagttgttgtcttgtccagttgaacgcttcaactgtcgccctagaacgtggggcatgtcttttttgcctccctcagaccccatttgcatgttcccactaccatgtccttttagcctcctttcggtctcatttgtactacaactgttaggcagtgcccgtcttgggtagccgatctcagtttgtggtgcaagtgtttccgataacatggaagctcgactcgtgtcatgttttgtatgcccattgttacaagtctagcttgtagacatgttcaactagtagttagcctatctactagtccccaatgtctttagccaccccccacttagtgttacttgtaatacttgtaacgtacaccctgaagtttgacccgagtaaatatcgccccagtcttcccatgtagtttagcccagattcctcttgtcttgcccccagaaactgtttcatgtcttttagtgcccccgaaactgtttcagtctgttagtccccatgaaagagcccatttttgtagtttttgttgcagaatgttaataatttttccaaagaggtgtaagtatgtacacattttgttgtggtgttgatttggtcatgctgctgattgtataggcatgtaccatttcatacatcatagtgtatttacattgtaaccccatattatgtaaaccgtagtatactggtattgtattgtatgtatcgtacaagagaatagtatgtttaatattgtagcgtacttactatattgtattgatattgtacccatgatgaaagcattggttaaattttttggaaaatattgatgaattatatagacaaacagatgagtaaaaaataaagtataaaatttttttagaaaattttggtataagtaacgttaaaaattttttttaaaattttgctaaaagttacaattaaaatgtttagaatattgaatccacttatagagtataacaatatgttatatttttttgcatgtattcttgtagatcatcagttttttacagaataaacgttttttgtgattattgatttggtcgtttgagtagatgtgtgataatagttggtatggtccgtgtatgagctaattcggtatggtctgtgtgagtaagttccgtgattttccagcgaagcctatctatatttgggtatattattgccacaggttagttggagaagtcatccttgaagaagtaaccccatgaagaagtgaagagggaaactgaggcgaggcccctccacttattaatgaagaagtagacccc

SEQ ID NO: 819 - DNA, 4712 bp, Diabrotica virgifera
gactaatctatctttgtaggtgtcgaaaaggataccaatgattagttgaaaatggtttgagaagtgaagaaaaagtaaccccatgaaaaagtgaagagggaaaccgtggcgaggcccctccacttgttcataaaattgatgtatgttttcttgtatctggcatatcacaagtgtaatactcgtgatgaggaagtgttgttcagttgtctgggaatactcccattaatagtcggagcaagaacagttttatttgtgtaagctcatataagaaccaaatttcaatatttatttgtgtttgtaagcccatgtatatggagtatgactaagaaccaagtttcaatattttttgtgtttgtaagcccatgtatatggagtatgactaagaaccaagtttcgatattatttgtgtttgtaagcccatgtgtatggagaatgtataaatgccctatgagtcttttgttccctgtttgtttgtctatcccttttttgtctggaaattctagagtctgttatcccgtaatgtctgttagcccatgtccctgatggagtttgattttttttggcgaatagttcgttgacctctcttgtgtttgttcattgaaagtaggccaagagcagaagctgtgacaaggctggtgagcttaggatctggccgcgttgagtacaggtgaagcttgctttcggtggataaatggaagtggtcgttcgtcggaattgtcattctttccaatgtccctttggtctttcccttgtgtgtttgctttcatccctgttttgaaaaagtagtctaaccccagtttggaagagtgaagtctactcatgttttggaaaaataaagtctacccattgttttggaaaagtaagatctactcatgttttggaaaagtaagatcatatccccggttttgaaaaataaagaatatcccagtttgtgatttgaaaatgagaaagttgtcttgtgaactttcatgaaaggcttttatgtcctaggtaggactgttgattgaaaacgtaatgatgtagtatttcctatgtcatgtgttacgttcatttttttttggtcttgattaaatagtttgatatcccgtttgaatccagtatactagtttttttggtcttttgtatgttgtcacacgcgttccccccccttgttggtcttgtttgaatgagttgttgagatgtcatttttgacattttatctcaacgaggtatttagactgcattgtctaaatcctccttttgcagaaccgttgccgaatgtcccgtgaaactcgctaggtgtttagagtttaagcagatgcctatctgctgagccaagagctcagaaagattttttagtttttgaaaaccaatcctggttaggcaacgaggtgatgaggctgtgtctgccctgctatatggtatatattatatggtatatatagtatatatgtcacttgtgttactgcagtggatgtcagcgaggtccacacagggcacaagattatttctttcccaagacacagaaactcttgtcacctacagttctttgtagagtcaagaaacatttaagtctactcgactttaaagagtctggcgattgatggcacgctagcccactccctaacaatgatgttttgtttttgtttaatccccactagccattatttaaatatttttgtattgttgtcctgtcacacccaagaagtcaatgttggatttttgtagttatcgaaaactgaattggtaatccagtttcctctcttccgaggaggctattgtagcagatggatttctactacaatattttataaaaaatatccattaattttaatcctatcccaagaaaaatattaatttttctaatatattttgcgagtttatatatctttaaaatttcctaagccgctcctgttcgcattgtaaaggttaggaaatttcctatttatttgtgtagcaataaccaactacgtagattgttattgaaaacatccattattcgagaatgaatcctctaaaaggttcagtgtttttcctttaagttttgagcgctaaaaatcccatgttattattggtctgcattttgaaagatccttgagttgtagttgacgattggtcaatagttttggccgaacgatcgagaagaaatgcatcgtttggacgcgagagagacgtgacgatgtaaagttagttctaaaagtacatcacttcagtaaacatctttttgttagaactcaaccaacagactcgtagaaagtcgcactttgccggcaaaatggttttatttttatggtaaaagaagtgaaagactggcagtttgcccagtaaatgtcaacgaatataatgacaatagtttcacggcattttaatggatatattattgtgaaacagttctattgttatgcagttagatttgccggtggtataaaaaagaagtgcgtggtttcctggttcctgtcctttatgtagctgttgctatttttatgatgttttgatttgttcatgttccagtaagaaatgcccagatgatattatttggtatcgattttatccagttttgtaatgatttgaatatcttcccctcccagccccgtctgaatggaaaattttgaagttccaagtgttgtgacatggatttttgttttaacaaggtatgataatgtttattttaaataattcacaagtggatattattggtaaaggttttacataattaaaaatgtttgttttcaacatggaaaatatattatgtaaagtaaatattagatggcagtgacatttgacagccatgtcaaatttttgttttggtacactgctaaaaataaggttaaaaattgtaaaatcatgtattttgttattattattcatttctggtttgagaatgtgtctattctcaataaaaataaaaaggtattaaggtttaaataaacattataaaatgtacacatctttatttctgtaacctctttatttaagaaaattattaacagatatctaatacaagtgaataagttttagaacagaagaaaatataatggcatagaagccaaatgatgataatttgtagcccactataaccccaatgaggaatctacgatgaatgtcccccagttgctttccagtaagtactcgatatgagaatttgaggatttttcaaacggcgtcccaatttgtttaaatagtaggaaagtcctcaagtctgtgtaagtatcctttgcttatttggttatgtagtttagtcttctttaaaccctcctacccctcccaacgaatctacgacctgccaccgcacaaaaaatgagctgccgttcgcatgaaggtttgcgtgtctgttccttctgctagccccatttcgactccccagtatctctatagatagtctttccttgatcccattagagcagacaggtaaaacgcttcaactggcacccaacgtgtgaggccgattcatttttctgcctccttcagtatccagttgttgtcttgtccagttgaacgcttcaactagcgccctgtacgtggggctcgatccatttttagcccccctgatcccattagcatgtgcccactaccatatccctttagcctcctttcggtctcatttgtactacaactgttaggcagtgcccgtccccttgggcagccgatctcagtttgtggtgcaggtgtttccgataacatggaagcttgacttttgtcatattttgtgtacgcccactgttacaagtctagcttgtagacatgttcaactagtagttagcctatctactagtccccaatgtctttagccaccccccacttagtgttacttgtaatacttgtaacgtacaccctgaagtttgacccgagtaaatatcgccccagtcttcccatgtagtttagcccagattcctcttgtcttgcccccagaaactgtttcatgtcttttagtgcccccgaaactgtttcagtctgttagtccccatgaaagagcccatttttgtagtttttgttgcagaatgttaataatttttccaaagaggtgtaagtatgtacacattttgttgtggtgttgatttggtcatgctgctgattgtataggcatgtaccatttcatacatcatagtgtatttacattgtaaccccatattatgtaaaccgtagtatactggtattgtattgtatgtatcgtacaagagaatagtatgtttaatattgtagcgtacttactatattgtattgatattgtacccatgatgaaagcattggttaaattttttggaaaatattgatgaattatatagacaaacagatgagtaaaaaataaagtataaaatttttttagaaaattttggtataagtaacgttaaaaattttttttaaaattttgctaaaagttacaattaaaatgtttagaatattgaatccacttatagagtataacaatatgttatatttttttgcatgtattcttgtagatcatcagttttttacagaataaacgttttttgtgattattgatttggtcgtttgagtagatgtgtgataatagttggtatggtccgtgtatgagctaattcggtatggtctgtgtgagtaagttccgtgattttccagcgaagcctatctatatttgggtatattattgccacaggttagttggagaagtcatccttgaagaagtaaccccatgaagaagtgaagagggaaactgaggcgaggcccctccacttattaatgaagaagtagacccc

SEQ ID NO: 820 - DNA, 2972 bp, Diabrotica virgifera
tataacctctttatttatgtaaatttacaaaagcagtcctagaaataaacagtataatcagtggtaaaccatcacttttcctacccaagattacaaggtacttttaccttcgatggtattctcagacttcgatttaaataacttttaattaaatctttaaaatgtaataaaaaattaaatacataaattgttccaataccgttacatcataccatatcagtcacgtttaatgcagctaagttgactactattgctcaacgaatgacatgaaactctttatttattagttagtttaaattaaaaaaatgatatctattaaatctcaaacagtattgatcaaattcatctaatgaataaaataaacatagatctatctaatttaatatcgaggtaaaatgtttttattactgaatgtgggcatatatattgacaaaaatatatatggtaaagttactgaattatacttaatgctatacaacaatcataaataggtttcaatttcgttaaaaacatagatgtatgaaagctgctattatcgaagtacaaactttctgcgcaaccgtactttgaattatcattttgtagatgtggcaacaccggtgcagagacgtcaatatgacatctgacagcaccttaatttgacgatgaaactgaatatgcgatcgaaacgatttgtcaattcgctatgaccttcggttttaaagcagcattccgatcaactatcttgaatcatgttgggagttcaccatattatgttacatttggtaaagatcatacaaaatctctttgtgtgacagaaaacatcactagtattgcacaattaacatgagtcttacttagattgagattcgtagatagatttatctgttttggactattatttgttttcaagtggaaaaagtgatttaaaattttattcaaatgcatgcaacattgtaatacattttgaaaaacaatttcgaacaaacagatgcattttcgaacaaacagaaacattttcgatgcatatttgttttcactctgttgtatataatatctcaaattactcagagacatatacaacaggttatagaccaagacatttacattaacgtccttctgaaagacgatgtctagtgtgttactatctgtccctacctgttttgtcgctgagaaaaattcatttttctcttacttctcatactttctcagattttggcagacatgtacaaatgaagaagttagaacctccaaaatggagactcattattcagttgctatttcaaaaaacaaatttggtctctatggaaaatcaaaatgcatctgaatatgaatgatacctctcgttgtatttgtaataatctaaattgagtaattcgtattgactttgatttacaactattgtcttacaaacatataaaaatgccacctattcaaattttaaaaccttaaaactagatcaataggccacattggttgagaagaaacatttcaagaaattataaatactggaattattgatgcaatcattagatgtgatttatacatcgaagcgttttcaaatctatatcgcaaaagcatagcaaatagcgatgtacgtcataccatagagcgccctcattatttcagttggctgcactatttgacgtatgtcatttgtcattggagctgtatcgaaatacgaactctgtttaattcatacttatatttcattcattagaacatgaatgaattcaaggcaaatgtgatatagccacatcttccttataataataaaaaacagattaacaggaaataattttgaggttagaaaattgcctgcatcctaaagtcaagagtaaaataccgaaaattttgagtagaaaacaattctaaggttcaaaatttgctatgcgttgaaagatcgggggaaaatagtcaagattttgaaaatactttgtaaataagtaaaactacaattattgtagttaagaaataacctcaaataagatgttcatagtttaagaattatacatttagcatcgattgttgtattcagcgtatagttgtacaatattaactgattatgaaggtggatgctttggaaaatacctaagatttttttgatcgacacaaacattacagcattagggtaacaaattttggacgataaatacttttgaaatcacgtccctaacaacacaaaacattccaggaatgtactatcaaagttctattaatgtttgaatgtcctggacattcaaggaacattcggtgaacatctgattaaattattggtggaatgttaccacaagacattctatgaacatactaccaatgtcctatattttaagtgaggccatttacttattcaatttgagttaattttcaaatttgccgcgcctgtatctatgtattgggcaatccaaaccacgtgacttctggttggcattggcatacaaagttacagaggttatgttcattgtctatcgtcgtattttgtctattttggattcattttgatttcgtttgctgtttttttttgtgaactttataaactttaccacaatgcaaaatgattatttaaggaaattattattggaaacttcagatgttggagaaaggtaggggaaacaatttttatttactgttcatttttccctgatatttatcaatattgatgaattttgcaagcaataacattatttcttttattgttttagatatttattgaagctgaaaataattggggatttagatccatatacaattcagtcagaattggattttacagtaaagtgcattccaccaaattactattatagatatttatacatatctggtggagtctcacagttactactctaagcagcagatgaaagcatacaaaagccttcaggcacataaatattttacagctggatttgtttttaaagttggagtaaagttggaagtcaggagcaacaacttcataagtacctacaagaatattgaggaaatccagctcctcgata

SEQ ID NO: 821 - DNA, 2894 bp, Diabrotica virgifera
  SmartBlast Evalue=6E-11; Info=Probable RNA-directed DNA polymerase from transposon X-element n=1 Tax=Drosophila melanogaster RepID=RTXE_DROME
attatacaaagagtttattgataacaaatgaatttaaaatactaaaaaatcataaattttcaacctagttattacaagtataagttccagatatgcagttgcctaattacgagatttgactttttagccttgcatacagccgcttagagggcgctaccaataaaaccttccgacaaaaaatgtagcctcaattgttgacataaatacagagtttcactgcgatacaataagtcgtatagatacagtgaatttttgaaattagaaagtctgtcgaaaaatggacctagccgagaacattttcgagcaataattttttacaattttcggattgcaaccctaacaacacaaaacattccaggaatgtactatcaaagttctattaatgtttgaatgtcctggacattcaaggaacattcggtgaacatctgattaaattattggtggaatgttaccacaagacattctatgaacatactaccaatgtcctatattttaagtgaggccatttacttattcaatttgagttaattttcaaatttgccgcgcgtgttctatgtaagtagggtcgcgtgccgcgtggccaatcacattttcacatttcatgataacctaaaaatttatgattggatggaaaatggaaattagaattagtggctctttttgctgttctgtattttagttttgccctggctggatctcttttgtttaaacaattatgaagtataaaatccgttttcaattttccttaagctttatgaaacgaattatttatgcatattattacctgtaaatagtacctatttcttttgatttttaattgtaaagaatagaaaaattaccattcgtttttattttttttagaattagctgaaagtggcctacaaaaaaaccaggaaagaaacgtatagccttgtggctataaaaggcaaaagaaagatatatgcaaaaagtgtattggctagttggaagaaactccacattgtcgatgcataataagttattactttataaacaaatattaagacctgtatggacttatggatgcccactatgggggtgtacttactagaccaagtaatataaaaattatacaaagattccagaacaaaatactgagaaatattgtagatgctccttggtatgtgacaaacagtgatctccataaggacctagaaatggaacctggatataatcatcaagaagatggcaggaagtcacgagcaacaacttcataagtacgagaatattgaggaaatccagctcctcgatactactgggcaaactagaagattgaagaggacaaagccttttgaactagtttgagtgataggtgatagtgaaaagcagagcatagtgcttgtgtgcctgtgtatgttagaatagtgcacgatcttgttagattagataagagacgctatggggtaagctcttcattttaaggaacagtagtaatttaggttaaattaaaattgctcattggtcagttatgaccagattgtaattgtaatgtacaattcaatacaatgaatcatcatcgtagtgatgattatggaaaaaaatatatgacaagattttgtgcaataaaaatgtttatatttatcaaggatgtattatttggtatggccacatatacttctggtatatcgtccctgttttcacatgtaaattttgacatgttttgtagtaaatagatagttgaatttactacaaaacatatccagggaatgtctaaaaatatactgtgaatgtccaaagaacattcgtaaacattcatggaatgttccaacaagacattcaaggaatctttaaaacgctgagacacgactttcttgggacatttaggggacgttgttgtgcttttgaggacattccaggaatgtttttaatgtcctctgtgtacattctaggaacatacatggaatgtttgttgttattagggaagtctccattaaatatctaaaaggccgaaaaaagcgggatgtaggtggcaattctgctaaaaaaatgagttttttcaaacatttaaatgatatctagcgttattataaataatgctctggagatgaaataaatgctaagtatttagttaaattatatggaacatacagggcgagtcagtctgtacgttcttaacgatttatgagatcatattcccataaaactacaataaattatttgttaaattatccttttagaaaaatacatagccccttcaattatacatcatccgccactgtatatatcactcatataaatcattttcaatataatcgataaaatataaaaatatttgctataaaactgtttaaaaattgcatttcactaattcaatttcttcttttacctattaacttaagctacagctgctttgaaaaatacgagtaatacagggtgtatcaaaagtattgatgcagagatgtttaaccctaggaccacactgtgaggtctcagttaacccaagttgtggttctagggttaaatatcaataaatctagatttttgaaagtgaacgtttataattacataaaaaaattgtatactgttgtataaatcgaaaaaaaaaacagataaataggtactaacatttaatattacatttaaataaatatataaataagaatgctaagatttgcaaagttgtggaggctagaaattaaaatggaggtaggcaaaacaataatttgtattactggttgcctatatttgaaataaattttaaaaatatctacgaagggcttcataaaagtgtacagactctctgtaacgaataaaaatgttcgaaatgagcggataaaatgttcgacaccttattagcctggattttgcaccatgtgatttttatctctttatgacaaccttttcgctacaccctgtatttttaacgaactactgca

SEQ ID NO: 822 - DNA, 2667 bp, Diabrotica virgifera
  SmartBlast Evalue=3E-16; Info=Transposase (Fragment) n=1 Tax= Agrilus planipennis RepID=D2WLV1_AGRPL
aatcaaggcacataataggctgttcaataagttttgcggttcgataaggacgttgctactatactaaaagccacagttagaatgcagtgccactattgccacagaatagggaacaataattgtttcctattctgtgctatcgccaaactaccactgcgccgacatcgctgcgcatcgtaagaccaacactgcattttaactgtggcttctactttagcctaattttctttgttatgtatatgaagtttcatttcaatctgtcaattcattctttgtttacaagcaatttagtgtcgacgtgttgcagtatttttttacaatagataaaatcaagtcctgcagtgattgaatttttgttttcggaagcaaaagaaatttatgaacgaatgtcaaaagtgtaggtataaggattattcggcttcaattactacagtagaaaatgggttgcaaacgtggtcgtacaagcccgtaagacgatctacatcagggacgtccaaaacgacaacaccaaaaatcgtagaaaaaatacaggatatcgtattggaatgagaaaaaaaaaaacacagaaaactgtgttcacaatacgtgaaagcgttttgaaaaaatgaactagattttgtgcatcgattcatcagtatggatgagacttgggtctatcaccatgatcttgaaacaaataaagaggctaaacggtggtgtgaaactgattctttggctccgaaacgagtttaagtccagaaatcggccaagaaggtgtaaacatccgttttttgatatgcgaaaaaaaatgtgtttgtggattgcttgcaaacggataaaaaaataaattctgaataatattgtaacgttttagaccagctaaaagaaaaaattcgtagaaaagacccggtttgtagaagaaaaaatatttttttcatcaagaccatgcaccgtgttatatcaacattttgacaatggctaaaccctaacaacacaaaacattccaggaatgtactatcaaagttctattaatgtttgaatgtcctggacattcaaggaacattcggtgaacatctgattaaattattggtggaatgttaccacaagacattctatgaacatactaccaatgtcctatattttaagtgaggccatttacttattcaatttgagttaattttcaaatttgccgcgcgtgttctatgtaagtagggtcgcgtgccgcgtggccaatcacattttcacatttcatgataacctaaaaatttatgattggatggaaaatggaaattagaattagtggctctttttgctgttctgtattttagttttgccctggctggatctcttttgtttaaacaattatgaagtataaaatccgttttcaattttccttaagctttatgaaacgaattatttatgcatattattacctgtaaatagtacctatttcttttgatttttaattgtaaagaatagaaaaattaccattcgtttttattttttttagaattagctgaaagtggcctacaaaaaaaccaggaaagaaacgtatagccttgtggctataaaaggcaaaagaaagatatatgcaaaaagtgtattggctagttggaagaaactccacattgtcgatgcataataagttattactttataaacaaatattaagacctgtatggacttatggatgcccactatgggggtgtacttactagaccaagtaatataaaaattatacaaagattccagaacaaaatactgagaaatattgtagatgctccttggtatgtgacaaacagtgatctccataaggacctagaaatggaacctggatataatcatcaagaagatggcaggaagtcacgagcaacaacttcataagtacgagaatattgaggaaatccagctcctcgatactactgggcaaactagaagattgaagaggacaaagccttttgaactagtttgagtgataggtgatagtgaaaagcagagcatagtgcttgtgtgcctgtgtatgttaaaatagtgcacgatcttgttagattagataagagacgctatggggtaagctcttcattttaaggaacagtagtaatttaggttaaattaaaattgctcattggtcagttatgaccagattatattgtaatgtacaattcaatacaatgaatcatcatcgtagtgatgattatggaaaaaaatatatgacaagaaaaattttggtatggccacatatacttctggcatatcgtcggtgatgcgacaatacctcctatctgcttcttcatgaattttgtaggagacgaaaaaccattcttagggttatctcctgttttcacatgtaaattgtgacacgtcttgtagtaaatagatagttgaatttactacaaaatatgtcaaaaaaatatcatatgaaaacaggaggtgactgtaaaaaaagtattttgtctctcttacaaaactcatgaaaaaacaaatcggaggcattatgtcacatcagcgactatatccagggaatgtctaaaaatatactgtgaatgtccaaagaacattcgcagacattcatggaatgctccaataagacattcaaggaatgtttaaaatttggatgatttggatgttgacagaggactttcctgggacatttaggggacgttcttgtgcttttgaggccatttcagg

SEQ ID NO: 823 - DNA, 2453 bp, Diabrotica virgifera
  SmartBlast Evalue=3E-16; Info=Transposase (Fragment) n=1 Tax= Agrilus planipennis RepID=D2WLV1_AGRPL
aatcaaggcacataataggctgttcaataagttttgcggttcgataaggacgttgctactatactaaaagccacagttagaatgcagtgccactattgccacagaatagggaacaataattgtttcctattctgtgctatcgccaaactaccactgcgccgacatcgctgcgcatcgtaagaccaacactgcattttaactgtggcttctactttagcctaattttctttgttatgtatatgaagtttcatttcaatctgtcaattcattctttgtttacaagcaatttagtgtcgacgtgttgcagtatttttttacaatagataaaatcaagtcctgcagtgattgaatttttgttttcggaagcaaaagaaatttatgaacgaatgtcaaaagtgtaggtataaggattattcggcttcaattactacagtagaaaatgggttgcaaacgtggtcgtacaagcccgtaagacgatctacatcagggacgtccaaaacgacaacaccaaaaatcgtagaaaaaatacaggatatcgtattggaatgagaaaaaaaaaaacacagaaaactgtgttcacaatacgtgaaagcgttttgaaaaaatgaactagattttgtgcatcgattcatcagtatggatgagacttgggtctatcaccatgatcttgaaacaaataaagaggctaaacggtggtgtgaaactgattctttggctccgaaacgagtttaagtccagaaatcggccaagaaggtgtaaacatccgttttttgatatgcgaaaaaaaatgtgtttgtggattgcttgcaaacggataaaaaaataaattctgaataatattgtaacgttttagaccagctaaaagaaaaaattcgtagaaaagacccggtttgtagaagaaaaaatatttttttcatcaagaccatgcaccgtgttatatcaacattttgacaatggctaaaccctaacaacacaaaacattccaggaatgtactatcaaagttctattaatgtttgaatgtcctggacattcaaggaacattcggtgaacatctgattaaattattggtggaatgttaccacaagacattctatgaacatactaccaatgtcctatattttaagtgaggccatttacttattcaatttgagttaattttcaaatttgccgcgcgtgttctatgtaagtagggtcgcgtgccgcgtggccaatcacattttcacatttcatgataacctaaaaatttatgattggatggaaaatggaaattagaattagtggctctttttgctgttctgtattttagttttgccctggctggatctcttttgtttaaacaattatgaagtataaaatccgttttcaattttccttaagctttatgaaacgaattatttatgcatattattacctgtaaatagtacctatttcttttgatttttaattgtaaagaatagaaaaattaccattcgtttttattttttttagaattagctgaaagtggcctacaaaaaaaccaggaaagaaacgtatagccttgtggctataaaaggcaaaagaaagatatatgcaaaaagtgtattggctagttggaagaaactccacattgtcgatgcataataagttattactttataaacaaatattaagacctgtatggacttatggatgcccactatgggggtgtacttactagaccaagtaatataaaaattatacaaagattccagaacaaaatactgagaaatattgtagatgctccttggtatgtgacaaacagtgatctccataaggacctagaaatggaacctggatataatcatcaagaagatggcaggaagtcacgagcaacaacttcataagtacgagaatattgaggaaatccagctcctcgatactactgggcaaactagaagattgaagaggacaaagccttttgaactagtttgagtgataggtgatagtgaaaagcagagcatagtgcttgtgtgcctgtgtatgttagaatagtgcacgatcttgttagattagataagagacgctatggggtaagctcttcattttaaggaacagtagtaatttaggttaaattaaaattgctcattggtcagttatgaccagattgtaattgtaatgtacaattcaatacaatgaatcatcatcgtagtgatgattatggaaaaaaatatatgacaagattttgtgcaataaaaatgtttatatttatcaaggatagtattatttggtatggccacatatacttctggtatatcgtcggtgatgtgacaatacctcctatctgctttttcatgaattttgtaggagacgaaaaaccatttttagggtcatctcttgttgtcacatgtaaattttgacatgctttgtagtaaatagatagttgaatttactacaaaacaagtcaaaaaatattatatgaaaacaggaggtgact

SEQ ID NO: 824 - DNA, 2454 bp, Diabrotica virgifera
  SmartBlast Evalue=3E-16; Info=Transposase (Fragment) n=1 Tax= Agrilus planipennis RepID=D2WLV1_AGRPL
aatcaaggcacataataggctgttcaataagttttgcggttcgataaggacgttgctactatactaaaagccacagttagaatgcagtgccactattgccacagaatagggaacaataattgtttcctattctgtgctatcgccaaactaccactgcgccgacatcgctgcgcatcgtaagaccaacactgcattttaactgtggcttctactttagcctaattttctttgttatgtatatgaagtttcatttcaatctgtcaattcattctttgtttacaagcaatttagtgtcgacgtgttgcagtatttttttacaatagataaaatcaagtcctgcagtgattgaatttttgttttcggaagcaaaagaaatttatgaacgaatgtcaaaagtgtaggtataaggattattcggcttcaattactacagtagaaaatgggttgcaaacgtggtcgtacaagcccgtaagacgatctacatcagggacgtccaaaacgacaacaccaaaaatcgtagaaaaaatacaggatatcgtattggaatgagaaaaaaaaaaacacagaaaactgtgttcacaatacgtgaaagcgttttgaaaaaatgaactagattttgtgcatcgattcatcagtatggatgagacttgggtctatcaccatgatcttgaaacaaataaagaggctaaacggtggtgtgaaactgattctttggctccgaaacgagtttaagtccagaaatcggccaagaaggtgtaaacatccgttttttgatatgcgaaaaaaaatgtgtttgtggattgcttgcaaacggataaaaaaataaattctgaataatattgtaacgttttagaccagctaaaagaaaaaattcgtagaaaagacccggtttgtagaagaaaaaatatttttttcatcaagaccatgcaccgtgttatatcaacattttgacaatggctaaaccctaacaacacaaaacattccaggaatgtactatcaaagttctattaatgtttgaatgtcctggacattcaaggaacattcggtgaacatctgattaaattattggtggaatgttaccacaagacattctatgaacatactaccaatgtcctatattttaagtgaggccatttacttattcaatttgagttaattttcaaatttgccgcgcgtgttctatgtaagtagggtcgcgtgccgcgtggccaatcacattttcacatttcatgataacctaaaaatttatgattggatggaaaatggaaattagaattagtggctctttttgctgttctgtattttagttttgccctggctggatctcttttgtttaaacaattatgaagtataaaatccgttttcaattttccttaagctttatgaaacgaattatttatgcatattattacctgtaaatagtacctatttcttttgatttttaattgtaaagaatagaaaaattaccattcgtttttattttttttagaattagctgaaagtggcctacaaaaaaaccaggaaagaaacgtatagccttgtggctataaaaggcaaaagaaagatatatgcaaaaagtgtattggctagttggaagaaactccacattgtcgatgcataataagttattactttataaacaaatattaagacctgtatggacttatggatgcccactatgggggtgtacttactagaccaagtaatataaaaattatacaaagattccagaacaaaatactgagaaatattgtagatgctccttggtatgtgacaaacagtgatctccataaggacctagaaatggaacctggatataatcatcaagaagatggcaggaagtcacgagcaacaacttcataagtacgagaatattgaggaaatccagctcctcgatactactgggcaaactagaagattgaagaggacaaagccttttgaactagtttgagtgataggtgatagtgaaaagcagagcatagtgcttgtgtgcctgtgtatgttagaatagtgcacgatcttgttagattagataagagacgctatggggtaagctcttcattttaaggaacagtagtaatttaggttaaattaaaattgctcattggtcagttatgaccagattgtaattgtaatgtacaattcaatacaatgaatcatcatcgtagtgatgattatggaaaaaaatatatgacaagattttgtgcaataaaaatgtttatatttatcaaggatgtattatttggtatggccacatatacttctgtatatcgtcggtgatgtgacaatacctcctatctgctttttcatgaattttgtagagacgaaaaaccatttttagggtcatctcccgttttcacatgttattttgacatgttttgtagtaaatagatagttaaatttaatacaaaacatgtcaaaaaatatcatatgaaaacaggaggtgactgtaaa

SEQ ID NO: 825 - DNA, 2298 bp, Diabrotica virgifera
  misc_feature (16)..(16): n is a, c, g, or t
  SmartBlast Evalue=4E-11; Info=Probable RNA-directed DNA polymerase from transposon X-element n=1 Tax=Drosophila melanogaster RepID=RTXE_DROME
gccgcgcgtgttctangtaagtagatggaaaatggaaattagaattatatagtggctctttttgctgttctttgtgttagttttgctctggctggatctcttttgtttaaacaattatgtaagtattatcaaatccgttttcaattttctttattctttatgaaacgaattatttatgcatattattacctacaaatagtaggtacctatttcttttgatgtttaattgtaaagaatagaaaaattaccatccattttaatttttttagaatcagctgaaagtggtctacaaaaaaaccaggaaggaaacgtatagccttgtggctatgaaaggcaaaagagagatataaaaagtgtattggctagttggaagaaactccacattgtcgatgcataataagttattactttataaacaaatattaagacctgtatggacttatggatgcccactatgggggtgtacttactagaccaagtaatataaaaattatacaaagattccagaacaaaatactgagaaatattgtagatgctccttggtatgtgacaaacagtgatctccataaggacctagaaatggaacctggatataatcatcaagaagatggcaggaagtcacgagcaacaacttcataagtacgagaatattgaggaaatccagctcctcgatactactgggcaaactagaagattgaagaggacaaagccttttgaactagtttgagtgataggtgatagtgaaaagcagagcatagtgcttgtgtgcctgtgtatgttagaatagtgcacgatcttgttagattagataagagacgctatggggtaagctcttcattttaaggaacagtagtaatttaggttaaattaaaattgctcattggtcagttatgaccagattgtaattgtaatgtacaattcaatacaatgaatcatcatcgtagtgatgattatggaaaaaaatatatgacaagattttgtgcaataaaaatgtttatatttatcaaggatgtattatttggtatggccacatatacttctggtatatcgtccctgttttcacatgtaaattttgacatgttttgtagtaaatagatagttgaatttactacaaaacatatccagggaatgtctaaaaatatactgtgaatgtccaaagaacattcgtaaacattcatggaatgttccaacaagacattcaaggaatctttaaaacgctgagacacgactttcttgggacatttaggggacgttgttgtgcttttgaggacattccaggaatgtttttaatgtcctctgtgtacattctaggaacatacatggaatgtttgttgttattagggaagtctccattaaatatctaaaaggccgaaaaaagcgggatgtaggtggcaattctgctaaaaaaatgagttttttcaaacatttaaatgatatctagcgttattataaataatgctctggagatgaaataaatgctaagtatttagttaaattatatggaacatacagggcgagtcagtctgtacgttcttaacgatttatgagatcatattcccataaaactacaataaattatttgttaaattatccttttagaaaaatacatagccccttcaattatacatcatccgccactgtatatatcactcatataaatcattttcaatataatcgataaaatataaaaatatttgctataaaactgtttaaaaattgcatttcactaattcaatttcttcttttacctattaacttaagctacagctgctttgaaaaatacgagtaatacagggtgtatcaaaagtattgatgcagagatgtttaaccctaggaccacactgtgaggtctcagttaacccaagttgtggttctagggttaaatatcaataaatctagatttttgaaagtgaacgtttataattacataaaaaaattgtatactgttgtataaatcgaaaaaaaaaacagataaataggtactaacatttaatattacatttaaataaatatataaataagaatgctaagatttgcaaagttgtggaggctagaaattaaaatggaggtaggcaaaacaataatttgtattactggttgcctatatttgaaataaattttaaaaatatctacgaagggcttcataaaagtgtacagactctctgtaacgaataaaaatgttcgaaatgagcggataaaatgttcgacaccttattagcctggattttgcaccatgtgatttttatctctttatgacaaccttttcgctacaccctgtatttttaacgaactactgca

SEQ ID NO: 826 - DNA, 2147 bp, Diabrotica virgifera
  SmartBlast Evalue=3E-16; Info=Transposase (Fragment) n=1 Tax= Agrilus planipennis RepID=D2WLV1_AGRPL
aatcaaggcacataataggctgttcaataagttttgcggttcgataaggacgttgctactatactaaaagccacagttagaatgcagtgccactattgccacagaatagggaacaataattgtttcctattctgtgctatcgccaaactaccactgcgccgacatcgctgcgcatcgtaagaccaacactgcattttaactgtggcttctactttagcctaattttctttgttatgtatatgaagtttcatttcaatctgtcaattcattctttgtttacaagcaatttagtgtcgacgtgttgcagtatttttttacaatagataaaatcaagtcctgcagtgattgaatttttgttttcggaagcaaaagaaatttatgaacgaatgtcaaaagtgtaggtataaggattattcggcttcaattactacagtagaaaatgggttgcaaacgtggtcgtacaagcccgtaagacgatctacatcagggacgtccaaaacgacaacaccaaaaatcgtagaaaaaatacaggatatcgtattggaatgagaaaaaaaaaaacacagaaaactgtgttcacaatacgtgaaagcgttttgaaaaaatgaactagattttgtgcatcgattcatcagtatggatgagacttgggtctatcaccatgatcttgaaacaaataaagaggctaaacggtggtgtgaaactgattctttggctccgaaacgagtttaagtccagaaatcggccaagaaggtgtaaacatccgttttttgatatgcgaaaaaaaatgtgtttgtggattgcttgcaaacggataaaaaaataaattctgaataatattgtaacgttttagaccagctaaaagaaaaaattcgtagaaaagacccggtttgtagaagaaaaaatatttttttcatcaagaccatgcaccgtgttatatcaacattttgacaatggctaaaccctaacaacacaaaacattccaggaatgtactatcaaagttctattaatgtttgaatgtcctggacattcaaggaacattcggtgaacatctgattaaattattggtggaatgttaccacaagacattctatgaacatactaccaatgtcctatattttaagtgaggccatttacttattcaatttgagttaattttcaaatttgccgcgcgtgttctatgtaagtagggtcgcgtgccgcgtggccaatcacattttcacatttcatgataacctaaaaatttatgattggatggaaaatggaaattagaattagtggctctttttgctgttctgtattttagttttgccctggctggatctcttttgtttaaacaattatgaagtataaaatccgttttcaattttccttaagctttatgaaacgaattatttatgcatattattacctgtaaatagtacctatttcttttgatttttaattgtaaagaatagaaaaattaccattcgtttttattttttttagaattagctgaaagtggcctacaaaaaaaccaggaaagaaacgtatagccttgtggctataaaaggcaaaagaaagatatatgcaaaaagtgtattggctagttggaagaaactccacattgtcgatgcataataagttattactttataaacaaatattaagacctgtatggacttatggatgcccactatgggggtgtacttactagaccaagtaatataaaaattatacaaagattccagaacaaaatactgagaaatattgtagatgctccttggtatgtgacaaacagtgatctccataaggacctagaaatggaacctggatataatcatcaagaagatggcaggaagtcacgagcaacaacttcataagtacgagaatattgaggaaatccagctcctcgatactactgggcaaactagaagattgaagaggacaaagccttttgaactagtttgagtgataggtgatagtgatgttagaatagtgcacgatctggttagattagataagcgacgctatggggtaagctcttcaatttaaagaacagtagtgatttaggttaaattaaaattgctcattggtcagtattgaccagatcgtaattgtaatgtacaattcaatacaatgaatcatcatcgtagtgatgattatg

SEQ ID NO: 827 - DNA, 2180 bp, Diabrotica virgifera
  SmartBlast Evalue=3E-16; Info=Transposase (Fragment) n=1 Tax= Agrilus planipennis RepID=D2WLV1_AGRPL
aatcaaggcacataataggctgttcaataagttttgcggttcgataaggacgttgctactatactaaaagccacagttagaatgcagtgccactattgccacagaatagggaacaataattgtttcctattctgtgctatcgccaaactaccactgcgccgacatcgctgcgcatcgtaagaccaacactgcattttaactgtggcttctactttagcctaattttctttgttatgtatatgaagtttcatttcaatctgtcaattcattctttgtttacaagcaatttagtgtcgacgtgttgcagtatttttttacaatagataaaatcaagtcctgcagtgattgaatttttgttttcggaagcaaaagaaatttatgaacgaatgtcaaaagtgtaggtataaggattattcggcttcaattactacagtagaaaatgggttgcaaacgtggtcgtacaagcccgtaagacgatctacatcagggacgtccaaaacgacaacaccaaaaatcgtagaaaaaatacaggatatcgtattggaatgagaaaaaaaaaaacacagaaaactgtgttcacaatacgtgaaagcgttttgaaaaaatgaactagattttgtgcatcgattcatcagtatggatgagacttgggtctatcaccatgatcttgaaacaaataaagaggctaaacggtggtgtgaaactgattctttggctccgaaacgagtttaagtccagaaatcggccaagaaggtgtaaacatccgttttttgatatgcgaaaaaaaatgtgtttgtggattgcttgcaaacggataaaaaaataaattctgaataatattgtaacgttttagaccagctaaaagaaaaaattcgtagaaaagacccggtttgtagaagaaaaaatatttttttcatcaagaccatgcaccgtgttatatcaacattttgacaatggctaaaccctaacaacacaaaacattccaggaatgtactatcaaagttctattaatgtttgaatgtcctggacattcaaggaacattcggtgaacatctgattaaattattggtggaatgttaccacaagacattctatgaacatactaccaatgtcctatattttaagtgaggccatttacttattcaatttgagttaattttcaaatttgccgcgcgtgttctatgtaagtagggtcgcgtgccgcgtggccaatcacattttcacatttcatgataacctaaaaatttatgattggatggaaaatggaaattagaattagtggctctttttgctgttctgtattttagttttgccctggctggatctcttttgtttaaacaattatgaagtataaaatccgttttcaattttccttaagctttatgaaacgaattatttatgcatattattacctgtaaatagtacctatttcttttgatttttaattgtaaagaatagaaaaattaccattcgtttttattttttttagaattagctgaaagtggcctacaaaaaaaccaggaaagaaacgtatagccttgtggctataaaaggcaaaagaaagatatatgcaaaaagtgtattggctagttggaagaaagtccacattgtccatgcataataagttattactttatcaacaaatatcaagaagatagcagggtcacgagcatcaacttcatgagttcaagaatatcgaggaaatccagctcctcgatactactgggcaaactagaagattgaagaggacaaatccttttgaactagtttgagtgataggtgatagtgaaaaacggagcatagtgcttgtgtgctgtgcctgtgtatgttagaatagtgcacgatcttgttagattagataagagacgctatggggtaagctcttcattttaagaaacagtagtaatttaggttaaattaaaattgctcattggtcagttatgaccagattgtaattctctgatgtttggcaaaaggggcttggagtcagagttgcacatcaataatgttttgatgatttctggaccataaaaaaagtgttgcagacttaaactgtatgtaccaataaaaagagccgatttttctggtccagaaatcatcaaaacgttgtcgatgtgcagttctgacttaagccctttttcccaaacatcagagaattgcaatgtacaattcaatacaaa

SEQ ID NO: 828 - DNA, 2039 bp, Diabrotica virgifera
  SmartBlast Evalue=4E-11; Info=Probable RNA-directed DNA polymerase from transposon X-element n=1 Tax=Drosophila melanogaster RepID=RTXE_DROME
attatacaaagagtttattgataacaaatgaatttaaaatactaaaaaatcataaattttcaacctagttattacaagtataagttccagatatgcagttgcctaattacgagatttgactttttagccttgcatacagccgcttagagggcgctaccaataaaaccttccgacaaaaaatgtagcctcaattgttgacataaatacagagtttcactgcgatacaataagtcgtatagatacagtgaatttttgaaattagaaagtctgtcgaaaaatggacctagccgagaacattttcgagcaataattttttacaattttcggattgcaaccctaacaacacaaaacattccaggaatgtactatcaaagttctattaatgtttgaatgtcctggacattcaaggaacattcggtgaacatctgattaaattattggtggaatgttaccacaagacattctatgaacatactaccaatgtcctatattttaagtgaggccatttacttattcaatttgagttaattttcaaatttgccgcgcgtgttctatgtaagtagggtcgcgtgccgcgtggccaatcacattttcacatttcatgataacctaaaaatttatgattggatggaaaatggaaattagaattagtggctctttttgctgttctgtattttagttttgccctggctggatctcttttgtttaaacaattatgaagtataaaatccgttttcaattttccttaagctttatgaaacgaattatttatgcatattattacctgtaaatagtacctatttcttttgatttttaattgtaaagaatagaaaaattaccattcgtttttattttttttagaattagctgaaagtggcctacaaaaaaaccaggaaagaaacgtatagccttgtggctataaaaggcaaaagaaagatatatgcaaaaagtgtattggctagttggaagaaactccacattgtcgatgcataataagttattactttataaacaaatattaagacctgtatggacttatggatgcccactatgggggtgtacttactagaccaagtaatataaaaattatacaaagattccagaacaaaatactgagaaatattgtagatgctccttggtatgtgacaaacagtgatctccataaggacctagaaatggaacctggatataatcatcaagaagatggcaggaagtcacgagcaacaacttcataagtacgagaatattgaggaaatccagctcctcgatactactgggcaaactagaagattgaagaggacaaagccttttgaactagtttgagtgataggtgatagtgaaaagcagagcatagtgcttgtgtgcctgtgtatgttaaaatagtgcacgatcttgttagattagataagagacgctatggggtaagctcttcattttaaggaacagtagtaatttaggttaaattaaaattgctcattggtcagttatgaccagattatattgtaatgtacaattcaatacaatgaatcatcatcgtagtgatgattatggaaaaaaatatatgacaagaaaaattttggtatggccacatatacttctggcatatcgtcggtgatgcgacaatacctcctatctgcttcttcatgaattttgtaggagacgaaaaaccattcttagggttatctcctgttttcacatgtaaattgtgacacgtcttgtagtaaatagatagttgaatttactacaaaatatgtcaaaaaaatatcatatgaaaacaggaggtgactgtaaaaaaagtattttgtctctcttacaaaactcatgaaaaaacaaatcggaggcattatgtcacatcagcgactatatccagggaatgtctaaaaatatactgtgaatgtccaaagaacattcgcagacattcatggaatgctccaataagacattcaaggaatgtttaaaatttggatgatttggatgttgacagaggactttcctgggacatttaggggacgttcttgtgcttttgaggccatttcagg

SEQ ID NO: 829 - DNA, 1825 bp, Diabrotica virgifera
  SmartBlast Evalue=4E-11; Info=Probable RNA-directed DNA polymerase from transposon X-element n=1 Tax=Drosophila melanogaster RepID=RTXE_DROME
attatacaaagagtttattgataacaaatgaatttaaaatactaaaaaatcataaattttcaacctagttattacaagtataagttccagatatgcagttgcctaattacgagatttgactttttagccttgcatacagccgcttagagggcgctaccaataaaaccttccgacaaaaaatgtagcctcaattgttgacataaatacagagtttcactgcgatacaataagtcgtatagatacagtgaatttttgaaattagaaagtctgtcgaaaaatggacctagccgagaacattttcgagcaataattttttacaattttcggattgcaaccctaacaacacaaaacattccaggaatgtactatcaaagttctattaatgtttgaatgtcctggacattcaaggaacattcggtgaacatctgattaaattattggtggaatgttaccacaagacattctatgaacatactaccaatgtcctatattttaagtgaggccatttacttattcaatttgagttaattttcaaatttgccgcgcgtgttctatgtaagtagggtcgcgtgccgcgtggccaatcacattttcacatttcatgataacctaaaaatttatgattggatggaaaatggaaattagaattagtggctctttttgctgttctgtattttagttttgccctggctggatctcttttgtttaaacaattatgaagtataaaatccgttttcaattttccttaagctttatgaaacgaattatttatgcatattattacctgtaaatagtacctatttcttttgatttttaattgtaaagaatagaaaaattaccattcgtttttattttttttagaattagctgaaagtggcctacaaaaaaaccaggaaagaaacgtatagccttgtggctataaaaggcaaaagaaagatatatgcaaaaagtgtattggctagttggaagaaactccacattgtcgatgcataataagttattactttataaacaaatattaagacctgtatggacttatggatgcccactatgggggtgtacttactagaccaagtaatataaaaattatacaaagattccagaacaaaatactgagaaatattgtagatgctccttggtatgtgacaaacagtgatctccataaggacctagaaatggaacctggatataatcatcaagaagatggcaggaagtcacgagcaacaacttcataagtacgagaatattgaggaaatccagctcctcgatactactgggcaaactagaagattgaagaggacaaagccttttgaactagtttgagtgataggtgatagtgaaaagcagagcatagtgcttgtgtgcctgtgtatgttagaatagtgcacgatcttgttagattagataagagacgctatggggtaagctcttcattttaaggaacagtagtaatttaggttaaattaaaattgctcattggtcagttatgaccagattgtaattgtaatgtacaattcaatacaatgaatcatcatcgtagtgatgattatggaaaaaaatatatgacaagattttgtgcaataaaaatgtttatatttatcaaggatagtattatttggtatggccacatatacttctggtatatcgtcggtgatgtgacaatacctcctatctgctttttcatgaattttgtaggagacgaaaaaccatttttagggtcatctcttgttgtcacatgtaaattttgacatgctttgtagtaaatagatagttgaatttactacaaaacaagtcaaaaaatattatatgaaaacaggaggtgact

SEQ ID NO: 830 - DNA, 4709 bp, Diabrotica virgifera
  SmartBlast Evalue=1E-10; Info=Probable RNA-directed DNA polymerase from transposon X-element n=1 Tax=Drosophila melanogaster RepID=RTXE_DROME
tataacctctttatttatgtaaatttacaaaagcagtcctagaaataaacagtataatcagtggtaaaccatcacttttcctacccaagattacaaggtacttttaccttcgatggtattctcagacttcgatttaaataacttttaattaaatctttaaaatgtaataaaaaattaaatacataaattgttccaataccgttacatcataccatatcagtcacgtttaatgcagctaagttgactactattgctcaacgaatgacatgaaactctttatttattagttagtttaaattaaaaaaatgatatctattaaatctcaaacagtattgatcaaattcatctaatgaataaaataaacatagatctatctaatttaatatcgaggtaaaatgtttttattactgaatgtgggcatatatattgacaaaaatatatatggtaaagttactgaattatacttaatgctatacaacaatcataaataggtttcaatttcgttaaaaacatagatgtatgaaagctgctattatcgaagtacaaactttctgcgcaaccgtactttgaattatcattttgtagatgtggcaacaccggtgcagagacgtcaatatgacatctgacagcaccttaatttgacgatgaaactgaatatgcgatcgaaacgatttgtcaattcgctatgaccttcggttttaaagcagcattccgatcaactatcttgaatcatgttgggagttcaccatattatgttacatttggtaaagatcatacaaaatctctttgtgtgacagaaaacatcactagtattgcacaattaacatgagtcttacttagattgagattcgtagatagatttatctgttttggactattatttgttttcaagtggaaaaagtgatttaaaattttattcaaatgcatgcaacattgtaatacattttgaaaaacaatttcgaacaaacagatgcattttcgaacaaacagaaacattttcgatgcatatttgttttcactctgttgtatataatatctcaaattactcagagacatatacaacaggttatagaccaagacatttacattaacgtccttctgaaagacgatgtctagtgtgttactatctgtccctacctgttttgtcgctgagaaaaattcatttttctcttacttctcatactttctcagattttggcagacatgtacaaatgaagaagttagaacctccaaaatggagactcattattcagttgctatttcaaaaaacaaatttggtctctatggaaaatcaaaatgcatctgaatatgaatgatacctctcgttgtatttgtaataatctaaattgagtaattcgtattgactttgatttacaactattgtcttacaaacatataaaaatgccacctattcaaattttaaaaccttaaaactagatcaataggccacattggttgagaagaaacatttcaagaaattataaatactggaattattgatgcaatcattagatgtgatttatacatcgaagcgttttcaaatctatatcgcaaaagcatagcaaatagcgatgtacgtcataccatagagcgccctcattatttcagttggctgcactatttgacgtatgtcatttgtcattggagctgtatcgaaatacgaactctgtttaattcatacttatatttcattcattagaacatgaatgaattcaaggcaaatgtgatatagccacatcttccttataataataaaaaacagattaacaggaaataattttgaggttagaaaattgcctgcatcctaaagtcaagagtaaaataccgaaaattttgagtagaaaacaattctaaggttcaaaatttgctatgcgttgaaagatcgggggaaaatagtcaagattttgaaaatactttgtaaataagtaaaactacaattattgtagttaagaaataacctcaaataagatgttcatagtttaagaattatacatttagcatcgattgttgtattcagcgtatagttgtacaatattaactgattatgaaggtggatgctttggaaaatacctaagatttttttgatcgacacaaacattacagcattagggtaacaaattttggacgataaatacttttgaaatcacgtccctaacaacacaaaacattccaggaatgtactatcaaagttctattaatgtttgaatgtcctggacattcaaggaacattcggtgaacatctgattaaattattggtggaatgttaccacaagacattctatgaacatactaccaatgtcctatattttaagtgaggccatttacttattcaatttgagttaattttcaaatttgccgcgcgtgttctatgtaagtagggtcgcgtgccgcgtggccaatcacattttcacatttcatgataacctaaaaatttatgattggatggaaaatggaaattagaattagtggctctttttgctgttctgtattttagttttgccctggctggatctcttttgtttaaacaattatgaagtataaaatccgttttcaattttccttaagctttatgaaacgaattatttatgcatattattacctgtaaatagtacctatttcttttgatttttaattgtaaagaatagaaaaattaccattcgtttttattttttttagaattagctgaaagtggcctacaaaaaaaccaggaaagaaacgtatagccttgtggctataaaaggcaaaagaaagatatatgcaaaaagtgtattggctagttggaagaaactccacattgtcgatgcataataagttattactttataaacaaatattaagacctgtatggacttatggatgcccactatgggggtgtacttactagaccaagtaatataaaaattatacaaagattccagaacaaaatactgagaaatattgtagatgctccttggtatgtgacaaacagtgatctccataaggacctagaaatggaacctggatataatcatcaagaagatggcaggaagtcacgagcaacaacttcataagtacgagaatattgaggaaatccagctcctcgatactactgggcaaactagaagattgaagaggacaaagccttttgaactagtttgagtgataggtgatagtgaaaagcagagcatagtgcttgtgtgcctgtgtatgttagaatagtgcacgatcttgttagattagataagagacgctatggggtaagctcttcattttaaggaacagtagtaatttaggttaaattaaaattgctcattggtcagttatgaccagattgtaattgtaatgtacaattcaatacaatgaatcatcatcgtagtgatgattatggaaaaaaatatatgacaagattttgtgcaataaaaatgtttatatttatcaaggatgtattatttggtatggccacatatacttctggtatatcgtccctgttttcacatgtaaattttgacatgttttgtagtaaatagatagttgaatttactacaaaacatatccagggaatgtctaaaaatatactgtgaatgtccaaagaacattcgtaaacattcatggaatgttccaacaagacattcaaggaatctttaaaacgctgagacacgactttcttgggacatttaggggacgttgttgtgcttttgaggacattccaggaatgtttttaatgtcctctgtgtacattctaggaacatacatggaatgtttgttgttattagggaagtctccattaaatatctaaaaggccgaaaaaagcgggatgtaggtggcaattctgctaaaaaaatgagttttttcaaacatttaaatgatatctagcgttattataaataatgctctggagatgaaataaatgctaagtatttagttaaattatatggaacatacagggcgagtcagtctgtacgttcttaacgatttatgagatcatattcccataaaactacaataaattatttgttaaattatccttttagaaaaatacatagccccttcaattatacatcatccgccactgtatatatcactcatataaatcattttcaatataatcgataaaatataaaaatatttgctataaaactgtttaaaaattgcatttcactaattcaatttcttcttttacctattaacttaagctacagctgctttgaaaaatacgagtaatacagggtgtatcaaaagtattgatgcagagatgtttaaccctaggaccacactgtgaggtctcagttaacccaagttgtggttctagggttaaatatcaataaatctagatttttgaaagtgaacgtttataattacataaaaaaattgtatactgttgtataaatcgaaaaaaaaaacagataaataggtactaacatttaatattacatttaaataaatatataaataagaatgctaagatttgcaaagttgtggaggctagaaattaaaatggaggtaggcaaaacaataatttgtattactggttgcctatatttgaaataaattttaaaaatatctacgaagggcttcataaaagtgtacagactctctgtaacgaataaaaatgttcgaaatgagcggataaaatgttcgacaccttattagcctggattttgcaccatgtgatttttatctctttatgacaaccttttcgctacaccctgtatttttaacgaactactgca

SEQ ID NO: 831 - DNA, 1826 bp, Diabrotica virgifera
  SmartBlast Evalue=4E-11; Info=Probable RNA-directed DNA polymerase from transposon X-element n=1 Tax=Drosophila melanogaster RepID=RTXE_DROME
attatacaaagagtttattgataacaaatgaatttaaaatactaaaaaatcataaattttcaacctagttattacaagtataagttccagatatgcagttgcctaattacgagatttgactttttagccttgcatacagccgcttagagggcgctaccaataaaaccttccgacaaaaaatgtagcctcaattgttgacataaatacagagtttcactgcgatacaataagtcgtatagatacagtgaatttttgaaattagaaagtctgtcgaaaaatggacctagccgagaacattttcgagcaataattttttacaattttcggattgcaaccctaacaacacaaaacattccaggaatgtactatcaaagttctattaatgtttgaatgtcctggacattcaaggaacattcggtgaacatctgattaaattattggtggaatgttaccacaagacattctatgaacatactaccaatgtcctatattttaagtgaggccatttacttattcaatttgagttaattttcaaatttgccgcgcgtgttctatgtaagtagggtcgcgtgccgcgtggccaatcacattttcacatttcatgataacctaaaaatttatgattggatggaaaatggaaattagaattagtggctctttttgctgttctgtattttagttttgccctggctggatctcttttgtttaaacaattatgaagtataaaatccgttttcaattttccttaagctttatgaaacgaattatttatgcatattattacctgtaaatagtacctatttcttttgatttttaattgtaaagaatagaaaaattaccattcgtttttattttttttagaattagctgaaagtggcctacaaaaaaaccaggaaagaaacgtatagccttgtggctataaaaggcaaaagaaagatatatgcaaaaagtgtattggctagttggaagaaactccacattgtcgatgcataataagttattactttataaacaaatattaagacctgtatggacttatggatgcccactatgggggtgtacttactagaccaagtaatataaaaattatacaaagattccagaacaaaatactgagaaatattgtagatgctccttggtatgtgacaaacagtgatctccataaggacctagaaatggaacctggatataatcatcaagaagatggcaggaagtcacgagcaacaacttcataagtacgagaatattgaggaaatccagctcctcgatactactgggcaaactagaagattgaagaggacaaagccttttgaactagtttgagtgataggtgatagtgaaaagcagagcatagtgcttgtgtgcctgtgtatgttagaatagtgcacgatcttgttagattagataagagacgctatggggtaagctcttcattttaaggaacagtagtaatttaggttaaattaaaattgctcattggtcagttatgaccagattgtaattgtaatgtacaattcaatacaatgaatcatcatcgtagtgatgattatggaaaaaaatatatgacaagattttgtgcaataaaaatgtttatatttatcaaggatgtattatttggtatggccacatatacttctgtatatcgtcggtgatgtgacaatacctcctatctgctttttcatgaattttgtagagacgaaaaaccatttttagggtcatctcccgttttcacatgttattttgacatgttttgtagtaaatagatagttaaatttaatacaaaacatgtcaaaaaatatcatatgaaaacaggaggtgactgtaaa

SEQ ID NO: 832 - DNA, 1805 bp, Diabrotica virgifera
  SmartBlast Evalue=2E-16; Info=Transposase (Fragment) n=1 Tax= Agrilus planipennis RepID=D2WLV1_AGRPL
aatcaaggcacataataggctgttcaataagttttgcggttcgataaggacgttgctactatactaaaagccacagttagaatgcagtgccactattgccacagaatagggaacaataattgtttcctattctgtgctatcgccaaactaccactgcgccgacatcgctgcgcatcgtaagaccaacactgcattttaactgtggcttctactttagcctaattttctttgttatgtatatgaagtttcatttcaatctgtcaattcattctttgtttacaagcaatttagtgtcgacgtgttgcagtatttttttacaatagataaaatcaagtcctgcagtgattgaatttttgttttcggaagcaaaagaaatttatgaacgaatgtcaaaagtgtaggtataaggattattcggcttcaattactacagtagaaaatgggttgcaaacgtggtcgtacaagcccgtaagacgatctacatcagggacgtccaaaacgacaacaccaaaaatcgtagaaaaaatacaggatatcgtattggaatgagaaaaaaaaaaacacagaaaactgtgttcacaatacgtgaaagcgttttgaaaaaatgaactagattttgtgcatcgattcatcagtatggatgagacttgggtctatcaccatgatcttgaaacaaataaagaggctaaacggtggtgtgaaactgattctttggctccgaaacgagtttaagtccagaaatcggccaagaaggtgtaaacatccgttttttgatatgcgaaaaaaaatgtgtttgtggattgcttgcaaacggataaaaaaataaattctgaataatattgtaacgttttagaccagctaaaagaaaaaattcgtagaaaagacccggtttgtagaagaaaaaatatttttttcatcaagaccatgcaccgtgttatatcaacattttgacaatggctaaaccctaacaacacaaaacattccaggaatgtactatcaaagttctattaatgtttgaatgtcctggacattcaaggaacattcggtgaacatctgattaaattattggtggaatgttaccacaagacattctatgaacatactaccaatgtcctatattttaagtgaggccatttacttattcaatttgagttaattttcaaatttgccgcgcctgtatctaatttggtattgggcaatccaaaccacgtgacttctggttggcaaatggcatacaaaaagttacagaggttatgtttgtaatatctttcatttttcattgtttatcgtcgtttttgtctattttggattcatttggatttcgtttgctgtattttgtgaactttataaactttacacaatgcaaagtgattatttaaggaaattattattggaaactccagatgttgaagaaaggtagggaaacaatttttatttactgttcatttttccctgatatttatcaatattgatgaattttgcaagcaataacattatttcttttattgttttagatatttattgaagctgaaaataattggggatttagatccatatacaattcagtcagaattggattttacagtaaagtgcattccaccaaattactattatagatatttatacatatctggtggagtctcacagttactactctaagcagcagatgaaagcatacaaaagccttcaggcacataaatattttacagctggatttgtttttaaagttggagtaaagttggaagtcaggagcaacaacttcataagtacctacaagaatattgaggaaatccagctcctcgata

SEQ ID NO: 833 - DNA, 1833 bp, Diabrotica virgifera
  SmartBlast Evalue=2E-16; Info=Transposase (Fragment) n=1 Tax= Agrilus planipennis RepID=D2WLV1_AGRPL
aatcaaggcacataataggctgttcaataagttttgcggttcgataaggacgttgctactatactaaaagccacagttagaatgcagtgccactattgccacagaatagggaacaataattgtttcctattctgtgctatcgccaaactaccactgcgccgacatcgctgcgcatcgtaagaccaacactgcattttaactgtggcttctactttagcctaattttctttgttatgtatatgaagtttcatttcaatctgtcaattcattctttgtttacaagcaatttagtgtcgacgtgttgcagtatttttttacaatagataaaatcaagtcctgcagtgattgaatttttgttttcggaagcaaaagaaatttatgaacgaatgtcaaaagtgtaggtataaggattattcggcttcaattactacagtagaaaatgggttgcaaacgtggtcgtacaagcccgtaagacgatctacatcagggacgtccaaaacgacaacaccaaaaatcgtagaaaaaatacaggatatcgtattggaatgagaaaaaaaaaaacacagaaaactgtgttcacaatacgtgaaagcgttttgaaaaaatgaactagattttgtgcatcgattcatcagtatggatgagacttgggtctatcaccatgatcttgaaacaaataaagaggctaaacggtggtgtgaaactgattctttggctccgaaacgagtttaagtccagaaatcggccaagaaggtgtaaacatccgttttttgatatgcgaaaaaaaatgtgtttgtggattgcttgcaaacggataaaaaaataaattctgaataatattgtaacgttttagaccagctaaaagaaaaaattcgtagaaaagacccggtttgtagaagaaaaaatatttttttcatcaagaccatgcaccgtgttatatcaacattttgacaatggctaaaccctaacaacacaaaacattccaggaatgtactatcaaagttctattaatgtttgaatgtcctggacattcaaggaacattcggtgaacatctgattaaattattggtggaatgttaccacaagacattctatgaacatactaccaatgtcctatattttaagtgaggccatttacttattcaatttgagttaattttcaaatttgccgcgcgtgttctatgtaagtagggtcgcgtgccacgtggtcatcacattttcacatttcattataaccataataacctaaaaatttatgattggatggaaaatggaaattagaattagtggctttttgctgttctatgtatgttagttttgcttgctctggctggatctcttttgtttaaacaattatgtaagtacactcgcgatcataaaaagcgggtcactcgatgagccactcaagctagaccccttcgaattttctaaacctgctgtccaatttgagtgatcttttcagtatgttacagcctcattccccaacaatatcgccataataatattgctgccagacaggcaaactatcattgtataccgggtgcaacaatcatactgtgtcattcctcaaagttcgaaacaccccgtggaatgttccagcatagataaaacattgaaactaaaactcgattgcagccctaggctctctcaacatttccttccccgatttatttgtttatgttggacaataaaaaaagttaggcaccctaacaaccaaccatgctcctcatcaacacagggtgcttccaaacaagtgcgacaaaccttaaggggcaattctgcatgaaaaaacaatgaccgtttgccttacaaacgtatgaccgcaaattcttc

SEQ ID NO: 834 - DNA, 1785 bp, Diabrotica virgifera
  SmartBlast Evalue=2E-16; Info=Transposase (Fragment) n=1 Tax= Agrilus planipennis RepID=D2WLV1_AGRPL
aatcaaggcacataataggctgttcaataagttttgcggttcgataaggacgttgctactatactaaaagccacagttagaatgcagtgccactattgccacagaatagggaacaataattgtttcctattctgtgctatcgccaaactaccactgcgccgacatcgctgcgcatcgtaagaccaacactgcattttaactgtggcttctactttagcctaattttctttgttatgtatatgaagtttcatttcaatctgtcaattcattctttgtttacaagcaatttagtgtcgacgtgttgcagtatttttttacaatagataaaatcaagtcctgcagtgattgaatttttgttttcggaagcaaaagaaatttatgaacgaatgtcaaaagtgtaggtataaggattattcggcttcaattactacagtagaaaatgggttgcaaacgtggtcgtacaagcccgtaagacgatctacatcagggacgtccaaaacgacaacaccaaaaatcgtagaaaaaatacaggatatcgtattggaatgagaaaaaaaaaaacacagaaaactgtgttcacaatacgtgaaagcgttttgaaaaaatgaactagattttgtgcatcgattcatcagtatggatgagacttgggtctatcaccatgatcttgaaacaaataaagaggctaaacggtggtgtgaaactgattctttggctccgaaacgagtttaagtccagaaatcggccaagaaggtgtaaacatccgttttttgatatgcgaaaaaaaatgtgtttgtggattgcttgcaaacggataaaaaaataaattctgaataatattgtaacgttttagaccagctaaaagaaaaaattcgtagaaaagacccggtttgtagaagaaaaaatatttttttcatcaagaccatgcaccgtgttatatcaacattttgacaatggctaaaccctaacaacacaaaacattccaggaatgtactatcaaagttctattaatgtttgaatgtcctggacattcaaggaacattcggtgaacatctgattaaattattggtggaatgttaccacaagacattctatgaacatactaccaatgtcctatattttaagtgaggccatttacttattcaatttgagttaattttcaaatttgccgcgcctgtatctatgtattgggcaatccaaaccacgtgacttctggttggcattggcatacaaagttacagaggttatgttcattgtctatcgtcgtattttgtctattttggattcattttgatttcgtttgctgtttttttttgtgaactttataaactttaccacaatgcaaaatgattatttaaggaaattattattggaaacttcagatgttggagaaaggtaggggaaacaatttttatttactgttcatttttccctgatatttatcaatattgatgaattttgcaagcaataacattatttcttttattgttttagatatttattgaagctgaaaataattggggatttagatccatatacaattcagtcagaattggattttacagtaaagtgcattccaccaaattactattatagatatttatacatatctggtggagtctcacagttactactctaagcagcagatgaaagcatacaaaagccttcaggcacataaatattttacagctggatttgtttttaaagttggagtaaagttggaagtcaggagcaacaacttcataagtacctacaagaatattgaggaaatccagctcctcgata

SEQ ID NO: 835 - DNA, 1519 bp, Diabrotica virgifera
  SmartBlast Evalue=3E-11; Info=Probable RNA-directed DNA polymerase from transposon X-element n=1 Tax=Drosophila melanogaster RepID=RTXE_DROME
attatacaaagagtttattgataacaaatgaatttaaaatactaaaaaatcataaattttcaacctagttattacaagtataagttccagatatgcagttgcctaattacgagatttgactttttagccttgcatacagccgcttagagggcgctaccaataaaaccttccgacaaaaaatgtagcctcaattgttgacataaatacagagtttcactgcgatacaataagtcgtatagatacagtgaatttttgaaattagaaagtctgtcgaaaaatggacctagccgagaacattttcgagcaataattttttacaattttcggattgcaaccctaacaacacaaaacattccaggaatgtactatcaaagttctattaatgtttgaatgtcctggacattcaaggaacattcggtgaacatctgattaaattattggtggaatgttaccacaagacattctatgaacatactaccaatgtcctatattttaagtgaggccatttacttattcaatttgagttaattttcaaatttgccgcgcgtgttctatgtaagtagggtcgcgtgccgcgtggccaatcacattttcacatttcatgataacctaaaaatttatgattggatggaaaatggaaattagaattagtggctctttttgctgttctgtattttagttttgccctggctggatctcttttgtttaaacaattatgaagtataaaatccgttttcaattttccttaagctttatgaaacgaattatttatgcatattattacctgtaaatagtacctatttcttttgatttttaattgtaaagaatagaaaaattaccattcgtttttattttttttagaattagctgaaagtggcctacaaaaaaaccaggaaagaaacgtatagccttgtggctataaaaggcaaaagaaagatatatgcaaaaagtgtattggctagttggaagaaactccacattgtcgatgcataataagttattactttataaacaaatattaagacctgtatggacttatggatgcccactatgggggtgtacttactagaccaagtaatataaaaattatacaaagattccagaacaaaatactgagaaatattgtagatgctccttggtatgtgacaaacagtgatctccataaggacctagaaatggaacctggatataatcatcaagaagatggcaggaagtcacgagcaacaacttcataagtacgagaatattgaggaaatccagctcctcgatactactgggcaaactagaagattgaagaggacaaagccttttgaactagtttgagtgataggtgatagtgatgttagaatagtgcacgatctggttagattagataagcgacgctatggggtaagctcttcaatttaaagaacagtagtgatttaggttaaattaaaattgctcattggtcagtattgaccagatcgtaattgtaatgtacaattcaatacaatgaatcatcatcgtagtgatgattatg

SEQ ID NO: 836 - DNA, 1552 bp, Diabrotica virgifera
attatacaaagagtttattgataacaaatgaatttaaaatactaaaaaatcataaattttcaacctagttattacaagtataagttccagatatgcagttgcctaattacgagatttgactttttagccttgcatacagccgcttagagggcgctaccaataaaaccttccgacaaaaaatgtagcctcaattgttgacataaatacagagtttcactgcgatacaataagtcgtatagatacagtgaatttttgaaattagaaagtctgtcgaaaaatggacctagccgagaacattttcgagcaataattttttacaattttcggattgcaaccctaacaacacaaaacattccaggaatgtactatcaaagttctattaatgtttgaatgtcctggacattcaaggaacattcggtgaacatctgattaaattattggtggaatgttaccacaagacattctatgaacatactaccaatgtcctatattttaagtgaggccatttacttattcaatttgagttaattttcaaatttgccgcgcgtgttctatgtaagtagggtcgcgtgccgcgtggccaatcacattttcacatttcatgataacctaaaaatttatgattggatggaaaatggaaattagaattagtggctctttttgctgttctgtattttagttttgccctggctggatctcttttgtttaaacaattatgaagtataaaatccgttttcaattttccttaagctttatgaaacgaattatttatgcatattattacctgtaaatagtacctatttcttttgatttttaattgtaaagaatagaaaaattaccattcgtttttattttttttagaattagctgaaagtggcctacaaaaaaaccaggaaagaaacgtatagccttgtggctataaaaggcaaaagaaagatatatgcaaaaagtgtattggctagttggaagaaagtccacattgtccatgcataataagttattactttatcaacaaatatcaagaagatagcagggtcacgagcatcaacttcatgagttcaagaatatcgaggaaatccagctcctcgatactactgggcaaactagaagattgaagaggacaaatccttttgaactagtttgagtgataggtgatagtgaaaaacggagcatagtgcttgtgtgctgtgcctgtgtatgttagaatagtgcacgatcttgttagattagataagagacgctatggggtaagctcttcattttaagaaacagtagtaatttaggttaaattaaaattgctcattggtcagttatgaccagattgtaattctctgatgtttggcaaaaggggcttggagtcagagttgcacatcaataatgttttgatgatttctggaccataaaaaaagtgttgcagacttaaactgtatgtaccaataaaaagagccgatttttctggtccagaaatcatcaaaacgttgtcgatgtgcagttctgacttaagccctttttcccaaacatcagagaattgcaatgtacaattcaatacaaa

SEQ ID NO: 837 - DNA, 1443 bp, Diabrotica virgifera
  misc_feature (16)..(16): n is a, c, g, or t
  SmartBlast Evalue=2E-11; Info=Probable RNA-directed DNA polymerase from transposon X-element n=1 Tax=Drosophila melanogaster RepID=RTXE_DROME
gccgcgcgtgttctangtaagtagatggaaaatggaaattagaattatatagtggctctttttgctgttctttgtgttagttttgctctggctggatctcttttgtttaaacaattatgtaagtattatcaaatccgttttcaattttctttattctttatgaaacgaattatttatgcatattattacctacaaatagtaggtacctatttcttttgatgtttaattgtaaagaatagaaaaattaccatccattttaatttttttagaatcagctgaaagtggtctacaaaaaaaccaggaaggaaacgtatagccttgtggctatgaaaggcaaaagagagatataaaaagtgtattggctagttggaagaaactccacattgtcgatgcataataagttattactttataaacaaatattaagacctgtatggacttatggatgcccactatgggggtgtacttactagaccaagtaatataaaaattatacaaagattccagaacaaaatactgagaaatattgtagatgctccttggtatgtgacaaacagtgatctccataaggacctagaaatggaacctggatataatcatcaagaagatggcaggaagtcacgagcaacaacttcataagtacgagaatattgaggaaatccagctcctcgatactactgggcaaactagaagattgaagaggacaaagccttttgaactagtttgagtgataggtgatagtgaaaagcagagcatagtgcttgtgtgcctgtgtatgttaaaatagtgcacgatcttgttagattagataagagacgctatggggtaagctcttcattttaaggaacagtagtaatttaggttaaattaaaattgctcattggtcagttatgaccagattatattgtaatgtacaattcaatacaatgaatcatcatcgtagtgatgattatggaaaaaaatatatgacaagaaaaattttggtatggccacatatacttctggcatatcgtcggtgatgcgacaatacctcctatctgcttcttcatgaattttgtaggagacgaaaaaccattcttagggttatctcctgttttcacatgtaaattgtgacacgtcttgtagtaaatagatagttgaatttactacaaaatatgtcaaaaaaatatcatatgaaaacaggaggtgactgtaaaaaaagtattttgtctctcttacaaaactcatgaaaaaacaaatcggaggcattatgtcacatcagcgactatatccagggaatgtctaaaaatatactgtgaatgtccaaagaacattcgcagacattcatggaatgctccaataagacattcaaggaatgtttaaaatttggatgatttggatgttgacagaggactttcctgggacatttaggggacgttcttgtgcttttgaggccatttcagg

SEQ ID NO: 838 - DNA, 1229 bp, Diabrotica virgifera
  misc_feature (16)..(16): n is a, c, g, or t
  SmartBlast Evalue=2E-11; Info=Probable RNA-directed DNA polymerase from transposon X-element n=1 Tax=Drosophila melanogaster RepID=RTXE_DROME
gccgcgcgtgttctangtaagtagatggaaaatggaaattagaattatatagtggctctttttgctgttctttgtgttagttttgctctggctggatctcttttgtttaaacaattatgtaagtattatcaaatccgttttcaattttctttattctttatgaaacgaattatttatgcatattattacctacaaatagtaggtacctatttcttttgatgtttaattgtaaagaatagaaaaattaccatccattttaatttttttagaatcagctgaaagtggtctacaaaaaaaccaggaaggaaacgtatagccttgtggctatgaaaggcaaaagagagatataaaaagtgtattggctagttggaagaaactccacattgtcgatgcataataagttattactttataaacaaatattaagacctgtatggacttatggatgcccactatgggggtgtacttactagaccaagtaatataaaaattatacaaagattccagaacaaaatactgagaaatattgtagatgctccttggtatgtgacaaacagtgatctccataaggacctagaaatggaacctggatataatcatcaagaagatggcaggaagtcacgagcaacaacttcataagtacgagaatattgaggaaatccagctcctcgatactactgggcaaactagaagattgaagaggacaaagccttttgaactagtttgagtgataggtgatagtgaaaagcagagcatagtgcttgtgtgcctgtgtatgttagaatagtgcacgatcttgttagattagataagagacgctatggggtaagctcttcattttaaggaacagtagtaatttaggttaaattaaaattgctcattggtcagttatgaccagattgtaattgtaatgtacaattcaatacaatgaatcatcatcgtagtgatgattatggaaaaaaatatatgacaagattttgtgcaataaaaatgtttatatttatcaaggatagtattatttggtatggccacatatacttctggtatatcgtcggtgatgtgacaatacctcctatctgctttttcatgaattttgtaggagacgaaaaaccatttttagggtcatctcttgttgtcacatgtaaattttgacatgctttgtagtaaatagatagttgaatttactacaaaacaagtcaaaaaatattatatgaaaacaggaggtgact

SEQ ID NO: 839 - DNA, 1230 bp, Diabrotica virgifera
  misc_feature (16)..(16): n is a, c, g, or t
  SmartBlast Evalue=2E-11; Info=Probable RNA-directed DNA polymerase from transposon X-element n=1 Tax=Drosophila melanogaster RepID=RTXE_DROME
gccgcgcgtgttctangtaagtagatggaaaatggaaattagaattatatagtggctctttttgctgttctttgtgttagttttgctctggctggatctcttttgtttaaacaattatgtaagtattatcaaatccgttttcaattttctttattctttatgaaacgaattatttatgcatattattacctacaaatagtaggtacctatttcttttgatgtttaattgtaaagaatagaaaaattaccatccattttaatttttttagaatcagctgaaagtggtctacaaaaaaaccaggaaggaaacgtatagccttgtggctatgaaaggcaaaagagagatataaaaagtgtattggctagttggaagaaactccacattgtcgatgcataataagttattactttataaacaaatattaagacctgtatggacttatggatgcccactatgggggtgtacttactagaccaagtaatataaaaattatacaaagattccagaacaaaatactgagaaatattgtagatgctccttggtatgtgacaaacagtgatctccataaggacctagaaatggaacctggatataatcatcaagaagatggcaggaagtcacgagcaacaacttcataagtacgagaatattgaggaaatccagctcctcgatactactgggcaaactagaagattgaagaggacaaagccttttgaactagtttgagtgataggtgatagtgaaaagcagagcatagtgcttgtgtgcctgtgtatgttagaatagtgcacgatcttgttagattagataagagacgctatggggtaagctcttcattttaaggaacagtagtaatttaggttaaattaaaattgctcattggtcagttatgaccagattgtaattgtaatgtacaattcaatacaatgaatcatcatcgtagtgatgattatggaaaaaaatatatgacaagattttgtgcaataaaaatgtttatatttatcaaggatgtattatttggtatggccacatatacttctgtatatcgtcggtgatgtgacaatacctcctatctgctttttcatgaattttgtagagacgaaaaaccatttttagggtcatctcccgttttcacatgttattttgacatgttttgtagtaaatagatagttaaatttaatacaaaacatgtcaaaaaatatcatatgaaaacaggaggtgactgtaaa

SEQ ID NO: 840 - DNA, 1177 bp, Diabrotica virgifera
attatacaaagagtttattgataacaaatgaatttaaaatactaaaaaatcataaattttcaacctagttattacaagtataagttccagatatgcagttgcctaattacgagatttgactttttagccttgcatacagccgcttagagggcgctaccaataaaaccttccgacaaaaaatgtagcctcaattgttgacataaatacagagtttcactgcgatacaataagtcgtatagatacagtgaatttttgaaattagaaagtctgtcgaaaaatggacctagccgagaacattttcgagcaataattttttacaattttcggattgcaaccctaacaacacaaaacattccaggaatgtactatcaaagttctattaatgtttgaatgtcctggacattcaaggaacattcggtgaacatctgattaaattattggtggaatgttaccacaagacattctatgaacatactaccaatgtcctatattttaagtgaggccatttacttattcaatttgagttaattttcaaatttgccgcgcctgtatctaatttggtattgggcaatccaaaccacgtgacttctggttggcaaatggcatacaaaaagttacagaggttatgtttgtaatatctttcatttttcattgtttatcgtcgtttttgtctattttggattcatttggatttcgtttgctgtattttgtgaactttataaactttacacaatgcaaagtgattatttaaggaaattattattggaaactccagatgttgaagaaaggtagggaaacaatttttatttactgttcatttttccctgatatttatcaatattgatgaattttgcaagcaataacattatttcttttattgttttagatatttattgaagctgaaaataattggggatttagatccatatacaattcagtcagaattggattttacagtaaagtgcattccaccaaattactattatagatatttatacatatctggtggagtctcacagttactactctaagcagcagatgaaagcatacaaaagccttcaggcacataaatattttacagctggatttgtttttaaagttggagtaaagttggaagtcaggagcaacaacttcataagtacctacaagaatattgaggaaatccagctcctcgata

SEQ ID NO: 841 - DNA, 3854 bp, Diabrotica virgifera
  SmartBlast Evalue=8E-11; Info=Probable RNA-directed DNA polymerase from transposon X-element n=1 Tax=Drosophila melanogaster RepID=RTXE_DROME
tataacctctttatttatgtaaatttacaaaagcagtcctagaaataaacagtataatcagtggtaaaccatcacttttcctacccaagattacaaggtacttttaccttcgatggtattctcagacttcgatttaaataacttttaattaaatctttaaaatgtaataaaaaattaaatacataaattgttccaataccgttacatcataccatatcagtcacgtttaatgcagctaagttgactactattgctcaacgaatgacatgaaactctttatttattagttagtttaaattaaaaaaatgatatctattaaatctcaaacagtattgatcaaattcatctaatgaataaaataaacatagatctatctaatttaatatcgaggtaaaatgtttttattactgaatgtgggcatatatattgacaaaaatatatatggtaaagttactgaattatacttaatgctatacaacaatcataaataggtttcaatttcgttaaaaacatagatgtatgaaagctgctattatcgaagtacaaactttctgcgcaaccgtactttgaattatcattttgtagatgtggcaacaccggtgcagagacgtcaatatgacatctgacagcaccttaatttgacgatgaaactgaatatgcgatcgaaacgatttgtcaattcgctatgaccttcggttttaaagcagcattccgatcaactatcttgaatcatgttgggagttcaccatattatgttacatttggtaaagatcatacaaaatctctttgtgtgacagaaaacatcactagtattgcacaattaacatgagtcttacttagattgagattcgtagatagatttatctgttttggactattatttgttttcaagtggaaaaagtgatttaaaattttattcaaatgcatgcaacattgtaatacattttgaaaaacaatttcgaacaaacagatgcattttcgaacaaacagaaacattttcgatgcatatttgttttcactctgttgtatataatatctcaaattactcagagacatatacaacaggttatagaccaagacatttacattaacgtccttctgaaagacgatgtctagtgtgttactatctgtccctacctgttttgtcgctgagaaaaattcatttttctcttacttctcatactttctcagattttggcagacatgtacaaatgaagaagttagaacctccaaaatggagactcattattcagttgctatttcaaaaaacaaatttggtctctatggaaaatcaaaatgcatctgaatatgaatgatacctctcgttgtatttgtaataatctaaattgagtaattcgtattgactttgatttacaactattgtcttacaaacatataaaaatgccacctattcaaattttaaaaccttaaaactagatcaataggccacattggttgagaagaaacatttcaagaaattataaatactggaattattgatgcaatcattagatgtgatttatacatcgaagcgttttcaaatctatatcgcaaaagcatagcaaatagcgatgtacgtcataccatagagcgccctcattatttcagttggctgcactatttgacgtatgtcatttgtcattggagctgtatcgaaatacgaactctgtttaattcatacttatatttcattcattagaacatgaatgaattcaaggcaaatgtgatatagccacatcttccttataataataaaaaacagattaacaggaaataattttgaggttagaaaattgcctgcatcctaaagtcaagagtaaaataccgaaaattttgagtagaaaacaattctaaggttcaaaatttgctatgcgttgaaagatcgggggaaaatagtcaagattttgaaaatactttgtaaataagtaaaactacaattattgtagttaagaaataacctcaaataagatgttcatagtttaagaattatacatttagcatcgattgttgtattcagcgtatagttgtacaatattaactgattatgaaggtggatgctttggaaaatacctaagatttttttgatcgacacaaacattacagcattagggtaacaaattttggacgataaatacttttgaaatcacgtccctaacaacacaaaacattccaggaatgtactatcaaagttctattaatgtttgaatgtcctggacattcaaggaacattcggtgaacatctgattaaattattggtggaatgttaccacaagacattctatgaacatactaccaatgtcctatattttaagtgaggccatttacttattcaatttgagttaattttcaaatttgccgcgcgtgttctatgtaagtagggtcgcgtgccgcgtggccaatcacattttcacatttcatgataacctaaaaatttatgattggatggaaaatggaaattagaattagtggctctttttgctgttctgtattttagttttgccctggctggatctcttttgtttaaacaattatgaagtataaaatccgttttcaattttccttaagctttatgaaacgaattatttatgcatattattacctgtaaatagtacctatttcttttgatttttaattgtaaagaatagaaaaattaccattcgtttttattttttttagaattagctgaaagtggcctacaaaaaaaccaggaaagaaacgtatagccttgtggctataaaaggcaaaagaaagatatatgcaaaaagtgtattggctagttggaagaaactccacattgtcgatgcataataagttattactttataaacaaatattaagacctgtatggacttatggatgcccactatgggggtgtacttactagaccaagtaatataaaaattatacaaagattccagaacaaaatactgagaaatattgtagatgctccttggtatgtgacaaacagtgatctccataaggacctagaaatggaacctggatataatcatcaagaagatggcaggaagtcacgagcaacaacttcataagtacgagaatattgaggaaatccagctcctcgatactactgggcaaactagaagattgaagaggacaaagccttttgaactagtttgagtgataggtgatagtgaaaagcagagcatagtgcttgtgtgcctgtgtatgttaaaatagtgcacgatcttgttagattagataagagacgctatggggtaagctcttcattttaaggaacagtagtaatttaggttaaattaaaattgctcattggtcagttatgaccagattatattgtaatgtacaattcaatacaatgaatcatcatcgtagtgatgattatggaaaaaaatatatgacaagaaaaattttggtatggccacatatacttctggcatatcgtcggtgatgcgacaatacctcctatctgcttcttcatgaattttgtaggagacgaaaaaccattcttagggttatctcctgttttcacatgtaaattgtgacacgtcttgtagtaaatagatagttgaatttactacaaaatatgtcaaaaaaatatcatatgaaaacaggaggtgactgtaaaaaaagtattttgtctctcttacaaaactcatgaaaaaacaaatcggaggcattatgtcacatcagcgactatatccagggaatgtctaaaaatatactgtgaatgtccaaagaacattcgcagacattcatggaatgctccaataagacattcaaggaatgtttaaaatttggatgatttggatgttgacagaggactttcctgggacatttaggggacgttcttgtgcttttgaggccatttcagg

SEQ ID NO: 842 - DNA, 1205 bp, Diabrotica virgifera
attatacaaagagtttattgataacaaatgaatttaaaatactaaaaaatcataaattttcaacctagttattacaagtataagttccagatatgcagttgcctaattacgagatttgactttttagccttgcatacagccgcttagagggcgctaccaataaaaccttccgacaaaaaatgtagcctcaattgttgacataaatacagagtttcactgcgatacaataagtcgtatagatacagtgaatttttgaaattagaaagtctgtcgaaaaatggacctagccgagaacattttcgagcaataattttttacaattttcggattgcaaccctaacaacacaaaacattccaggaatgtactatcaaagttctattaatgtttgaatgtcctggacattcaaggaacattcggtgaacatctgattaaattattggtggaatgttaccacaagacattctatgaacatactaccaatgtcctatattttaagtgaggccatttacttattcaatttgagttaattttcaaatttgccgcgcgtgttctatgtaagtagggtcgcgtgccacgtggtcatcacattttcacatttcattataaccataataacctaaaaatttatgattggatggaaaatggaaattagaattagtggctttttgctgttctatgtatgttagttttgcttgctctggctggatctcttttgtttaaacaattatgtaagtacactcgcgatcataaaaagcgggtcactcgatgagccactcaagctagaccccttcgaattttctaaacctgctgtccaatttgagtgatcttttcagtatgttacagcctcattccccaacaatatcgccataataatattgctgccagacaggcaaactatcattgtataccgggtgcaacaatcatactgtgtcattcctcaaagttcgaaacaccccgtggaatgttccagcatagataaaacattgaaactaaaactcgattgcagccctaggctctctcaacatttccttccccgatttatttgtttatgttggacaataaaaaaagttaggcaccctaacaaccaaccatgctcctcatcaacacagggtgcttccaaacaagtgcgacaaaccttaaggggcaattctgcatgaaaaaacaatgaccgtttgccttacaaacgtatgaccgcaaattcttc

SEQ ID NO: 843 - DNA, 1157 bp, Diabrotica virgifera
attatacaaagagtttattgataacaaatgaatttaaaatactaaaaaatcataaattttcaacctagttattacaagtataagttccagatatgcagttgcctaattacgagatttgactttttagccttgcatacagccgcttagagggcgctaccaataaaaccttccgacaaaaaatgtagcctcaattgttgacataaatacagagtttcactgcgatacaataagtcgtatagatacagtgaatttttgaaattagaaagtctgtcgaaaaatggacctagccgagaacattttcgagcaataattttttacaattttcggattgcaaccctaacaacacaaaacattccaggaatgtactatcaaagttctattaatgtttgaatgtcctggacattcaaggaacattcggtgaacatctgattaaattattggtggaatgttaccacaagacattctatgaacatactaccaatgtcctatattttaagtgaggccatttacttattcaatttgagttaattttcaaatttgccgcgcctgtatctatgtattgggcaatccaaaccacgtgacttctggttggcattggcatacaaagttacagaggttatgttcattgtctatcgtcgtattttgtctattttggattcattttgatttcgtttgctgtttttttttgtgaactttataaactttaccacaatgcaaaatgattatttaaggaaattattattggaaacttcagatgttggagaaaggtaggggaaacaatttttatttactgttcatttttccctgatatttatcaatattgatgaattttgcaagcaataacattatttcttttattgttttagatatttattgaagctgaaaataattggggatttagatccatatacaattcagtcagaattggattttacagtaaagtgcattccaccaaattactattatagatatttatacatatctggtggagtctcacagttactactctaagcagcagatgaaagcatacaaaagccttcaggcacataaatattttacagctggatttgtttttaaagttggagtaaagttggaagtcaggagcaacaacttcataagtacctacaagaatattgaggaaatccagctcctcgata

SEQ ID NO: 844 - DNA, 923 bp, Diabrotica virgifera
  misc_feature (16)..(16): n is a, c, g, or t
  SmartBlast Evalue=1E-11; Info=Probable RNA-directed DNA polymerase from transposon X-element n=1 Tax=Drosophila melanogaster RepID=RTXE_DROME
gccgcgcgtgttctangtaagtagatggaaaatggaaattagaattatatagtggctctttttgctgttctttgtgttagttttgctctggctggatctcttttgtttaaacaattatgtaagtattatcaaatccgttttcaattttctttattctttatgaaacgaattatttatgcatattattacctacaaatagtaggtacctatttcttttgatgtttaattgtaaagaatagaaaaattaccatccattttaatttttttagaatcagctgaaagtggtctacaaaaaaaccaggaaggaaacgtatagccttgtggctatgaaaggcaaaagagagatataaaaagtgtattggctagttggaagaaactccacattgtcgatgcataataagttattactttataaacaaatattaagacctgtatggacttatggatgcccactatgggggtgtacttactagaccaagtaatataaaaattatacaaagattccagaacaaaatactgagaaatattgtagatgctccttggtatgtgacaaacagtgatctccataaggacctagaaatggaacctggatataatcatcaagaagatggcaggaagtcacgagcaacaacttcataagtacgagaatattgaggaaatccagctcctcgatactactgggcaaactagaagattgaagaggacaaagccttttgaactagtttgagtgataggtgatagtgatgttagaatagtgcacgatctggttagattagataagcgacgctatggggtaagctcttcaatttaaagaacagtagtgatttaggttaaattaaaattgctcattggtcagtattgaccagatcgtaattgtaatgtacaattcaatacaatgaatcatcatcgtagtgatgattatg

SEQ ID NO: 845 - DNA, 956 bp, Diabrotica virgifera
  misc_feature (16)..(16): n is a, c, g, or t
gccgcgcgtgttctangtaagtagatggaaaatggaaattagaattatatagtggctctttttgctgttctttgtgttagttttgctctggctggatctcttttgtttaaacaattatgtaagtattatcaaatccgttttcaattttctttattctttatgaaacgaattatttatgcatattattacctacaaatagtaggtacctatttcttttgatgtttaattgtaaagaatagaaaaattaccatccattttaatttttttagaatcagctgaaagtggtctacaaaaaaaccaggaaggaaacgtatagccttgtggctatgaaaggcaaaagagagatataaaaagtgtattggctagttggaagaaagtccacattgtccatgcataataagttattactttatcaacaaatatcaagaagatagcagggtcacgagcatcaacttcatgagttcaagaatatcgaggaaatccagctcctcgatactactgggcaaactagaagattgaagaggacaaatccttttgaactagtttgagtgataggtgatagtgaaaaacggagcatagtgcttgtgtgctgtgcctgtgtatgttagaatagtgcacgatcttgttagattagataagagacgctatggggtaagctcttcattttaagaaacagtagtaatttaggttaaattaaaattgctcattggtcagttatgaccagattgtaattctctgatgtttggcaaaaggggcttggagtcagagttgcacatcaataatgttttgatgatttctggaccataaaaaaagtgttgcagacttaaactgtatgtaccaataaaaagagccgatttttctggtccagaaatcatcaaaacgttgtcgatgtgcagttctgacttaagccctttttcccaaacatcagagaattgcaatgtacaattcaatacaaa

SEQ ID NO: 846 - DNA, 3640 bp, Diabrotica virgifera
  SmartBlast Evalue=8E-11; Info=Probable RNA-directed DNA polymerase from transposon X-element n=1 Tax=Drosophila melanogaster RepID=RTXE_DROME
tataacctctttatttatgtaaatttacaaaagcagtcctagaaataaacagtataatcagtggtaaaccatcacttttcctacccaagattacaaggtacttttaccttcgatggtattctcagacttcgatttaaataacttttaattaaatctttaaaatgtaataaaaaattaaatacataaattgttccaataccgttacatcataccatatcagtcacgtttaatgcagctaagttgactactattgctcaacgaatgacatgaaactctttatttattagttagtttaaattaaaaaaatgatatctattaaatctcaaacagtattgatcaaattcatctaatgaataaaataaacatagatctatctaatttaatatcgaggtaaaatgtttttattactgaatgtgggcatatatattgacaaaaatatatatggtaaagttactgaattatacttaatgctatacaacaatcataaataggtttcaatttcgttaaaaacatagatgtatgaaagctgctattatcgaagtacaaactttctgcgcaaccgtactttgaattatcattttgtagatgtggcaacaccggtgcagagacgtcaatatgacatctgacagcaccttaatttgacgatgaaactgaatatgcgatcgaaacgatttgtcaattcgctatgaccttcggttttaaagcagcattccgatcaactatcttgaatcatgttgggagttcaccatattatgttacatttggtaaagatcatacaaaatctctttgtgtgacagaaaacatcactagtattgcacaattaacatgagtcttacttagattgagattcgtagatagatttatctgttttggactattatttgttttcaagtggaaaaagtgatttaaaattttattcaaatgcatgcaacattgtaatacattttgaaaaacaatttcgaacaaacagatgcattttcgaacaaacagaaacattttcgatgcatatttgttttcactctgttgtatataatatctcaaattactcagagacatatacaacaggttatagaccaagacatttacattaacgtccttctgaaagacgatgtctagtgtgttactatctgtccctacctgttttgtcgctgagaaaaattcatttttctcttacttctcatactttctcagattttggcagacatgtacaaatgaagaagttagaacctccaaaatggagactcattattcagttgctatttcaaaaaacaaatttggtctctatggaaaatcaaaatgcatctgaatatgaatgatacctctcgttgtatttgtaataatctaaattgagtaattcgtattgactttgatttacaactattgtcttacaaacatataaaaatgccacctattcaaattttaaaaccttaaaactagatcaataggccacattggttgagaagaaacatttcaagaaattataaatactggaattattgatgcaatcattagatgtgatttatacatcgaagcgttttcaaatctatatcgcaaaagcatagcaaatagcgatgtacgtcataccatagagcgccctcattatttcagttggctgcactatttgacgtatgtcatttgtcattggagctgtatcgaaatacgaactctgtttaattcatacttatatttcattcattagaacatgaatgaattcaaggcaaatgtgatatagccacatcttccttataataataaaaaacagattaacaggaaataattttgaggttagaaaattgcctgcatcctaaagtcaagagtaaaataccgaaaattttgagtagaaaacaattctaaggttcaaaatttgctatgcgttgaaagatcgggggaaaatagtcaagattttgaaaatactttgtaaataagtaaaactacaattattgtagttaagaaataacctcaaataagatgttcatagtttaagaattatacatttagcatcgattgttgtattcagcgtatagttgtacaatattaactgattatgaaggtggatgctttggaaaatacctaagatttttttgatcgacacaaacattacagcattagggtaacaaattttggacgataaatacttttgaaatcacgtccctaacaacacaaaacattccaggaatgtactatcaaagttctattaatgtttgaatgtcctggacattcaaggaacattcggtgaacatctgattaaattattggtggaatgttaccacaagacattctatgaacatactaccaatgtcctatattttaagtgaggccatttacttattcaatttgagttaattttcaaatttgccgcgcgtgttctatgtaagtagggtcgcgtgccgcgtggccaatcacattttcacatttcatgataacctaaaaatttatgattggatggaaaatggaaattagaattagtggctctttttgctgttctgtattttagttttgccctggctggatctcttttgtttaaacaattatgaagtataaaatccgttttcaattttccttaagctttatgaaacgaattatttatgcatattattacctgtaaatagtacctatttcttttgatttttaattgtaaagaatagaaaaattaccattcgtttttattttttttagaattagctgaaagtggcctacaaaaaaaccaggaaagaaacgtatagccttgtggctataaaaggcaaaagaaagatatatgcaaaaagtgtattggctagttggaagaaactccacattgtcgatgcataataagttattactttataaacaaatattaagacctgtatggacttatggatgcccactatgggggtgtacttactagaccaagtaatataaaaattatacaaagattccagaacaaaatactgagaaatattgtagatgctccttggtatgtgacaaacagtgatctccataaggacctagaaatggaacctggatataatcatcaagaagatggcaggaagtcacgagcaacaacttcataagtacgagaatattgaggaaatccagctcctcgatactactgggcaaactagaagattgaagaggacaaagccttttgaactagtttgagtgataggtgatagtgaaaagcagagcatagtgcttgtgtgcctgtgtatgttagaatagtgcacgatcttgttagattagataagagacgctatggggtaagctcttcattttaaggaacagtagtaatttaggttaaattaaaattgctcattggtcagttatgaccagattgtaattgtaatgtacaattcaatacaatgaatcatcatcgtagtgatgattatggaaaaaaatatatgacaagattttgtgcaataaaaatgtttatatttatcaaggatagtattatttggtatggccacatatacttctggtatatcgtcggtgatgtgacaatacctcctatctgctttttcatgaattttgtaggagacgaaaaaccatttttagggtcatctcttgttgtcacatgtaaattttgacatgctttgtagtaaatagatagttgaatttactacaaaacaagtcaaaaaatattatatgaaaacaggaggtgact

SEQ ID NO: 847 - DNA, 3641 bp, Diabrotica virgifera
  SmartBlast Evalue=8E-11; Info=Probable RNA-directed DNA polymerase from transposon X-element n=1 Tax=Drosophila melanogaster RepID=RTXE_DROME
tataacctctttatttatgtaaatttacaaaagcagtcctagaaataaacagtataatcagtggtaaaccatcacttttcctacccaagattacaaggtacttttaccttcgatggtattctcagacttcgatttaaataacttttaattaaatctttaaaatgtaataaaaaattaaatacataaattgttccaataccgttacatcataccatatcagtcacgtttaatgcagctaagttgactactattgctcaacgaatgacatgaaactctttatttattagttagtttaaattaaaaaaatgatatctattaaatctcaaacagtattgatcaaattcatctaatgaataaaataaacatagatctatctaatttaatatcgaggtaaaatgtttttattactgaatgtgggcatatatattgacaaaaatatatatggtaaagttactgaattatacttaatgctatacaacaatcataaataggtttcaatttcgttaaaaacatagatgtatgaaagctgctattatcgaagtacaaactttctgcgcaaccgtactttgaattatcattttgtagatgtggcaacaccggtgcagagacgtcaatatgacatctgacagcaccttaatttgacgatgaaactgaatatgcgatcgaaacgatttgtcaattcgctatgaccttcggttttaaagcagcattccgatcaactatcttgaatcatgttgggagttcaccatattatgttacatttggtaaagatcatacaaaatctctttgtgtgacagaaaacatcactagtattgcacaattaacatgagtcttacttagattgagattcgtagatagatttatctgttttggactattatttgttttcaagtggaaaaagtgatttaaaattttattcaaatgcatgcaacattgtaatacattttgaaaaacaatttcgaacaaacagatgcattttcgaacaaacagaaacattttcgatgcatatttgttttcactctgttgtatataatatctcaaattactcagagacatatacaacaggttatagaccaagacatttacattaacgtccttctgaaagacgatgtctagtgtgttactatctgtccctacctgttttgtcgctgagaaaaattcatttttctcttacttctcatactttctcagattttggcagacatgtacaaatgaagaagttagaacctccaaaatggagactcattattcagttgctatttcaaaaaacaaatttggtctctatggaaaatcaaaatgcatctgaatatgaatgatacctctcgttgtatttgtaataatctaaattgagtaattcgtattgactttgatttacaactattgtcttacaaacatataaaaatgccacctattcaaattttaaaaccttaaaactagatcaataggccacattggttgagaagaaacatttcaagaaattataaatactggaattattgatgcaatcattagatgtgatttatacatcgaagcgttttcaaatctatatcgcaaaagcatagcaaatagcgatgtacgtcataccatagagcgccctcattatttcagttggctgcactatttgacgtatgtcatttgtcattggagctgtatcgaaatacgaactctgtttaattcatacttatatttcattcattagaacatgaatgaattcaaggcaaatgtgatatagccacatcttccttataataataaaaaacagattaacaggaaataattttgaggttagaaaattgcctgcatcctaaagtcaagagtaaaataccgaaaattttgagtagaaaacaattctaaggttcaaaatttgctatgcgttgaaagatcgggggaaaatagtcaagattttgaaaatactttgtaaataagtaaaactacaattattgtagttaagaaataacctcaaataagatgttcatagtttaagaattatacatttagcatcgattgttgtattcagcgtatagttgtacaatattaactgattatgaaggtggatgctttggaaaatacctaagatttttttgatcgacacaaacattacagcattagggtaacaaattttggacgataaatacttttgaaatcacgtccctaacaacacaaaacattccaggaatgtactatcaaagttctattaatgtttgaatgtcctggacattcaaggaacattcggtgaacatctgattaaattattggtggaatgttaccacaagacattctatgaacatactaccaatgtcctatattttaagtgaggccatttacttattcaatttgagttaattttcaaatttgccgcgcgtgttctatgtaagtagggtcgcgtgccgcgtggccaatcacattttcacatttcatgataacctaaaaatttatgattggatggaaaatggaaattagaattagtggctctttttgctgttctgtattttagttttgccctggctggatctcttttgtttaaacaattatgaagtataaaatccgttttcaattttccttaagctttatgaaacgaattatttatgcatattattacctgtaaatagtacctatttcttttgatttttaattgtaaagaatagaaaaattaccattcgtttttattttttttagaattagctgaaagtggcctacaaaaaaaccaggaaagaaacgtatagccttgtggctataaaaggcaaaagaaagatatatgcaaaaagtgtattggctagttggaagaaactccacattgtcgatgcataataagttattactttataaacaaatattaagacctgtatggacttatggatgcccactatgggggtgtacttactagaccaagtaatataaaaattatacaaagattccagaacaaaatactgagaaatattgtagatgctccttggtatgtgacaaacagtgatctccataaggacctagaaatggaacctggatataatcatcaagaagatggcaggaagtcacgagcaacaacttcataagtacgagaatattgaggaaatccagctcctcgatactactgggcaaactagaagattgaagaggacaaagccttttgaactagtttgagtgataggtgatagtgaaaagcagagcatagtgcttgtgtgcctgtgtatgttagaatagtgcacgatcttgttagattagataagagacgctatggggtaagctcttcattttaaggaacagtagtaatttaggttaaattaaaattgctcattggtcagttatgaccagattgtaattgtaatgtacaattcaatacaatgaatcatcatcgtagtgatgattatggaaaaaaatatatgacaagattttgtgcaataaaaatgtttatatttatcaaggatgtattatttggtatggccacatatacttctgtatatcgtcggtgatgtgacaatacctcctatctgctttttcatgaattttgtagagacgaaaaaccatttttagggtcatctcccgttttcacatgttattttgacatgttttgtagtaaatagatagttaaatttaatacaaaacatgtcaaaaaatatcatatgaaaacaggaggtgactgtaaa

SEQ ID NO: 848 - DNA, 3522 bp, Diabrotica virgifera
  SmartBlast Evalue=4E-16; Info=Transposase (Fragment) n=1 Tax= Agrilus planipennis RepID=D2WLV1_AGRPL
aatcaaggcacataataggctgttcaataagttttgcggttcgataaggacgttgctactatactaaaagccacagttagaatgcagtgccactattgccacagaatagggaacaataattgtttcctattctgtgctatcgccaaactaccactgcgccgacatcgctgcgcatcgtaagaccaacactgcattttaactgtggcttctactttagcctaattttctttgttatgtatatgaagtttcatttcaatctgtcaattcattctttgtttacaagcaatttagtgtcgacgtgttgcagtatttttttacaatagataaaatcaagtcctgcagtgattgaatttttgttttcggaagcaaaagaaatttatgaacgaatgtcaaaagtgtaggtataaggattattcggcttcaattactacagtagaaaatgggttgcaaacgtggtcgtacaagcccgtaagacgatctacatcagggacgtccaaaacgacaacaccaaaaatcgtagaaaaaatacaggatatcgtattggaatgagaaaaaaaaaaacacagaaaactgtgttcacaatacgtgaaagcgttttgaaaaaatgaactagattttgtgcatcgattcatcagtatggatgagacttgggtctatcaccatgatcttgaaacaaataaagaggctaaacggtggtgtgaaactgattctttggctccgaaacgagtttaagtccagaaatcggccaagaaggtgtaaacatccgttttttgatatgcgaaaaaaaatgtgtttgtggattgcttgcaaacggataaaaaaataaattctgaataatattgtaacgttttagaccagctaaaagaaaaaattcgtagaaaagacccggtttgtagaagaaaaaatatttttttcatcaagaccatgcaccgtgttatatcaacattttgacaatggctaaaccctaacaacacaaaacattccaggaatgtactatcaaagttctattaatgtttgaatgtcctggacattcaaggaacattcggtgaacatctgattaaattattggtggaatgttaccacaagacattctatgaacatactaccaatgtcctatattttaagtgaggccatttacttattcaatttgagttaattttcaaatttgccgcgcgtgttctatgtaagtagggtcgcgtgccgcgtggccaatcacattttcacatttcatgataacctaaaaatttatgattggatggaaaatggaaattagaattagtggctctttttgctgttctgtattttagttttgccctggctggatctcttttgtttaaacaattatgaagtataaaatccgttttcaattttccttaagctttatgaaacgaattatttatgcatattattacctgtaaatagtacctatttcttttgatttttaattgtaaagaatagaaaaattaccattcgtttttattttttttagaattagctgaaagtggcctacaaaaaaaccaggaaagaaacgtatagccttgtggctataaaaggcaaaagaaagatatatgcaaaaagtgtattggctagttggaagaaactccacattgtcgatgcataataagttattactttataaacaaatattaagacctgtatggacttatggatgcccactatgggggtgtacttactagaccaagtaatataaaaattatacaaagattccagaacaaaatactgagaaatattgtagatgctccttggtatgtgacaaacagtgatctccataaggacctagaaatggaacctggatataatcatcaagaagatggcaggaagtcacgagcaacaacttcataagtacgagaatattgaggaaatccagctcctcgatactactgggcaaactagaagattgaagaggacaaagccttttgaactagtttgagtgataggtgatagtgaaaagcagagcatagtgcttgtgtgcctgtgtatgttagaatagtgcacgatcttgttagattagataagagacgctatggggtaagctcttcattttaaggaacagtagtaatttaggttaaattaaaattgctcattggtcagttatgaccagattgtaattgtaatgtacaattcaatacaatgaatcatcatcgtagtgatgattatggaaaaaaatatatgacaagattttgtgcaataaaaatgtttatatttatcaaggatgtattatttggtatggccacatatacttctggtatatcgtccctgttttcacatgtaaattttgacatgttttgtagtaaatagatagttgaatttactacaaaacatatccagggaatgtctaaaaatatactgtgaatgtccaaagaacattcgtaaacattcatggaatgttccaacaagacattcaaggaatctttaaaacgctgagacacgactttcttgggacatttaggggacgttgttgtgcttttgaggacattccaggaatgtttttaatgtcctctgtgtacattctaggaacatacatggaatgtttgttgttattagggaagtctccattaaatatctaaaaggccgaaaaaagcgggatgtaggtggcaattctgctaaaaaaatgagttttttcaaacatttaaatgatatctagcgttattataaataatgctctggagatgaaataaatgctaagtatttagttaaattatatggaacatacagggcgagtcagtctgtacgttcttaacgatttatgagatcatattcccataaaactacaataaattatttgttaaattatccttttagaaaaatacatagccccttcaattatacatcatccgccactgtatatatcactcatataaatcattttcaatataatcgataaaatataaaaatatttgctataaaactgtttaaaaattgcatttcactaattcaatttcttcttttacctattaacttaagctacagctgctttgaaaaatacgagtaatacagggtgtatcaaaagtattgatgcagagatgtttaaccctaggaccacactgtgaggtctcagttaacccaagttgtggttctagggttaaatatcaataaatctagatttttgaaagtgaacgtttataattacataaaaaaattgtatactgttgtataaatcgaaaaaaaaaacagataaataggtactaacatttaatattacatttaaataaatatataaataagaatgctaagatttgcaaagttgtggaggctagaaattaaaatggaggtaggcaaaacaataatttgtattactggttgcctatatttgaaataaattttaaaaatatctacgaagggcttcataaaagtgtacagactctctgtaacgaataaaaatgttcgaaatgagcggataaaatgttcgacaccttattagcctggattttgcaccatgtgatttttatctctttatgacaaccttttcgctacaccctgtatttttaacgaactactgca

SEQ ID NO: 849 - DNA, 3334 bp, Diabrotica virgifera
  SmartBlast Evalue=7E-11; Info=Probable RNA-directed DNA polymerase from transposon X-element n=1 Tax=Drosophila melanogaster RepID=RTXE_DROME
tataacctctttatttatgtaaatttacaaaagcagtcctagaaataaacagtataatcagtggtaaaccatcacttttcctacccaagattacaaggtacttttaccttcgatggtattctcagacttcgatttaaataacttttaattaaatctttaaaatgtaataaaaaattaaatacataaattgttccaataccgttacatcataccatatcagtcacgtttaatgcagctaagttgactactattgctcaacgaatgacatgaaactctttatttattagttagtttaaattaaaaaaatgatatctattaaatctcaaacagtattgatcaaattcatctaatgaataaaataaacatagatctatctaatttaatatcgaggtaaaatgtttttattactgaatgtgggcatatatattgacaaaaatatatatggtaaagttactgaattatacttaatgctatacaacaatcataaataggtttcaatttcgttaaaaacatagatgtatgaaagctgctattatcgaagtacaaactttctgcgcaaccgtactttgaattatcattttgtagatgtggcaacaccggtgcagagacgtcaatatgacatctgacagcaccttaatttgacgatgaaactgaatatgcgatcgaaacgatttgtcaattcgctatgaccttcggttttaaagcagcattccgatcaactatcttgaatcatgttgggagttcaccatattatgttacatttggtaaagatcatacaaaatctctttgtgtgacagaaaacatcactagtattgcacaattaacatgagtcttacttagattgagattcgtagatagatttatctgttttggactattatttgttttcaagtggaaaaagtgatttaaaattttattcaaatgcatgcaacattgtaatacattttgaaaaacaatttcgaacaaacagatgcattttcgaacaaacagaaacattttcgatgcatatttgttttcactctgttgtatataatatctcaaattactcagagacatatacaacaggttatagaccaagacatttacattaacgtccttctgaaagacgatgtctagtgtgttactatctgtccctacctgttttgtcgctgagaaaaattcatttttctcttacttctcatactttctcagattttggcagacatgtacaaatgaagaagttagaacctccaaaatggagactcattattcagttgctatttcaaaaaacaaatttggtctctatggaaaatcaaaatgcatctgaatatgaatgatacctctcgttgtatttgtaataatctaaattgagtaattcgtattgactttgatttacaactattgtcttacaaacatataaaaatgccacctattcaaattttaaaaccttaaaactagatcaataggccacattggttgagaagaaacatttcaagaaattataaatactggaattattgatgcaatcattagatgtgatttatacatcgaagcgttttcaaatctatatcgcaaaagcatagcaaatagcgatgtacgtcataccatagagcgccctcattatttcagttggctgcactatttgacgtatgtcatttgtcattggagctgtatcgaaatacgaactctgtttaattcatacttatatttcattcattagaacatgaatgaattcaaggcaaatgtgatatagccacatcttccttataataataaaaaacagattaacaggaaataattttgaggttagaaaattgcctgcatcctaaagtcaagagtaaaataccgaaaattttgagtagaaaacaattctaaggttcaaaatttgctatgcgttgaaagatcgggggaaaatagtcaagattttgaaaatactttgtaaataagtaaaactacaattattgtagttaagaaataacctcaaataagatgttcatagtttaagaattatacatttagcatcgattgttgtattcagcgtatagttgtacaatattaactgattatgaaggtggatgctttggaaaatacctaagatttttttgatcgacacaaacattacagcattagggtaacaaattttggacgataaatacttttgaaatcacgtccctaacaacacaaaacattccaggaatgtactatcaaagttctattaatgtttgaatgtcctggacattcaaggaacattcggtgaacatctgattaaattattggtggaatgttaccacaagacattctatgaacatactaccaatgtcctatattttaagtgaggccatttacttattcaatttgagttaattttcaaatttgccgcgcgtgttctatgtaagtagggtcgcgtgccgcgtggccaatcacattttcacatttcatgataacctaaaaatttatgattggatggaaaatggaaattagaattagtggctctttttgctgttctgtattttagttttgccctggctggatctcttttgtttaaacaattatgaagtataaaatccgttttcaattttccttaagctttatgaaacgaattatttatgcatattattacctgtaaatagtacctatttcttttgatttttaattgtaaagaatagaaaaattaccattcgtttttattttttttagaattagctgaaagtggcctacaaaaaaaccaggaaagaaacgtatagccttgtggctataaaaggcaaaagaaagatatatgcaaaaagtgtattggctagttggaagaaactccacattgtcgatgcataataagttattactttataaacaaatattaagacctgtatggacttatggatgcccactatgggggtgtacttactagaccaagtaatataaaaattatacaaagattccagaacaaaatactgagaaatattgtagatgctccttggtatgtgacaaacagtgatctccataaggacctagaaatggaacctggatataatcatcaagaagatggcaggaagtcacgagcaacaacttcataagtacgagaatattgaggaaatccagctcctcgatactactgggcaaactagaagattgaagaggacaaagccttttgaactagtttgagtgataggtgatagtgatgttagaatagtgcacgatctggttagattagataagcgacgctatggggtaagctcttcaatttaaagaacagtagtgatttaggttaaattaaaattgctcattggtcagtattgaccagatcgtaattgtaatgtacaattcaatacaatgaatcatcatcgtagtgatgattatg

SEQ ID NO: 850 - DNA, 3367 bp, Diabrotica virgifera
tataacctctttatttatgtaaatttacaaaagcagtcctagaaataaacagtataatcagtggtaaaccatcacttttcctacccaagattacaaggtacttttaccttcgatggtattctcagacttcgatttaaataacttttaattaaatctttaaaatgtaataaaaaattaaatacataaattgttccaataccgttacatcataccatatcagtcacgtttaatgcagctaagttgactactattgctcaacgaatgacatgaaactctttatttattagttagtttaaattaaaaaaatgatatctattaaatctcaaacagtattgatcaaattcatctaatgaataaaataaacatagatctatctaatttaatatcgaggtaaaatgtttttattactgaatgtgggcatatatattgacaaaaatatatatggtaaagttactgaattatacttaatgctatacaacaatcataaataggtttcaatttcgttaaaaacatagatgtatgaaagctgctattatcgaagtacaaactttctgcgcaaccgtactttgaattatcattttgtagatgtggcaacaccggtgcagagacgtcaatatgacatctgacagcaccttaatttgacgatgaaactgaatatgcgatcgaaacgatttgtcaattcgctatgaccttcggttttaaagcagcattccgatcaactatcttgaatcatgttgggagttcaccatattatgttacatttggtaaagatcatacaaaatctctttgtgtgacagaaaacatcactagtattgcacaattaacatgagtcttacttagattgagattcgtagatagatttatctgttttggactattatttgttttcaagtggaaaaagtgatttaaaattttattcaaatgcatgcaacattgtaatacattttgaaaaacaatttcgaacaaacagatgcattttcgaacaaacagaaacattttcgatgcatatttgttttcactctgttgtatataatatctcaaattactcagagacatatacaacaggttatagaccaagacatttacattaacgtccttctgaaagacgatgtctagtgtgttactatctgtccctacctgttttgtcgctgagaaaaattcatttttctcttacttctcatactttctcagattttggcagacatgtacaaatgaagaagttagaacctccaaaatggagactcattattcagttgctatttcaaaaaacaaatttggtctctatggaaaatcaaaatgcatctgaatatgaatgatacctctcgttgtatttgtaataatctaaattgagtaattcgtattgactttgatttacaactattgtcttacaaacatataaaaatgccacctattcaaattttaaaaccttaaaactagatcaataggccacattggttgagaagaaacatttcaagaaattataaatactggaattattgatgcaatcattagatgtgatttatacatcgaagcgttttcaaatctatatcgcaaaagcatagcaaatagcgatgtacgtcataccatagagcgccctcattatttcagttggctgcactatttgacgtatgtcatttgtcattggagctgtatcgaaatacgaactctgtttaattcatacttatatttcattcattagaacatgaatgaattcaaggcaaatgtgatatagccacatcttccttataataataaaaaacagattaacaggaaataattttgaggttagaaaattgcctgcatcctaaagtcaagagtaaaataccgaaaattttgagtagaaaacaattctaaggttcaaaatttgctatgcgttgaaagatcgggggaaaatagtcaagattttgaaaatactttgtaaataagtaaaactacaattattgtagttaagaaataacctcaaataagatgttcatagtttaagaattatacatttagcatcgattgttgtattcagcgtatagttgtacaatattaactgattatgaaggtggatgctttggaaaatacctaagatttttttgatcgacacaaacattacagcattagggtaacaaattttggacgataaatacttttgaaatcacgtccctaacaacacaaaacattccaggaatgtactatcaaagttctattaatgtttgaatgtcctggacattcaaggaacattcggtgaacatctgattaaattattggtggaatgttaccacaagacattctatgaacatactaccaatgtcctatattttaagtgaggccatttacttattcaatttgagttaattttcaaatttgccgcgcgtgttctatgtaagtagggtcgcgtgccgcgtggccaatcacattttcacatttcatgataacctaaaaatttatgattggatggaaaatggaaattagaattagtggctctttttgctgttctgtattttagttttgccctggctggatctcttttgtttaaacaattatgaagtataaaatccgttttcaattttccttaagctttatgaaacgaattatttatgcatattattacctgtaaatagtacctatttcttttgatttttaattgtaaagaatagaaaaattaccattcgtttttattttttttagaattagctgaaagtggcctacaaaaaaaccaggaaagaaacgtatagccttgtggctataaaaggcaaaagaaagatatatgcaaaaagtgtattggctagttggaagaaagtccacattgtccatgcataataagttattactttatcaacaaatatcaagaagatagcagggtcacgagcatcaacttcatgagttcaagaatatcgaggaaatccagctcctcgatactactgggcaaactagaagattgaagaggacaaatccttttgaactagtttgagtgataggtgatagtgaaaaacggagcatagtgcttgtgtgctgtgcctgtgtatgttagaatagtgcacgatcttgttagattagataagagacgctatggggtaagctcttcattttaagaaacagtagtaatttaggttaaattaaaattgctcattggtcagttatgaccagattgtaattctctgatgtttggcaaaaggggcttggagtcagagttgcacatcaataatgttttgatgatttctggaccataaaaaaagtgttgcagacttaaactgtatgtaccaataaaaagagccgatttttctggtccagaaatcatcaaaacgttgtcgatgtgcagttctgacttaagccctttttcccaaacatcagagaattgcaatgtacaattcaatacaaa

SEQ ID NO: 851 - DNA, 2992 bp, Diabrotica virgifera
tataacctctttatttatgtaaatttacaaaagcagtcctagaaataaacagtataatcagtggtaaaccatcacttttcctacccaagattacaaggtacttttaccttcgatggtattctcagacttcgatttaaataacttttaattaaatctttaaaatgtaataaaaaattaaatacataaattgttccaataccgttacatcataccatatcagtcacgtttaatgcagctaagttgactactattgctcaacgaatgacatgaaactctttatttattagttagtttaaattaaaaaaatgatatctattaaatctcaaacagtattgatcaaattcatctaatgaataaaataaacatagatctatctaatttaatatcgaggtaaaatgtttttattactgaatgtgggcatatatattgacaaaaatatatatggtaaagttactgaattatacttaatgctatacaacaatcataaataggtttcaatttcgttaaaaacatagatgtatgaaagctgctattatcgaagtacaaactttctgcgcaaccgtactttgaattatcattttgtagatgtggcaacaccggtgcagagacgtcaatatgacatctgacagcaccttaatttgacgatgaaactgaatatgcgatcgaaacgatttgtcaattcgctatgaccttcggttttaaagcagcattccgatcaactatcttgaatcatgttgggagttcaccatattatgttacatttggtaaagatcatacaaaatctctttgtgtgacagaaaacatcactagtattgcacaattaacatgagtcttacttagattgagattcgtagatagatttatctgttttggactattatttgttttcaagtggaaaaagtgatttaaaattttattcaaatgcatgcaacattgtaatacattttgaaaaacaatttcgaacaaacagatgcattttcgaacaaacagaaacattttcgatgcatatttgttttcactctgttgtatataatatctcaaattactcagagacatatacaacaggttatagaccaagacatttacattaacgtccttctgaaagacgatgtctagtgtgttactatctgtccctacctgttttgtcgctgagaaaaattcatttttctcttacttctcatactttctcagattttggcagacatgtacaaatgaagaagttagaacctccaaaatggagactcattattcagttgctatttcaaaaaacaaatttggtctctatggaaaatcaaaatgcatctgaatatgaatgatacctctcgttgtatttgtaataatctaaattgagtaattcgtattgactttgatttacaactattgtcttacaaacatataaaaatgccacctattcaaattttaaaaccttaaaactagatcaataggccacattggttgagaagaaacatttcaagaaattataaatactggaattattgatgcaatcattagatgtgatttatacatcgaagcgttttcaaatctatatcgcaaaagcatagcaaatagcgatgtacgtcataccatagagcgccctcattatttcagttggctgcactatttgacgtatgtcatttgtcattggagctgtatcgaaatacgaactctgtttaattcatacttatatttcattcattagaacatgaatgaattcaaggcaaatgtgatatagccacatcttccttataataataaaaaacagattaacaggaaataattttgaggttagaaaattgcctgcatcctaaagtcaagagtaaaataccgaaaattttgagtagaaaacaattctaaggttcaaaatttgctatgcgttgaaagatcgggggaaaatagtcaagattttgaaaatactttgtaaataagtaaaactacaattattgtagttaagaaataacctcaaataagatgttcatagtttaagaattatacatttagcatcgattgttgtattcagcgtatagttgtacaatattaactgattatgaaggtggatgctttggaaaatacctaagatttttttgatcgacacaaacattacagcattagggtaacaaattttggacgataaatacttttgaaatcacgtccctaacaacacaaaacattccaggaatgtactatcaaagttctattaatgtttgaatgtcctggacattcaaggaacattcggtgaacatctgattaaattattggtggaatgttaccacaagacattctatgaacatactaccaatgtcctatattttaagtgaggccatttacttattcaatttgagttaattttcaaatttgccgcgcctgtatctaatttggtattgggcaatccaaaccacgtgacttctggttggcaaatggcatacaaaaagttacagaggttatgtttgtaatatctttcatttttcattgtttatcgtcgtttttgtctattttggattcatttggatttcgtttgctgtattttgtgaactttataaactttacacaatgcaaagtgattatttaaggaaattattattggaaactccagatgttgaagaaaggtagggaaacaatttttatttactgttcatttttccctgatatttatcaatattgatgaattttgcaagcaataacattatttcttttattgttttagatatttattgaagctgaaaataattggggatttagatccatatacaattcagtcagaattggattttacagtaaagtgcattccaccaaattactattatagatatttatacatatctggtggagtctcacagttactactctaagcagcagatgaaagcatacaaaagccttcaggcacataaatattttacagctggatttgtttttaaagttggagtaaagttggaagtcaggagcaacaacttcataagtacctacaagaatattgaggaaatccagctcctcgata

SEQ ID NO: 852 - DNA, 3020 bp, Diabrotica virgifera
tataacctctttatttatgtaaatttacaaaagcagtcctagaaataaacagtataatcagtggtaaaccatcacttttcctacccaagattacaaggtacttttaccttcgatggtattctcagacttcgatttaaataacttttaattaaatctttaaaatgtaataaaaaattaaatacataaattgttccaataccgttacatcataccatatcagtcacgtttaatgcagctaagttgactactattgctcaacgaatgacatgaaactctttatttattagttagtttaaattaaaaaaatgatatctattaaatctcaaacagtattgatcaaattcatctaatgaataaaataaacatagatctatctaatttaatatcgaggtaaaatgtttttattactgaatgtgggcatatatattgacaaaaatatatatggtaaagttactgaattatacttaatgctatacaacaatcataaataggtttcaatttcgttaaaaacatagatgtatgaaagctgctattatcgaagtacaaactttctgcgcaaccgtactttgaattatcattttgtagatgtggcaacaccggtgcagagacgtcaatatgacatctgacagcaccttaatttgacgatgaaactgaatatgcgatcgaaacgatttgtcaattcgctatgaccttcggttttaaagcagcattccgatcaactatcttgaatcatgttgggagttcaccatattatgttacatttggtaaagatcatacaaaatctctttgtgtgacagaaaacatcactagtattgcacaattaacatgagtcttacttagattgagattcgtagatagatttatctgttttggactattatttgttttcaagtggaaaaagtgatttaaaattttattcaaatgcatgcaacattgtaatacattttgaaaaacaatttcgaacaaacagatgcattttcgaacaaacagaaacattttcgatgcatatttgttttcactctgttgtatataatatctcaaattactcagagacatatacaacaggttatagaccaagacatttacattaacgtccttctgaaagacgatgtctagtgtgttactatctgtccctacctgttttgtcgctgagaaaaattcatttttctcttacttctcatactttctcagattttggcagacatgtacaaatgaagaagttagaacctccaaaatggagactcattattcagttgctatttcaaaaaacaaatttggtctctatggaaaatcaaaatgcatctgaatatgaatgatacctctcgttgtatttgtaataatctaaattgagtaattcgtattgactttgatttacaactattgtcttacaaacatataaaaatgccacctattcaaattttaaaaccttaaaactagatcaataggccacattggttgagaagaaacatttcaagaaattataaatactggaattattgatgcaatcattagatgtgatttatacatcgaagcgttttcaaatctatatcgcaaaagcatagcaaatagcgatgtacgtcataccatagagcgccctcattatttcagttggctgcactatttgacgtatgtcatttgtcattggagctgtatcgaaatacgaactctgtttaattcatacttatatttcattcattagaacatgaatgaattcaaggcaaatgtgatatagccacatcttccttataataataaaaaacagattaacaggaaataattttgaggttagaaaattgcctgcatcctaaagtcaagagtaaaataccgaaaattttgagtagaaaacaattctaaggttcaaaatttgctatgcgttgaaagatcgggggaaaatagtcaagattttgaaaatactttgtaaataagtaaaactacaattattgtagttaagaaataacctcaaataagatgttcatagtttaagaattatacatttagcatcgattgttgtattcagcgtatagttgtacaatattaactgattatgaaggtggatgctttggaaaatacctaagatttttttgatcgacacaaacattacagcattagggtaacaaattttggacgataaatacttttgaaatcacgtccctaacaacacaaaacattccaggaatgtactatcaaagttctattaatgtttgaatgtcctggacattcaaggaacattcggtgaacatctgattaaattattggtggaatgttaccacaagacattctatgaacatactaccaatgtcctatattttaagtgaggccatttacttattcaatttgagttaattttcaaatttgccgcgcgtgttctatgtaagtagggtcgcgtgccacgtggtcatcacattttcacatttcattataaccataataacctaaaaatttatgattggatggaaaatggaaattagaattagtggctttttgctgttctatgtatgttagttttgcttgctctggctggatctcttttgtttaaacaattatgtaagtacactcgcgatcataaaaagcgggtcactcgatgagccactcaagctagaccccttcgaattttctaaacctgctgtccaatttgagtgatcttttcagtatgttacagcctcattccccaacaatatcgccataataatattgctgccagacaggcaaactatcattgtataccgggtgcaacaatcatactgtgtcattcctcaaagttcgaaacaccccgtggaatgttccagcatagataaaacattgaaactaaaactcgattgcagccctaggctctctcaacatttccttccccgatttatttgtttatgttggacaataaaaaaagttaggcaccctaacaaccaaccatgctcctcatcaacacagggtgcttccaaacaagtgcgacaaaccttaaggggcaattctgcatgaaaaaacaatgaccgtttgccttacaaacgtatgaccgcaaattcttc

SEQ ID NO: 853 - DNA, 1782 bp, Diabrotica virgifera
tggtgtcgtcacttcgttttgaatgacactctctatgctaatatataactttatgaatgaaaccctcgtgccgacactctgtcagcgtaggccatgaactagttaagaaaattatttattgatatatctaccagtgtctgtcaaattgtcaactgccaaactgaaaaagtatcaatggaaaataagaacaaaactttctgtatttgtagtgagaatagtatataaaaaactggtatgactttcacctgaaagtatacgtaatcgataactgagtcagttatcttatttattgaaatttttgtttacaaaagtcagacgaaactaggtaaatcatgtttttatttttggcagtatggttaaaaaaaaatgaagaataagctgtcatattgtgggagggaaatggctaaaccatgatactataaataaagagatagtattttcccgtagcgcaaatacgtctgagttcgcgcattgatgacgtaactggagaccggaagttgaatttgaattcttgttaaagttaaatgggatttgtatgcattatatgatgaaattattcaattagcaaaataacattaaacttcaatgtattggaaaaacatttagtgtcgagattccagtcaaaataactcaaaaataaaatataaaatacaaccgcgaacaattcaaagtaatcggacattacgaatgattacgaaccattacgaacttgtcggtctccagttacgtcacgacttccggatgtgcaatacttagacaaggaaagagagaggacgagtaatccttgaccaaaagtgaagccaaactgacaccagagattttgatcatcgacgtatctttggggtattgttatgcattgagtatttagaataaaaacatgaaatgtatttaaaatgaagaatttgtgtacggtaaatgttttattaagttgctcatattacgtacatatgtttcaatacatatatatgtttttattacgaattttagatgatgatttactttattttttatgaaattttaaccttcaacgaacacccaccactggcaacccattgttatttttgacgtgaccgccatgtttctggtgacaaacaaaccaaaaactggcttcacttttggaacgtgtgtcttaaatgagtgttacccgtcctctcttttttccttgtctaaggttcccacctgttctatgaacctaacctaaaacgagattcgttgtttttgttgatttattatacttatcgttcaacgataaattggacgtatcttaaacaaatttaattcaaaaatggataatatactacctttattgatgtttgataatgaaatgaacaagaaataattttttagtgctgctggctgtgctggacttggcagagcagaaccattggatgacccaccataaataaataataattatcacgtaaatatgaattatgttgaaaatattgttccttaatacacagatttacaattttgtgagcatatacaattatgtatctcctaagtttcaattactttataattaaaaccattgtaaaataaatattttcaaataatcgcgccattacaatatatttcttaaacacgttcaatattgaagcgatacaaatactttgttcaataaaatggcgaccgtttcgtcaacacgttgaagtttactctaaattgacattgaagttcaccgaaaaatcttaaacagtttcaaagcgctgacatagcgcactggtcttgggaacgcacccattgtgttgttatattattttgcatcacatacttcttaag

SEQ ID NO: 854 - DNA, 1728 bp, Diabrotica virgifera
tggtgtcgtcacttcgttttgaatgacactctctatgctaatatataactttatgaatgaaaccctcgtgccgacactctgtcagcgtaggccatgaactagttaagaaaattatttattgatatatctaccagtgtctgtcaaattgtcaactgccaaactgaaaaagtatcaatggaaaataagaacaaaactttctgtatttgtagtgagaatagtatataaaaaactggtatgactttcacctgaaagtatacgtaatcgataactgagtcagttatcttatttattgaaatttttgtttacaaaagtcagacgaaactaggtaaatcatgtttttatttttggcagtatggttaaaaaaaaatgaagaataagctgtcatattgtgggagggaaatggctaaaccatgatactataaataaagagatagtattttcccgtagcgcaaatacgtctgagttcgcgcattgatgacgtaactggagaccggaagttgaatttgaattcttgttaaagttaaatgggatttgtatgcattatatgatgaaattattcaattagcaaaataacattaaacttcaatgtattggaaaaacatttagtgtcgagattccagtcaaaataactcaaaaataaaatataaaatacaaccgcgaacaattcaaagtaatcggacattacgaatgattacgaaccattacgaacttgtcggtctccagttacgtcacgacttccggatgtgcaatacttagacaaggaaagagagaggacgagtaatccttgaccaaaagtgaagccaaactgacaccagagattttgatcatcgacgtatctttggggtattgttatgcattgagtatttagaataaaaacatgaaatgtatttaaaatgaagaatttgtgtacggtaaatgttttattaagttgctcatattacgtacatatgtttcaatacatatatatgtttttattacgaattttagatgatgatttactttattttttatgaaattttaaccttcaacgaacacccaccactggcaacccattgttatttttgacgtgaccgccatgtttctggtgacaaacaaaccaaaaactggcttcacttttggaacgtgtgtcttaaatgagtgttacccgtcctctcttttttccttgtctaaggtgcaatatattatcttgttatttatagtattatgggctaaaccatagccgtcttttttgaacaggccgtcgcgtagtagctgtggcaacattgtcgagctgtcaaatagagggcctaattttaaattacggtgatgtgttatacggggctatgtttaaatgaaaacttccaataactagaaactaaagaagaaatgtcatttgatagaaacagttagaagcctcctaattttgtctgatttttgcaacaaaaattgtagtacagtctgtattatgtatgtaacgtatattgcttttgcaatacttaatttgtacaaggtttgtggcttccccaaatgtcttaatttggatggaaaatgttttttatactcataatttattattagacgtaaattgacgttctatgtttaacatatatgtatgacatctgttctgacctcattcaaaagtaataatatccatagtacaacttttttggtttatttttaagagctttttatataatttacatcgctgctaagccactgtttttagtgatattttatgcaataattttt

SEQ ID NO: 855 - DNA, 1472 bp, Diabrotica virgifera
aaactaatactcaatcgagaaaagaggaaaagtgttaaagtgattttttaataatatattgttactaaggaacgcttacaattttgaacatctttaacaacaaaattcttggatcacagaatatacacttgagagcagaataatcgactcacttgctgaataattgtacacgtggaatttcctaaacctgttgtccgatctgagtgattcttttagcatgttacagccctattatttaagaaaatcgatgtaataccatcgttgctatacaggtaaaggtcattttataccgggtgtaacagtcatagtgtgttttttcttaaagtttagaacaccctgtggagtattctagcatatacaaaatatttaaattaaaattcaattgtaggcttaggctttattaacattttcttttttgactcatttgcttatgttggataataaaaaagttaggtatgtttaagaaaaaaaccagtatgattgttgcacccggtgtaaaatgacctttacctgtctagcaataataaatattgcatcgattttcttaaagaataaggctgtaacatagccacctttagtttacaagccatgaagagaaaaaggcaacgtcgcaattgatgacgttggtagtctgactttcggactaccgctttcgaaactacgattttaaagtacaaattctggtaaaatttatagtattttttgagtcgaacaagaaaatattattaattagaagtttgtacaaaataatattaaaagtaattccttgtaagtaacgtttattatacaaaaaaaaacaataacaagaatataaacgggattatttttttcgaatcctaagaaaactaataagtatttttcaaaaatttaaacgcagaatgaaagattacgttaggaccgagggccgaaagtccctgaaaacttctatgtttattttaataagttacaggggtgaaaaactaagaaaatttagtgtgatttttagtttcaaatatgtcattaaaaaaaactttttattcgttctaagggactttcggccctcggtaataaagtaatctttccttctgcgtttaaatttttcaaaaatacttattagttttctcaggattcgaaaaaaatgattacatttaaaatacaggcgtcaaaattttacattttgttcctttccacttaaagtttgtcgcacttatttagaaacaccctgaattgataaagaacaaatctagttattaaacataagcgaattaatccaaaaaacagaatgttaagaaaaccggagtctatagttgggttttaatttcagtattttataaatgcccggtacaccataaaaatttaactggttagcaacaatgttattacagcggtattgttaaagaattaggctataacatattaaaaaaatcacttgaatctgccaacaggtttaggaaatataagacattaaaaatgacaaaatttttaagtggacg

SEQ ID NO: 856 - DNA, 1484 bp, Diabrotica virgifera
cacaaagcacataaatgaaaaattccttaccatttaacgttgcaagcgggattgtttggagtcaatataagctcttcccaattttgtgacatttgtgacgtcagacttaggatttccatagaccattccagagtgacgtcatttgacagcggtttaggggcaaacatcttgtaaacaaagtacgtttaatgcagaaaaccatgatactataaataaagagatagtattttcccgtagcgcaaatacgtctgagttcgcgcattgatgacgtaactggagaccggaagttgaatttgaattcttgttaaagttaaatgggatttgtatgcattatatgatgaaattattcaattagcaaaataacattaaacttcaatgtattggaaaaacatttagtgtcgagattccagtcaaaataactcaaaaataaaatataaaatacaaccgcgaacaattcaaagtaatcggacattacgaatgattacgaaccattacgaacttgtcggtctccagttacgtcacgacttccggatgtgcaatatattatcttgttatttatagtattatgggctaaaccatagccacctttacttacaagccatgaagagaaaaaggcaacgtcgcaattgatgacgttggtagtctgactttcggactaccgctttcgaaactacgattttaaagtacaaattctggtaaaatttatagtattttttgagtcgaacaagaaaatattattaattagaagtttgtacaaaataatattaaaagtaattccttgtaagtaacgtttattatacaaaaaaaaacaataacaagaatataaacgggattatttttttcgaatcctaagaaaactaataagtatttttcaaaaatttaaacgcagaatgaaagattacgttaggaccgagggccgaaagtccctgaaaacttctatgtttattttaataagttacaggggtgaaaaactaagaaaatttagtgtgatttttagtttcaaatatgtcattaaaaaaaactttttattcgttctaagggactttcggccctcggtaataaagtaatctttccttctgcgtttaaatttttcaaaaatacttattagttttctcaggattcgaaaaaaatgattacatttaaaatacaggcgtcaaaattttacattttgttcctttccacttaaagtttgtcgcacttatttagaaacaccctgaattgataaagaacaaatctagttattaaacataagcgaattaatccaaaaaacagaatgttaagaaaaccggagtctatagttgggttttaatttcagtattttataaatgcccggtacaccataaaaatttaactggttagcaacaatgttattacagcggtattgttaaagaattaggctataacatattaaaaaaatcacttgaatctgccaacaggtttaggaaatataagacattaaaaatgacaaaatttttaagtggacg

SEQ ID NO: 857 - DNA, 1572 bp, Diabrotica virgifera
cacaaagcacataaatgaaaaattccttaccatttaacgttgcaagcgggattgtttggagtcaatataagctcttcccaattttgtgacatttgtgacgtcagacttaggatttccatagaccattccagagtgacgtcatttgacagcggtttaggggcaaacatcttgtaaacaaagtacgtttaatgcagaaaaccatgatactataaataaagagatagtattttcccgtagcgcaaatacgtctgagttcgcgcattgatgacgtaactggagaccggaagttgaatttgaattcttgttaaagttaaatgggatttgtatgcattatatgatgaaattattcaattagcaaaataacattaaacttcaatgtattggaaaaacatttagtgtcgagattccagtcaaaataactcaaaaataaaatataaaatacaaccgcgaacaattcaaagtaatcggacattacgaatgattacgaaccattacgaacttgtcggtctccagttacgtcacgacttccggatgtgcaatacttagacaaggaaagagagaggacgagtaatccttgaccaaaagtgaagccaaactgacaccagagattttgatcatcgacgtatctttggggtattgttatgcattgagtatttagaataaaaacatgaaatgtatttaaaatgaagaatttgtgtacggtaaatgttttattaagttgctcatattacgtacatatgtttcaatacatatatatgtttttattacgaattttagatgatgatttactttattttttatgaaattttaaccttcaacgaacacccaccactggcaacccattgttatttttgacgtgaccgccatgtttctggtgacaaacaaaccaaaaactggcttcacttttggaacgtgtgtcttaaatgagtgttacccgtcctctcttttttccttgtctaaggttcccacctgttctatgaacctaacctaaaacgagattcgttgtttttgttgatttattatacttatcgttcaacgataaattggacgtatcttaaacaaatttaattcaaaaatggataatatactacctttattgatgtttgataatgaaatgaacaagaaataattttttagtgctgctggctgtgctggacttggcagagcagaaccattggatgacccaccataaataaataataattatcacgtaaatatgaattatgttgaaaatattgttccttaatacacagatttacaattttgtgagcatatacaattatgtatctcctaagtttcaattactttataattaaaaccattgtaaaataaatattttcaaataatcgcgccattacaatatatttcttaaacacgttcaatattgaagcgatacaaatactttgttcaataaaatggcgaccgtttcgtcaacacgttgaagtttactctaaattgacattgaagttcaccgaaaaatcttaaacagtttcaaagcgctgacatagcgcactggtcttgggaacgcacccattgtgttgttatattattttgcatcacatacttcttaag

SEQ ID NO: 858 - DNA, 1518 bp, Diabrotica virgifera
cacaaagcacataaatgaaaaattccttaccatttaacgttgcaagcgggattgtttggagtcaatataagctcttcccaattttgtgacatttgtgacgtcagacttaggatttccatagaccattccagagtgacgtcatttgacagcggtttaggggcaaacatcttgtaaacaaagtacgtttaatgcagaaaaccatgatactataaataaagagatagtattttcccgtagcgcaaatacgtctgagttcgcgcattgatgacgtaactggagaccggaagttgaatttgaattcttgttaaagttaaatgggatttgtatgcattatatgatgaaattattcaattagcaaaataacattaaacttcaatgtattggaaaaacatttagtgtcgagattccagtcaaaataactcaaaaataaaatataaaatacaaccgcgaacaattcaaagtaatcggacattacgaatgattacgaaccattacgaacttgtcggtctccagttacgtcacgacttccggatgtgcaatacttagacaaggaaagagagaggacgagtaatccttgaccaaaagtgaagccaaactgacaccagagattttgatcatcgacgtatctttggggtattgttatgcattgagtatttagaataaaaacatgaaatgtatttaaaatgaagaatttgtgtacggtaaatgttttattaagttgctcatattacgtacatatgtttcaatacatatatatgtttttattacgaattttagatgatgatttactttattttttatgaaattttaaccttcaacgaacacccaccactggcaacccattgttatttttgacgtgaccgccatgtttctggtgacaaacaaaccaaaaactggcttcacttttggaacgtgtgtcttaaatgagtgttacccgtcctctcttttttccttgtctaaggtgcaatatattatcttgttatttatagtattatgggctaaaccatagccgtcttttttgaacaggccgtcgcgtagtagctgtggcaacattgtcgagctgtcaaatagagggcctaattttaaattacggtgatgtgttatacggggctatgtttaaatgaaaacttccaataactagaaactaaagaagaaatgtcatttgatagaaacagttagaagcctcctaattttgtctgatttttgcaacaaaaattgtagtacagtctgtattatgtatgtaacgtatattgcttttgcaatacttaatttgtacaaggtttgtggcttccccaaatgtcttaatttggatggaaaatgttttttatactcataatttattattagacgtaaattgacgttctatgtttaacatatatgtatgacatctgttctgacctcattcaaaagtaataatatccatagtacaacttttttggtttatttttaagagctttttatataatttacatcgctgctaagccactgtttttagtgatattttatgcaataattttt

SEQ ID NO: 859 - DNA, 1213 bp, Diabrotica virgifera
atcgaagaagtttcacaactgtcacagtttgacttcagtacgtctaaaggtgggaaactatcaatataatgtaaattttatagatttctattgataatctcccacctctactagtttcatctcttttatatcacaccgtaatttcgcatgttattagcgcacccatcactgtatataaatatatacgaactacacacaattcagaataataatttttggactgtccctaaacacaaaaaatacacaattcatggtaataacaaaagcccaatagcgcgattccagttacaaccattaactctaccatagccacctttactttacaagccatgaagagaaaaaggcaacgtcgcaattgatgacgttggtagtctgactttcggactaccgctttcgaaactacgattttaaagtacaaattctggtaaaatttatagtattttttgagtcgaacaagaaaatattattaattagaagtttgtacaaaataatattaaaagtaattccttgtaagtaacgtttattatacaaaaaaaaacaataacaagaatataaacgggattatttttttcgaatcctaagaaaactaataagtatttttcaaaaatttaaacgcagaatgaaagattacgttaggaccgagggccgaaagtccctgaaaacttctatgtttattttaataagttacaggggtgaaaaactaagaaaatttagtgtgatttttagtttcaaatatgtcattaaaaaaaactttttattcgttctaagggactttcggccctcggtaataaagtaatctttccttctgcgtttaaatttttcaaaaatacttattagttttctcaggattcgaaaaaaatgattacatttaaaatacaggcgtcaaaattttacattttgttcctttccacttaaagtttgtcgcacttatttagaaacaccctgaattgataaagaacaaatctagttattaaacataagcgaattaatccaaaaaacagaatgttaagaaaaccggagtctatagttgggttttaatttcagtattttataaatgcccggtacaccataaaaatttaactggttagcaacaatgttattacagcggtattgttaaagaattaggctataacatattaaaaaaatcacttgaatctgccaacaggtttaggaaatataagacattaaaaatgacaaaatttttaagtggacg

SEQ ID NO: 860 - DNA, 1117 bp, Diabrotica virgifera
tgctcagcaacaacattattacagcggtatagggcccttcattcacagtcatttgtttcgagcccctgtcacgtgtcacacaataccaatatatccacgacatacgctattggtatatacaataatacaaaccaaagacgtatgacgtagatatattaacactatgcgacacatgacagaagctcgaaacaaatgacaatcgatgaaaagccctattgttaaagaatcaggctataacacactaaaaaaatcacttgaatcggccaacaggtctagcaaatataagacatcaaaaatgacaaaaatttaagtggacgcacttccatatgcacgcaagtttatataaaaatatattatactataaaatatattatataaaaatatattatattgaactaaaatcatcttaatacataccttttaatattctttataatttggagtacgaaatattgtaaaatgtttgagttttctgtaaatacagtgaatattatttaaaacatttaaaaataaatgagaactgtcagaattaaccggtctacgcttagatgttgccaagtttcaacttcatggcttgtaaagtaaaggtggctatggctaaaccatagccgtcttttttgaacaggccgtcgcgtagtagctgtggcaacattgtcgagctgtcaaatagagggcctaattttaaattacggtgatgtgttatacggggctatgtttaaatgaaaacttccaataactagaaactaaagaagaaatgtcatttgatagaaacagttagaagcctcctaattttgtctgatttttgcaacaaaaattgtagtacagtctgtattatgtatgtaacgtatattgcttttgcaatacttaatttgtacaaggtttgtggcttccccaaatgtcttaatttggatggaaaatgttttttatactcataatttattattagacgtaaattgacgttctatgtttaacatatatgtatgacatctgttctgacctcattcaaaagtaataatatccatagtacaacttttttggtttatttttaagagctttttatataatttacatcgctgctaagccactgtttttagtgatattttatgcaataattttt

SEQ ID NO: 861 - DNA, 776 bp, Diabrotica virgifera
tggtgtcgtcacttcgttttgaatgacactctctatgctaatatataactttatgaatgaaaccctcgtgccgacactctgtcagcgtaggccatgaactagttaagaaaattatttattgatatatctaccagtgtctgtcaaattgtcaactgccaaactgaaaaagtatcaatggaaaataagaacaaaactttctgtatttgtagtgagaatagtatataaaaaactggtatgactttcacctgaaagtatacgtaatcgataactgagtcagttatcttatttattgaaatttttgtttacaaaagtcagacgaaactaggtaaatcatgtttttatttttggcagtatggttaaaaaaaaatgaagaataagctgtcatattgtgggagggaaatggctaaaccatgatactataaataaagagatagtattttcccgtagcgcaaatacgtctgagttcgcgcattgatgacgtaactggagaccggaagttgaatttgaattcttgttaaagttaaatgggatttgtatgcattatatgatgaaattattcaattagcaaaataacattaaacttcaatgtattggaaaaacatttagtgtcgagattccagtcaaaataactcaaaaataaaatataaaatacaaccgcgaacaattcaaagtaatcggacattacgaatgattacgaaccattacgaacttgtcggtctccagttacgtcacgacttccggatgtgcaatatattatcttgttatttatagtattt

SEQ ID NO: 862 - DNA, 566 bp, Diabrotica virgifera
cacaaagcacataaatgaaaaattccttaccatttaacgttgcaagcgggattgtttggagtcaatataagctcttcccaattttgtgacatttgtgacgtcagacttaggatttccatagaccattccagagtgacgtcatttgacagcggtttaggggcaaacatcttgtaaacaaagtacgtttaatgcagaaaaccatgatactataaataaagagatagtattttcccgtagcgcaaatacgtctgagttcgcgcattgatgacgtaactggagaccggaagttgaatttgaattcttgttaaagttaaatgggatttgtatgcattatatgatgaaattattcaattagcaaaataacattaaacttcaatgtattggaaaaacatttagtgtcgagattccagtcaaaataactcaaaaataaaatataaaatacaaccgcgaacaattcaaagtaatcggacattacgaatgattacgaaccattacgaacttgtcggtctccagttacgtcacgacttccggatgtgcaatatattatcttgttatttatagtattt

SEQ ID NO: 863 - DNA, 2834 bp, Diabrotica virgifera
  SmartBlast Evalue=8E-19; Info=Apolipoprotein D n=1 Tax= Camponotus floridanus RepID=E2ABN0_9HYME
tggtgtcgtcacttcgttttgaatgacactctctatgctaatatataactttatgaatgaaaccctcgtgccgacactctgtcagcgtaggccatgaactagttaagaaaattatttattgatatatctaccagtgtctgtcaaattgtcaactgccaaactgaaaaagtatcaatggaaaataagaacaaaactttctgtatttgtagtgagaatagtatataaaaaactggtatgactttcacctgaaagtatacgtaatcgataactgagtcagttatcttatttattgaaatttttgtttacaaaagtcagacgaaactaggtaaatcatgtttttatttttggcagtatggttaaaaaaaaatgaagaataagctgtcatattgtgggagggaaatggctaaaccatgatactataaataaagagatagtattttcccgtagcgcaaatacgtctgagttcgcgcattgatgacgtaactggagaccggaagttgaatttgaattcttgttaaagttaaatgggatttgtatgcattatatgatgaaattattcaattagcaaaataacattaaacttcaatgtattggaaaaacatttagtgtcgagattccagtcaaaataactcaaaaataaaatataaaatacaaccgcgaacaattcaaagtaatcggacattacgaatgattacgaaccattacgaacttgtcggtctccagttacgtcacgacttccggatgtgcaatatattatcttgttatttatagtattatgggctaaaccatagccacctttacttacaagccatgaagagaaaaaggcaacgtcgcaattgatgacgttggtagtctgactttcggactaccgctttcgaaactacgattttaaagtacaaattctggtaaaatttatagtattttttgagtcgaacaagaaaatattattaattagaagtttgtacaaaataatattaaaagtaattccttgtaagtaacgtttattatacaaaaaaaaacaataacaagaatataaacgggattatttttttcgaatcctaagaaaactaataagtatttttcaaaaatttaaacgcagaatgaaagattacgttaggaccgagggccgaaagtccctgaaaacttctatgtttattttaataagttacaggggtgaaaaactaagaaaatttagtgtgatttttagtttcaaatatgtcattaaaaaaaactttttattcgttctaagggactttcggccctcggtaataaagtaatctttccttctgcgtttaaatttttcaaaaatacttattagttttctcaggattcgaaaaaaatgattacatttaaaatacaggcgtcaaaattttacattttgttcctttccacttaaagtttgtcgcacttatttagaaacaccctgaattgataaagaacaaatctagttgttaaacataagcgaattaatcaaaaaaacagaatgttaagaaaaccggagtctatagttgggttttaatttcagtattttataaatgcccggtacaccataaaaatttaactggttagcaacaatattattacaacggtattgtaaaagaattaggctataacatattaaaaaatcacttaaatctgccaacagatttaggaaatataagacattaaaaatgacaaaatttttaagtggacggatttctatatgcacgcaagtttatacatataaaaatatattatattgaactaaaatcattttaataacatacctttaaatgttctttataatttggagcacgaaatattgtaaaatatttcagtttctctgtaaatacagtgaaaattatttaaaaacaaatgagaactgtcagaattaatcggtctaccaatagatgttgccaaatttcaacttcatggcttgttaagtaaaggtggctatggtataaccgttcaaaagatacgaggggggtacggacttttgactagcactgtataaccagagaacaataaccacatgtggttattgttctctggtataacgcttagcgtgtaatcgggaaacagtaaaaatatgttttctgaaaaaataaaatacatctataaagtcgtctctctaattttttcagattaaaaatacatcaatcatggccattaaaatgtattacaatttgtacataataaaataatatataatatattttattttaatcataatcgcagcccatttgatcagtcattattatttcctttcgagaaatattgttagcttctagaacgtcgacaattgcatctatatcatctggtgatccatattgatgtcttgttgtaaggaaaagactctctagaaaaacaccatctcgttcaaaacaggagaaacctacagaccatcttttatagtctgtaccaagaatccaaaaaggtacagttacgtctggattaagaaaatgtactaaaaatttggcttctcctgtggttgaatttgatattccttccccttcgagaacatgtgtctcatttgtttcggaattgatgtattgcgtacgactctttacagatccatttgagtttactgcaatattggtaacaacacatcttccgtgatcttccagtaaagttgggtatcttgcttgttcgaaccagtcacccaaatatgcttttccatcgaaatttgcaactccttttacatctgggcatctttcaacaggaatttgtccctgtacagatattacaagcaaagaaatagttactgcaaaaccaatcattttcgtggttttataaacacagacgaatctaatttaatgttgtaagtaaaatttccttttatataaagtccatcg

SEQ ID NO: 864 - DNA, 758 bp, Diabrotica virgifera
aatagtacattatataccgcgggactgaagtagtacatttaatcctgaaggtaaagtttatggcccgaccgcagggagggccataatttacctgaaggattaaatgtacttcagtcgcaaggtatatacgatacttttcgtacttccggtatgattttattaattatttcaataatttcaatcagttttttctctcttcaactcatttaataaactgtctttaaaataagttaccatagtaacattgcgttgtgacagttataatttagaaacattgtcattactagtgtcattgtaaagaaacattgttattgataattattggtatcatgagtgaagaaggtgtatctgatattgataaaagagcatataataaaatatttggtcaagtcgccgattcgtccactatagttatgccacagtcctcattctcgcttcctgtttccgcaggatcttcgaaacaaacaccagttcaatatgaaaaggacctatctgttactcgtcagttacctgctgcattaacccaggaaagactggtcaatatgacgaactgtcacaatattaatttgaatattaacgttaattaccattctaattaattatattttcaataaaatatcccttaaattcgtttgtttgtgatttaatcgttccgggagtttcgtcaatatttaatcccggagggattaaatgtgacactttagtacctgtcacaagggagtgaagttgtcactttaggcccggaagtacgaaaaata

SEQ ID NO: 865 - DNA, 2834 bp, Diabrotica virgifera
  SmartBlast Evalue=3E-18; Info=Apolipoprotein D n=1 Tax= Camponotus floridanus RepID=E2ABN0_9HYME
tggtgtcgtcacttcgttttgaatgacactctctatgctaatatataactttatgaatgaaaccctcgtgccgacactctgtcagcgtaggccatgaactagttaagaaaattatttattgatatatctaccagtgtctgtcaaattgtcaactgccaaactgaaaaagtatcaatggaaaataagaacaaaactttctgtatttgtagtgagaatagtatataaaaaactggtatgactttcacctgaaagtatacgtaatcgataactgagtcagttatcttatttattgaaatttttgtttacaaaagtcagacgaaactaggtaaatcatgtttttatttttggcagtatggttaaaaaaaaatgaagaataagctgtcatattgtgggagggaaatggctaaaccatgatactataaataaagagatagtattttcccgtagcgcaaatacgtctgagttcgcgcattgatgacgtaactggagaccggaagttgaatttgaattcttgttaaagttaaatgggatttgtatgcattatatgatgaaattattcaattagcaaaataacattaaacttcaatgtattggaaaaacatttagtgtcgagattccagtcaaaataactcaaaaataaaatataaaatacaaccgcgaacaattcaaagtaatcggacattacgaatgattacgaaccattacgaacttgtcggtctccagttacgtcacgacttccggatgtgcaatatattatcttgttatttatagtattatgggctaaaccatagccacctttacttacaagccatgaagagaaaaaggcaacgtcgcaattgatgacgttggtagtctgactttcggactaccgctttcgaaactacgattttaaagtacaaattctggtaaaatttatagtattttttgagtcgaacaagaaaatattattaattagaagtttgtacaaaataatattaaaagtaattccttgtaagtaacgtttattatacaaaaaaaaacaataacaagaatataaacgggattatttttttcgaatcctaagaaaactaataagtatttttcaaaaatttaaacgcagaatgaaagattacgttaggaccgagggccgaaagtccctgaaaacttctatgtttattttaataagttacaggggtgaaaaactaagaaaatttagtgtgatttttagtttcaaatatgtcattaaaaaaaactttttattcgttctaagggactttcggccctcggtaataaagtaatctttccttctgcgtttaaatttttcaaaaatacttattagttttctcaggattcgaaaaaaatgattacatttaaaatacaggcgtcaaaattttacattttgttcctttccacttaaagtttgtcgcacttatttagaaacaccctgaattgataaagaacaaatctagttgttaaacataagcgaattaatcaaaaaaacagaatgttaagaaaaccggagtctatagttgggttttaatttcagtattttataaatgcccggtacaccataaaaatttaactggttagcaacaatattattacaacggtattgtaaaagaattaggctataacatattaaaaaatcacttaaatctgccaacagatttaggaaatataagacattaaaaatgacaaaatttttaagtggacggatttctatatgcacgcaagtttatacatataaaaatatattatattgaactaaaatcattttaataacatacctttaaatgttctttataatttggagcacgaaatattgtaaaatatttcagtttctctgtaaatacagtgaaaattatttaaaaacaaatgagaactgtcagaattaatcggtctaccaatagatgttgccaaatttcaacttcatggcttgttaagtaaaggtggctatggtataaccgttcaaaagatacgaggggggtacggacttttgactagcactgtataaccagagaacaataaccacatgtggttattgttctctggtataacgcttagcgtgtaatcgggaaacagtaaaaatatgttttctgaaaaaataaaatacatctataaagtcgtctctctaattttttcagattaaaaatacatcaatcatggccattaaaatgtattacaatttgtacataataaaataatatataatatattttattttaatcataatcgcagcccatttgatcagtcattattatttcctttcgagaaatattgttagcttctagaacgtcgacaattgcatctatatcatctggtgatccatattgatgtcttgttgtaaggaaaagactctctagaaaaacaccatctcgttcaaaacaggagaaacctacagaccatcttttatagtctgtaccaagaatccaaaaaggtacagttacgtctggattaagaaaatgtactaaaaatttggcttctcctgtggttgaatttgatattccttccccttcgagaacatgtgtctcatttgtttcggaattgatgtattgcgtacgactctttacagatccatctgagtttactgcaatattggtaacaacacatcttccgtgatcttccagtaaagttgggtatcttgcttgttcgaaccagtcacccaaatatgcttttccatcgaaatttgcaactccttttacatctgggcatctttcaacaggaatttgtccctgtacagatattacaagcaaagaaatagttactgcaaaaccaatcattttcgtggttttataaacacagacgaatctaatttaatgttgtaagtaaaatttccttttatataaagtccatcg

SEQ ID NO: 866 - DNA, 2612 bp, Diabrotica virgifera
  SmartBlast Evalue=7E-19; Info=Apolipoprotein D n=1 Tax= Camponotus floridanus RepID=E2ABN0_9HYME
aaactaatactcaatcgagaaaagaggaaaagtgttaaagtgattttttaataatatattgttactaaggaacgcttacaattttgaacatctttaacaacaaaattcttggatcacagaatatacacttgagagcagaataatcgactcacttgctgaataattgtacacgtggaatttcctaaacctgttgtccgatctgagtgattcttttagcatgttacagccctattatttaagaaaatcgatgtaataccatcgttgctatacaggtaaaggtcattttataccgggtgtaacagtcatagtgtgttttttcttaaagtttagaacaccctgtggagtattctagcatatacaaaatatttaaattaaaattcaattgtaggcttaggctttattaacattttcttttttgactcatttgcttatgttggataataaaaaagttaggtatgtttaagaaaaaaaccagtatgattgttgcacccggtgtaaaatgacctttacctgtctagcaataataaatattgcatcgattttcttaaagaataaggctgtaacatagccacctttagtttacaagccatgaagagaaaaaggcaacgtcgcaattgatgacgttggtagtctgactttcggactaccgctttcgaaactacgattttaaagtacaaattctggtaaaatttatagtattttttgagtcgaacaagaaaatattattaattagaagtttgtacaaaataatattaaaagtaattccttgtaagtaacgtttattatacaaaaaaaaacaataacaagaatataaacgggattatttttttcgaatcctaagaaaactaataagtatttttcaaaaatttaaacgcagaatgaaagattacgttaggaccgagggccgaaagtccctgaaaacttctatgtttattttaataagttacaggggtgaaaaactaagaaaatttagtgtgatttttagtttcaaatatgtcattaaaaaaaactttttattcgttctaagggactttcggccctcggtaataaagtaatctttccttctgcgtttaaatttttcaaaaatacttattagttttctcaggattcgaaaaaaatgattacatttaaaatacaggcgtcaaaattttacattttgttcctttccacttaaagtttgtcgcacttatttagaaacaccctgaattgataaagaacaaatctagttgttaaacataagcgaattaatcaaaaaaacagaatgttaagaaaaccggagtctatagttgggttttaatttcagtattttataaatgcccggtacaccataaaaatttaactggttagcaacaatattattacaacggtattgtaaaagaattaggctataacatattaaaaaatcacttaaatctgccaacagatttaggaaatataagacattaaaaatgacaaaatttttaagtggacggatttctatatgcacgcaagtttatacatataaaaatatattatattgaactaaaatcattttaataacatacctttaaatgttctttataatttggagcacgaaatattgtaaaatatttcagtttctctgtaaatacagtgaaaattatttaaaaacaaatgagaactgtcagaattaatcggtctaccaatagatgttgccaaatttcaacttcatggcttgttaagtaaaggtggctatggtataaccgttcaaaagatacgaggggggtacggacttttgactagcactgtataaccagagaacaataaccacatgtggttattgttctctggtataacgcttagcgtgtaatcgggaaacagtaaaaatatgttttctgaaaaaataaaatacatctataaagtcgtctctctaattttttcagattaaaaatacatcaatcatggccattaaaatgtattacaatttgtacataataaaataatatataatatattttattttaatcataatcgcagcccatttgatcagtcattattatttcctttcgagaaatattgttagcttctagaacgtcgacaattgcatctatatcatctggtgatccatattgatgtcttgttgtaaggaaaagactctctagaaaaacaccatctcgttcaaaacaggagaaacctacagaccatcttttatagtctgtaccaagaatccaaaaaggtacagttacgtctggattaagaaaatgtactaaaaatttggcttctcctgtggttgaatttgatattccttccccttcgagaacatgtgtctcatttgtttcggaattgatgtattgcgtacgactctttacagatccatttgagtttactgcaatattggtaacaacacatcttccgtgatcttccagtaaagttgggtatcttgcttgttcgaaccagtcacccaaatatgcttttccatcgaaatttgcaactccttttacatctgggcatctttcaacaggaatttgtccctgtacagatattacaagcaaagaaatagttactgcaaaaccaatcattttcgtggttttataaacacagacgaatctaatttaatgttgtaagtaaaatttccttttatataaagtccatcg

SEQ ID NO: 867 - DNA, 2624 bp, Diabrotica virgifera
  SmartBlast Evalue=7E-19; Info=Apolipoprotein D n=1 Tax= Camponotus floridanus RepID=E2ABN0_9HYME
cacaaagcacataaatgaaaaattccttaccatttaacgttgcaagcgggattgtttggagtcaatataagctcttcccaattttgtgacatttgtgacgtcagacttaggatttccatagaccattccagagtgacgtcatttgacagcggtttaggggcaaacatcttgtaaacaaagtacgtttaatgcagaaaaccatgatactataaataaagagatagtattttcccgtagcgcaaatacgtctgagttcgcgcattgatgacgtaactggagaccggaagttgaatttgaattcttgttaaagttaaatgggatttgtatgcattatatgatgaaattattcaattagcaaaataacattaaacttcaatgtattggaaaaacatttagtgtcgagattccagtcaaaataactcaaaaataaaatataaaatacaaccgcgaacaattcaaagtaatcggacattacgaatgattacgaaccattacgaacttgtcggtctccagttacgtcacgacttccggatgtgcaatatattatcttgttatttatagtattatgggctaaaccatagccacctttacttacaagccatgaagagaaaaaggcaacgtcgcaattgatgacgttggtagtctgactttcggactaccgctttcgaaactacgattttaaagtacaaattctggtaaaatttatagtattttttgagtcgaacaagaaaatattattaattagaagtttgtacaaaataatattaaaagtaattccttgtaagtaacgtttattatacaaaaaaaaacaataacaagaatataaacgggattatttttttcgaatcctaagaaaactaataagtatttttcaaaaatttaaacgcagaatgaaagattacgttaggaccgagggccgaaagtccctgaaaacttctatgtttattttaataagttacaggggtgaaaaactaagaaaatttagtgtgatttttagtttcaaatatgtcattaaaaaaaactttttattcgttctaagggactttcggccctcggtaataaagtaatctttccttctgcgtttaaatttttcaaaaatacttattagttttctcaggattcgaaaaaaatgattacatttaaaatacaggcgtcaaaattttacattttgttcctttccacttaaagtttgtcgcacttatttagaaacaccctgaattgataaagaacaaatctagttgttaaacataagcgaattaatcaaaaaaacagaatgttaagaaaaccggagtctatagttgggttttaatttcagtattttataaatgcccggtacaccataaaaatttaactggttagcaacaatattattacaacggtattgtaaaagaattaggctataacatattaaaaaatcacttaaatctgccaacagatttaggaaatataagacattaaaaatgacaaaatttttaagtggacggatttctatatgcacgcaagtttatacatataaaaatatattatattgaactaaaatcattttaataacatacctttaaatgttctttataatttggagcacgaaatattgtaaaatatttcagtttctctgtaaatacagtgaaaattatttaaaaacaaatgagaactgtcagaattaatcggtctaccaatagatgttgccaaatttcaacttcatggcttgttaagtaaaggtggctatggtataaccgttcaaaagatacgaggggggtacggacttttgactagcactgtataaccagagaacaataaccacatgtggttattgttctctggtataacgcttagcgtgtaatcgggaaacagtaaaaatatgttttctgaaaaaataaaatacatctataaagtcgtctctctaattttttcagattaaaaatacatcaatcatggccattaaaatgtattacaatttgtacataataaaataatatataatatattttattttaatcataatcgcagcccatttgatcagtcattattatttcctttcgagaaatattgttagcttctagaacgtcgacaattgcatctatatcatctggtgatccatattgatgtcttgttgtaaggaaaagactctctagaaaaacaccatctcgttcaaaacaggagaaacctacagaccatcttttatagtctgtaccaagaatccaaaaaggtacagttacgtctggattaagaaaatgtactaaaaatttggcttctcctgtggttgaatttgatattccttccccttcgagaacatgtgtctcatttgtttcggaattgatgtattgcgtacgactctttacagatccatttgagtttactgcaatattggtaacaacacatcttccgtgatcttccagtaaagttgggtatcttgcttgttcgaaccagtcacccaaatatgcttttccatcgaaatttgcaactccttttacatctgggcatctttcaacaggaatttgtccctgtacagatattacaagcaaagaaatagttactgcaaaaccaatcattttcgtggttttataaacacagacgaatctaatttaatgttgtaagtaaaatttccttttatataaagtccatcg

SEQ ID NO: 868 - DNA, 2612 bp, Diabrotica virgifera
  SmartBlast Evalue=3E-18; Info=Apolipoprotein D n=1 Tax= Camponotus floridanus RepID=E2ABN0_9HYME
aaactaatactcaatcgagaaaagaggaaaagtgttaaagtgattttttaataatatattgttactaaggaacgcttacaattttgaacatctttaacaacaaaattcttggatcacagaatatacacttgagagcagaataatcgactcacttgctgaataattgtacacgtggaatttcctaaacctgttgtccgatctgagtgattcttttagcatgttacagccctattatttaagaaaatcgatgtaataccatcgttgctatacaggtaaaggtcattttataccgggtgtaacagtcatagtgtgttttttcttaaagtttagaacaccctgtggagtattctagcatatacaaaatatttaaattaaaattcaattgtaggcttaggctttattaacattttcttttttgactcatttgcttatgttggataataaaaaagttaggtatgtttaagaaaaaaaccagtatgattgttgcacccggtgtaaaatgacctttacctgtctagcaataataaatattgcatcgattttcttaaagaataaggctgtaacatagccacctttagtttacaagccatgaagagaaaaaggcaacgtcgcaattgatgacgttggtagtctgactttcggactaccgctttcgaaactacgattttaaagtacaaattctggtaaaatttatagtattttttgagtcgaacaagaaaatattattaattagaagtttgtacaaaataatattaaaagtaattccttgtaagtaacgtttattatacaaaaaaaaacaataacaagaatataaacgggattatttttttcgaatcctaagaaaactaataagtatttttcaaaaatttaaacgcagaatgaaagattacgttaggaccgagggccgaaagtccctgaaaacttctatgtttattttaataagttacaggggtgaaaaactaagaaaatttagtgtgatttttagtttcaaatatgtcattaaaaaaaactttttattcgttctaagggactttcggccctcggtaataaagtaatctttccttctgcgtttaaatttttcaaaaatacttattagttttctcaggattcgaaaaaaatgattacatttaaaatacaggcgtcaaaattttacattttgttcctttccacttaaagtttgtcgcacttatttagaaacaccctgaattgataaagaacaaatctagttgttaaacataagcgaattaatcaaaaaaacagaatgttaagaaaaccggagtctatagttgggttttaatttcagtattttataaatgcccggtacaccataaaaatttaactggttagcaacaatattattacaacggtattgtaaaagaattaggctataacatattaaaaaatcacttaaatctgccaacagatttaggaaatataagacattaaaaatgacaaaatttttaagtggacggatttctatatgcacgcaagtttatacatataaaaatatattatattgaactaaaatcattttaataacatacctttaaatgttctttataatttggagcacgaaatattgtaaaatatttcagtttctctgtaaatacagtgaaaattatttaaaaacaaatgagaactgtcagaattaatcggtctaccaatagatgttgccaaatttcaacttcatggcttgttaagtaaaggtggctatggtataaccgttcaaaagatacgaggggggtacggacttttgactagcactgtataaccagagaacaataaccacatgtggttattgttctctggtataacgcttagcgtgtaatcgggaaacagtaaaaatatgttttctgaaaaaataaaatacatctataaagtcgtctctctaattttttcagattaaaaatacatcaatcatggccattaaaatgtattacaatttgtacataataaaataatatataatatattttattttaatcataatcgcagcccatttgatcagtcattattatttcctttcgagaaatattgttagcttctagaacgtcgacaattgcatctatatcatctggtgatccatattgatgtcttgttgtaaggaaaagactctctagaaaaacaccatctcgttcaaaacaggagaaacctacagaccatcttttatagtctgtaccaagaatccaaaaaggtacagttacgtctggattaagaaaatgtactaaaaatttggcttctcctgtggttgaatttgatattccttccccttcgagaacatgtgtctcatttgtttcggaattgatgtattgcgtacgactctttacagatccatctgagtttactgcaatattggtaacaacacatcttccgtgatcttccagtaaagttgggtatcttgcttgttcgaaccagtcacccaaatatgcttttccatcgaaatttgcaactccttttacatctgggcatctttcaacaggaatttgtccctgtacagatattacaagcaaagaaatagttactgcaaaaccaatcattttcgtggttttataaacacagacgaatctaatttaatgttgtaagtaaaatttccttttatataaagtccatcg

SEQ ID NO: 869 - DNA, 2624 bp, Diabrotica virgifera
  SmartBlast Evalue=3E-18; Info=Apolipoprotein D n=1 Tax= Camponotus floridanus RepID=E2ABN0_9HYME
cacaaagcacataaatgaaaaattccttaccatttaacgttgcaagcgggattgtttggagtcaatataagctcttcccaattttgtgacatttgtgacgtcagacttaggatttccatagaccattccagagtgacgtcatttgacagcggtttaggggcaaacatcttgtaaacaaagtacgtttaatgcagaaaaccatgatactataaataaagagatagtattttcccgtagcgcaaatacgtctgagttcgcgcattgatgacgtaactggagaccggaagttgaatttgaattcttgttaaagttaaatgggatttgtatgcattatatgatgaaattattcaattagcaaaataacattaaacttcaatgtattggaaaaacatttagtgtcgagattccagtcaaaataactcaaaaataaaatataaaatacaaccgcgaacaattcaaagtaatcggacattacgaatgattacgaaccattacgaacttgtcggtctccagttacgtcacgacttccggatgtgcaatatattatcttgttatttatagtattatgggctaaaccatagccacctttacttacaagccatgaagagaaaaaggcaacgtcgcaattgatgacgttggtagtctgactttcggactaccgctttcgaaactacgattttaaagtacaaattctggtaaaatttatagtattttttgagtcgaacaagaaaatattattaattagaagtttgtacaaaataatattaaaagtaattccttgtaagtaacgtttattatacaaaaaaaaacaataacaagaatataaacgggattatttttttcgaatcctaagaaaactaataagtatttttcaaaaatttaaacgcagaatgaaagattacgttaggaccgagggccgaaagtccctgaaaacttctatgtttattttaataagttacaggggtgaaaaactaagaaaatttagtgtgatttttagtttcaaatatgtcattaaaaaaaactttttattcgttctaagggactttcggccctcggtaataaagtaatctttccttctgcgtttaaatttttcaaaaatacttattagttttctcaggattcgaaaaaaatgattacatttaaaatacaggcgtcaaaattttacattttgttcctttccacttaaagtttgtcgcacttatttagaaacaccctgaattgataaagaacaaatctagttgttaaacataagcgaattaatcaaaaaaacagaatgttaagaaaaccggagtctatagttgggttttaatttcagtattttataaatgcccggtacaccataaaaatttaactggttagcaacaatattattacaacggtattgtaaaagaattaggctataacatattaaaaaatcacttaaatctgccaacagatttaggaaatataagacattaaaaatgacaaaatttttaagtggacggatttctatatgcacgcaagtttatacatataaaaatatattatattgaactaaaatcattttaataacatacctttaaatgttctttataatttggagcacgaaatattgtaaaatatttcagtttctctgtaaatacagtgaaaattatttaaaaacaaatgagaactgtcagaattaatcggtctaccaatagatgttgccaaatttcaacttcatggcttgttaagtaaaggtggctatggtataaccgttcaaaagatacgaggggggtacggacttttgactagcactgtataaccagagaacaataaccacatgtggttattgttctctggtataacgcttagcgtgtaatcgggaaacagtaaaaatatgttttctgaaaaaataaaatacatctataaagtcgtctctctaattttttcagattaaaaatacatcaatcatggccattaaaatgtattacaatttgtacataataaaataatatataatatattttattttaatcataatcgcagcccatttgatcagtcattattatttcctttcgagaaatattgttagcttctagaacgtcgacaattgcatctatatcatctggtgatccatattgatgtcttgttgtaaggaaaagactctctagaaaaacaccatctcgttcaaaacaggagaaacctacagaccatcttttatagtctgtaccaagaatccaaaaaggtacagttacgtctggattaagaaaatgtactaaaaatttggcttctcctgtggttgaatttgatattccttccccttcgagaacatgtgtctcatttgtttcggaattgatgtattgcgtacgactctttacagatccatctgagtttactgcaatattggtaacaacacatcttccgtgatcttccagtaaagttgggtatcttgcttgttcgaaccagtcacccaaatatgcttttccatcgaaatttgcaactccttttacatctgggcatctttcaacaggaatttgtccctgtacagatattacaagcaaagaaatagttactgcaaaaccaatcattttcgtggttttataaacacagacgaatctaatttaatgttgtaagtaaaatttccttttatataaagtccatcg

SEQ ID NO: 870 - DNA, 2353 bp, Diabrotica virgifera
  SmartBlast Evalue=6E-19; Info=Apolipoprotein D n=1 Tax= Camponotus floridanus RepID=E2ABN0_9HYME
atcgaagaagtttcacaactgtcacagtttgacttcagtacgtctaaaggtgggaaactatcaatataatgtaaattttatagatttctattgataatctcccacctctactagtttcatctcttttatatcacaccgtaatttcgcatgttattagcgcacccatcactgtatataaatatatacgaactacacacaattcagaataataatttttggactgtccctaaacacaaaaaatacacaattcatggtaataacaaaagcccaatagcgcgattccagttacaaccattaactctaccatagccacctttactttacaagccatgaagagaaaaaggcaacgtcgcaattgatgacgttggtagtctgactttcggactaccgctttcgaaactacgattttaaagtacaaattctggtaaaatttatagtattttttgagtcgaacaagaaaatattattaattagaagtttgtacaaaataatattaaaagtaattccttgtaagtaacgtttattatacaaaaaaaaacaataacaagaatataaacgggattatttttttcgaatcctaagaaaactaataagtatttttcaaaaatttaaacgcagaatgaaagattacgttaggaccgagggccgaaagtccctgaaaacttctatgtttattttaataagttacaggggtgaaaaactaagaaaatttagtgtgatttttagtttcaaatatgtcattaaaaaaaactttttattcgttctaagggactttcggccctcggtaataaagtaatctttccttctgcgtttaaatttttcaaaaatacttattagttttctcaggattcgaaaaaaatgattacatttaaaatacaggcgtcaaaattttacattttgttcctttccacttaaagtttgtcgcacttatttagaaacaccctgaattgataaagaacaaatctagttgttaaacataagcgaattaatcaaaaaaacagaatgttaagaaaaccggagtctatagttgggttttaatttcagtattttataaatgcccggtacaccataaaaatttaactggttagcaacaatattattacaacggtattgtaaaagaattaggctataacatattaaaaaatcacttaaatctgccaacagatttaggaaatataagacattaaaaatgacaaaatttttaagtggacggatttctatatgcacgcaagtttatacatataaaaatatattatattgaactaaaatcattttaataacatacctttaaatgttctttataatttggagcacgaaatattgtaaaatatttcagtttctctgtaaatacagtgaaaattatttaaaaacaaatgagaactgtcagaattaatcggtctaccaatagatgttgccaaatttcaacttcatggcttgttaagtaaaggtggctatggtataaccgttcaaaagatacgaggggggtacggacttttgactagcactgtataaccagagaacaataaccacatgtggttattgttctctggtataacgcttagcgtgtaatcgggaaacagtaaaaatatgttttctgaaaaaataaaatacatctataaagtcgtctctctaattttttcagattaaaaatacatcaatcatggccattaaaatgtattacaatttgtacataataaaataatatataatatattttattttaatcataatcgcagcccatttgatcagtcattattatttcctttcgagaaatattgttagcttctagaacgtcgacaattgcatctatatcatctggtgatccatattgatgtcttgttgtaaggaaaagactctctagaaaaacaccatctcgttcaaaacaggagaaacctacagaccatcttttatagtctgtaccaagaatccaaaaaggtacagttacgtctggattaagaaaatgtactaaaaatttggcttctcctgtggttgaatttgatattccttccccttcgagaacatgtgtctcatttgtttcggaattgatgtattgcgtacgactctttacagatccatttgagtttactgcaatattggtaacaacacatcttccgtgatcttccagtaaagttgggtatcttgcttgttcgaaccagtcacccaaatatgcttttccatcgaaatttgcaactccttttacatctgggcatctttcaacaggaatttgtccctgtacagatattacaagcaaagaaatagttactgcaaaaccaatcattttcgtggttttataaacacagacgaatctaatttaatgttgtaagtaaaatttccttttatataaagtccatcg

SEQ ID NO: 871 - DNA, 2353 bp, Diabrotica virgifera
  SmartBlast Evalue=2E-18; Info=Apolipoprotein D n=1 Tax= Camponotus floridanus RepID=E2ABN0_9HYME
atcgaagaagtttcacaactgtcacagtttgacttcagtacgtctaaaggtgggaaactatcaatataatgtaaattttatagatttctattgataatctcccacctctactagtttcatctcttttatatcacaccgtaatttcgcatgttattagcgcacccatcactgtatataaatatatacgaactacacacaattcagaataataatttttggactgtccctaaacacaaaaaatacacaattcatggtaataacaaaagcccaatagcgcgattccagttacaaccattaactctaccatagccacctttactttacaagccatgaagagaaaaaggcaacgtcgcaattgatgacgttggtagtctgactttcggactaccgctttcgaaactacgattttaaagtacaaattctggtaaaatttatagtattttttgagtcgaacaagaaaatattattaattagaagtttgtacaaaataatattaaaagtaattccttgtaagtaacgtttattatacaaaaaaaaacaataacaagaatataaacgggattatttttttcgaatcctaagaaaactaataagtatttttcaaaaatttaaacgcagaatgaaagattacgttaggaccgagggccgaaagtccctgaaaacttctatgtttattttaataagttacaggggtgaaaaactaagaaaatttagtgtgatttttagtttcaaatatgtcattaaaaaaaactttttattcgttctaagggactttcggccctcggtaataaagtaatctttccttctgcgtttaaatttttcaaaaatacttattagttttctcaggattcgaaaaaaatgattacatttaaaatacaggcgtcaaaattttacattttgttcctttccacttaaagtttgtcgcacttatttagaaacaccctgaattgataaagaacaaatctagttgttaaacataagcgaattaatcaaaaaaacagaatgttaagaaaaccggagtctatagttgggttttaatttcagtattttataaatgcccggtacaccataaaaatttaactggttagcaacaatattattacaacggtattgtaaaagaattaggctataacatattaaaaaatcacttaaatctgccaacagatttaggaaatataagacattaaaaatgacaaaatttttaagtggacggatttctatatgcacgcaagtttatacatataaaaatatattatattgaactaaaatcattttaataacatacctttaaatgttctttataatttggagcacgaaatattgtaaaatatttcagtttctctgtaaatacagtgaaaattatttaaaaacaaatgagaactgtcagaattaatcggtctaccaatagatgttgccaaatttcaacttcatggcttgttaagtaaaggtggctatggtataaccgttcaaaagatacgaggggggtacggacttttgactagcactgtataaccagagaacaataaccacatgtggttattgttctctggtataacgcttagcgtgtaatcgggaaacagtaaaaatatgttttctgaaaaaataaaatacatctataaagtcgtctctctaattttttcagattaaaaatacatcaatcatggccattaaaatgtattacaatttgtacataataaaataatatataatatattttattttaatcataatcgcagcccatttgatcagtcattattatttcctttcgagaaatattgttagcttctagaacgtcgacaattgcatctatatcatctggtgatccatattgatgtcttgttgtaaggaaaagactctctagaaaaacaccatctcgttcaaaacaggagaaacctacagaccatcttttatagtctgtaccaagaatccaaaaaggtacagttacgtctggattaagaaaatgtactaaaaatttggcttctcctgtggttgaatttgatattccttccccttcgagaacatgtgtctcatttgtttcggaattgatgtattgcgtacgactctttacagatccatctgagtttactgcaatattggtaacaacacatcttccgtgatcttccagtaaagttgggtatcttgcttgttcgaaccagtcacccaaatatgcttttccatcgaaatttgcaactccttttacatctgggcatctttcaacaggaatttgtccctgtacagatattacaagcaaagaaatagttactgcaaaaccaatcattttcgtggttttataaacacagacgaatctaatttaatgttgtaagtaaaatttccttttatataaagtccatcg

SEQ ID NO: 872 - DNA, 1694 bp, Diabrotica virgifera
tggtgtcgtcacttcgttttgaatgacactctctatgctaatatataactttatgaatgaaaccctcgtgccgacactctgtcagcgtaggccatgaactagttaagaaaattatttattgatatatctaccagtgtctgtcaaattgtcaactgccaaactgaaaaagtatcaatggaaaataagaacaaaactttctgtatttgtagtgagaatagtatataaaaaactggtatgactttcacctgaaagtatacgtaatcgataactgagtcagttatcttatttattgaaatttttgtttacaaaagtcagacgaaactaggtaaatcatgtttttatttttggcagtatggttaaaaaaaaatgaagaataagctgtcatattgtgggagggaaatggctaaaccatgatactataaataaagagatagtattttcccgtagcgcaaatacgtctgagttcgcgcattgatgacgtaactggagaccggaagttgaatttgaattcttgttaaagttaaatgggatttgtatgcattatatgatgaaattattcaattagcaaaataacattaaacttcaatgtattggaaaaacatttagtgtcgagattccagtcaaaataactcaaaaataaaatataaaatacaaccgcgaacaattcaaagtaatcggacattacgaatgattacgaaccattacgaacttgtcggtctccagttacgtcacgacttccggatgtgcaatatattatcttgttatttatagtattatgggctaaaccatagccacctttacttacaagccatgaagagaaaaaggcaacgtcgcaattgatgacgttggtagtctgactttcggactaccgctttcgaaactacgattttaaagtacaaattctggtaaaatttatagtattttttgagtcgaacaagaaaatattattaattagaagtttgtacaaaataatattaaaagtaattccttgtaagtaacgtttattatacaaaaaaaaacaataacaagaatataaacgggattatttttttcgaatcctaagaaaactaataagtatttttcaaaaatttaaacgcagaatgaaagattacgttaggaccgagggccgaaagtccctgaaaacttctatgtttattttaataagttacaggggtgaaaaactaagaaaatttagtgtgatttttagtttcaaatatgtcattaaaaaaaactttttattcgttctaagggactttcggccctcggtaataaagtaatctttccttctgcgtttaaatttttcaaaaatacttattagttttctcaggattcgaaaaaaatgattacatttaaaatacaggcgtcaaaattttacattttgttcctttccacttaaagtttgtcgcacttatttagaaacaccctgaattgataaagaacaaatctagttattaaacataagcgaattaatccaaaaaacagaatgttaagaaaaccggagtctatagttgggttttaatttcagtattttataaatgcccggtacaccataaaaatttaactggttagcaacaatgttattacagcggtattgttaaagaattaggctataacatattaaaaaaatcacttgaatctgccaacaggtttaggaaatataagacattaaaaatgacaaaatttttaagtggacg

SEQ ID NO: 873 - DNA, 1033 bp, Diabrotica virgifera
  SmartBlast Evalue=2E-21; Info=Endonuclease-reverse transcriptase n=1 Tax=Schistosoma japonicum RepID=C7C208_SCHJA
cccgcctgtaatattcttaaactatttcttttctttgccaccccaaacacatatcccaattatttcactcttttaattaaccagattttaaaaacaacatattctatcttctggtattacttctccttctttcaatgtttctgacagtaaaaagaagaatctccaactatatcgctggtacctatgattaatgtgattcctaatacatttccagtgtaaataataactcttgataagtattggcgattacaatttttttttatatgcgtgtccgcgaagattataacttccaaaatatttataatgaaaagatttagttcataatagatgccgacgaaaacaattatttctgagaactttttagtaattataattttcgtggacccaaaaacaaaaatgatgttttttgcgatactcctcaaaaaataatttttttcgctaacactttattagggattataattttcagaatcatataatcaaaaataatattcttcgcgacgttcattgaaagttctactcttaccggcatgtttcggagttatacttttcgtaggcggcggcgatatagtctatatcactctcgtcttcagctagaatagcttggtcgtcagcgaagtgtattgtgtacaatctatcgtcatcgattgggatgcccatattgcagcactttcttctccacagtgagagtgcctcatttaaatatattttaaagagtgtaggtgctatgcagcagccttgctttaggcccttactaataggaatttctctcgttaatttgtttccagttttaatgtttaccgtcatatttttgtaaagctgttgtactgcttgtatattttttttgcttattccttgtttttccattgctatccagagcattgaaagtggtacactatcgtatgcctttgtcagatcaataaaaactatatgggtggaaaggttgtgggctaatcttttctcaataacttgctttatagcaaatatgctgtccatacaggatctgcctgcacgaaagcctttttgttcttct

SEQ ID NO: 874 - DNA, 998 bp, Diabrotica virgifera
  SmartBlast Evalue=9E-23; Info=Endonuclease-reverse transcriptase HmRTE-e01 n=1 Tax=Heliconius melpomene RepID= C6Y4D5_9NEOP
tatatatataataagcgagtcttctacagctgtcgccgcttctcgcatcctaatctccagcgatttctgtcgaagcaatcttcagtttttaagtctctggcggtcattgcatcttcgacatcttctctccagcatcgtcttggtctatctcgttttcttcttgtgggtggagtccatttttctatttttttcggccatctattttcaggcattctctgaaggtgtccataccagttaagtcttttggcttcgattgtgtctattatatctagatcgatttccatttgtctcctaatatcatcgtttctcaccctatcaagtctagtgagtcggcaacatcgtctccaatagttcatttccatcgccttgatttttgacttgtttctttggttgatttcccagagttcagcgccgtacaacccaatactttctattattgttttatacattcttcttttattttcttttgttattttattactccacaatagtccgtgtagctgtctggtggctgatcttgcttggccaatcctggaatgtatttcgtcgttactccctgcttttgaagatatttggactcctaagtatttataagtttcggttgggtttatagttcccatttcaatttgtaggctttctggtgtttctcctacaactaagtattcggttttttgtatattaattgtaaagccccacttcgtgtactcctcttccagttttctgagcatatcgctggtacctatgattaatgtgattcctaatacatttccagtgaaaataataactctttgataagtgttggcgatataattttttttatatgcgtgtccacgaaaattaaaactcccaaaatatttataacgaaaatatttagttcataatagatgccgacgaaaacaaattatttccctttctgttcctgtttctgccgacgaaaacaattatttctgcgaactttttagtaattataattttcgtgggcccgcaaacagaaatta

SEQ ID NO: 875 - DNA, 5136 bp, Diabrotica virgifera
  SmartBlast Evalue=7E-48; Info=Translocator protein n=1 Tax= Camponotus floridanus RepID=E2B081_9HYME
gtcatccactaataaagataagattgcattcaatcacctgagcactaaaggtaagatttattgaatgttttaagcgaatcttctggaactactaagtataaaaatgattcagttaaattggcctgctcttggtttcacaattttgcccaacttgggaggaattgctggtggctttataaccaggaagagtattaatccatggtacgaaaatctgaagaaaccaaaatgcagaccaccaaattgggcatttggccctgtttggacaactttgtacagtggaatggggtatgcttcatatcttgtgtacagagacgggggcggatttcagggacccgccaaattaccattaattgtctacggggttaatctcgcagctaattgggcatggactccaattttctttggaaagaaggatctacagctggctcttattgagattcagctaataaacggcactgccttgggtatggtataccttttccacaagatcaaccctacagctggctaccttatcgtaccatattgcatctggttaggtttggccacagcgctaaactactgcatttggagagacaacaaaaccactccagctataactgaagctaaagccgaagctaaagaacaataaagaataaatgacagtagtacaatgatgcatgtttaaggggaggtatggtttgaaatcaacatttcaagcacagttttgtgatttttttttaaactatggtacaactattttatttttaaattaaataatcatattaagtacaattaaaaaaaaatgtcaaggaaaaatactgaaaaataagccaacggtggcaaatttttacagacacctaaaaaattggatttttcggtggacatcacaactcgtcacaggatcatgtgaaataaaaaattcaaaaagattttattagtttatgagtttcttgaggtaagtaacgcttttaagttttttttatttttgacgatttttgagtttttggtattactcggaagtcaaaaaagcaaaattatttgtaacaaaagggtgaaaatcaacatatttattattgttaaacaaaaaattggcataaaaccaaatatgctcgacagcgttacctcacgaaatgtccaaagaaaatatttgcaaaatttcaggtggatcggaagagtacagtacaacctgccatatccggacggttctgcaccgtccggatctaccgaaatctaccgagaaaagcagtcctgctgttggacaacgcactaaaagaagaactaaaagatggcgaaataatgtattaatagaatctataaaacgtgtctatcgacgaaagttattgacggcgttgattactggaatgtatgaaggagaaaacgtttcagagactgtaaaagaagtagtggttttgatatccggattttttcatatccggatcggtgtgtcgccacattgattgtggttgtttgactgtagtttgtgagttacaatgtccaccacctttgaaagtgaagttttaaaaaaactcgtttaaagttttgacaacttttattttcaatttctttttgtctgtcaaatagtaaagtgacgcgcaccggaatatgttttttgaatcgcgaagtaatctacaaaagagaaggggaacagttgttgaacgtttctcgctacactcaagcgtgctggcgcaaaaccgcggcaaagcgagtcgaaggtacggatattcaacatgctgtatctctggtaattttactccgagcaatctgaaattttcagagaatattcttgtagttatgcacttatatttacaataataaagaaaatcgaaaatttcaaaccatgccctccccccctaatgcgctttttatagcaatatgtcgagaactgacaaggttttttgtttatgttttaagtaaattgcttaattgttagtttttatgtttatacacaaaacaaaattaccgttttcaaaaagattggcagttatgtgtaagaagtttattcaggcagtcatagattgttcatgattttttaaatatctatcaaatataggaaatatgtctactaataatactggctatacctttggtttttttattgctgattattcgctttctttaatgttatttatttctataaaaaggttttgataaagtttttcttgaaatacaatttttagagtatggtaatcattttgggaaatttatagatttttctgtatacaaatttaggaaaagcggtgttaaaatatattcctgttatatagttacgaacgtatagtatatgtagtttcaaaattgtaggtactaaattgtcagaaatttgtatggtttaccgtgatgatattcttgccagattgttattttttttaataatctgtattttaaatagtcagataaaaacgacttaatgatatctctcaattaatattcaatagcgtaccgatcattcttttagttaaaagttaataatcaaatgaaaacaatcttgataaagtggtttgacgtcttcaggacgtcaaaataatcattattgcttaaataatactcgtgggatgatgaataactatggaaatcactagtatctacgttgatgataataacgaattgaccgtacaaccatacattcctacacatgcaatttgcttcattagtaattcatgtcattttttagaagtcgaaaaggcaaccaaattgaacaacgatatttattgcgactgctctggccaattatattcccaaactataattattgtcaaccgtttcgatattcgctgtgtgcaagtacttaaaggggatacgagaaacgatcgtgcgcaagtagcggagaaatcttgcaactttcttagcatatttcataaattaattgtcaaatttacgtatatttcatacctactatcattgaagaaaattttaaaaattatatgttcctccacaatatttataggctattgattatgtattttagaaaggaactacaacgttaaccatttaaaggggtgcgtttttgagaggggggtgcattggtccctgggcacagggcgaattggggtgagttctatgcacttttggtgcaagcacgtctgcagaaagattgttccaggttaaatttactatcgaaatgtcatatttttaagtcaaaaatattttttctttacaaaatatattcggagaggggcaagaacaaagcacgaaagatagcaattttgtttttagccctatacctatatccctgtggacaaaagttgtggggcaaaaaggcaaaatttctttctttcgggattttttcttgcttttcttttgaatatatttttgtaaaaaaaaaatttgactttaaaatgtattatttggatagtaaatttaacctggaacggttttcctgtggacgtgtttgtaccaaaattgcatggaactcaccctaattcgacctgtgtctggggactgattcacttctttctcaggaaacgcacccatttaaatggtagcactccgcgattttttcaaatttagaggtccattgaccatatgagacaataaaatcccgttaacgttgtagttccttttagctctcttattttgaacataatcaatagcaatgtgatatgcaattattaagaaaatttagttgattgtattgtacttgtagtattgcattttaataattaattttatttactacatacacattctatgtttactttttaataacataacctcaatcttactttttctttttattcttttttgtgggctatggccttgataattatccagcaaccaggaataacataactggccaatgtaattaaaagtgctacaaatgttgctgagctatgaaaccaggtgtcgctcttccgaacttgcacggtcccaataggagtaaaataattgcatgtccactgcactgatttttgttaacctttgggcgggcgcatcaaatctgtgagattaaatcgctggtacctatgattaatgtgattcctaatacatttccagtgaaaatagtaactgtttgataagtgttggcgatacaattcttttttatatgcgtgtccgcgaagattataactcccaagatatttataacgaaacgatgtagttcataatagatgccgacgaaaacaattatttccctttctgtttctaccgacgaaacaattatttctgagaactttttagtaattataattttcgtggacccaaaaacaaaaatgatgttttttgcgatactcctcaaaaaataatttttttcgctaacactttattagggattataattttcagaatcatataatcaaaaataatattcttcgcgacgttcattgaaagttctactcttaccggcatttttcggagttatacttttcgtaggcggcggcgaaatacttagatatttggtgtgcctacgggtggcgtttttctttgatgattaaataacttgtttttgttaattatttatgtgattgtttaaaaatgttagctgaaaataaaaaataaccatttttaattgaatagtagagtttgttaatttttgtttttaagtttaggcagaaatttatttttaatctcatagatgaaatgcgcccgaacgtgttcagattttattgcgcccgaccgaaagtagttaatatttaaggtttgttccaactcgatacaaaaccgttcttgaatcgttatgcgcatgcgcaataacgaataattatgcgtagtaacacatttatcgttactgcgcatactcgtaaccgttcaaaaacggttttgtatggagttggaacaaacctttagttgttcttccattggaaaatgtcgctgtcatttctgagaacgtactgactacaattctgaaactatactctaatacgtcttttacgttatttggtggagaaatgaatttattgacagtcgaaagatgcaattataaccccgaaatacatacaaaattttaagttttatatgtatacacgtctatacattacaaatactgttggatagtacctgtatttaatgaaaatttatttaactttaatcgcatactatgtatcatttgtcacatctacagtgttcaattgcacaaaaagacttattttgataatgttattactagttcaaattttatggttttttatttgctatataaattttattaaacatttaacattt

SEQ ID NO: 876 - DNA, 4869 bp, Diabrotica virgifera
  SmartBlast Evalue=6E-48; Info=Translocator protein n=1 Tax= Camponotus floridanus RepID=E2B081_9HYME
gtcatccactaataaagataagattgcattcaatcacctgagcactaaaggtaagatttattgaatgttttaagcgaatcttctggaactactaagtataaaaatgattcagttaaattggcctgctcttggtttcacaattttgcccaacttgggaggaattgctggtggctttataaccaggaagagtattaatccatggtacgaaaatctgaagaaaccaaaatgcagaccaccaaattgggcatttggccctgtttggacaactttgtacagtggaatggggtatgcttcatatcttgtgtacagagacgggggcggatttcagggacccgccaaattaccattaattgtctacggggttaatctcgcagctaattgggcatggactccaattttctttggaaagaaggatctacagctggctcttattgagattcagctaataaacggcactgccttgggtatggtataccttttccacaagatcaaccctacagctggctaccttatcgtaccatattgcatctggttaggtttggccacagcgctaaactactgcatttggagagacaacaaaaccactccagctataactgaagctaaagccgaagctaaagaacaataaagaataaatgacagtagtacaatgatgcatgtttaaggggaggtatggtttgaaatcaacatttcaagcacagttttgtgatttttttttaaactatggtacaactattttatttttaaattaaataatcatattaagtacaattaaaaaaaaatgtcaaggaaaaatactgaaaaataagccaacggtggcaaatttttacagacacctaaaaaattggatttttcggtggacatcacaactcgtcacaggatcatgtgaaataaaaaattcaaaaagattttattagtttatgagtttcttgaggtaagtaacgcttttaagttttttttatttttgacgatttttgagtttttggtattactcggaagtcaaaaaagcaaaattatttgtaacaaaagggtgaaaatcaacatatttattattgttaaacaaaaaattggcataaaaccaaatatgctcgacagcgttacctcacgaaatgtccaaagaaaatatttgcaaaatttcaggtggatcggaagagtacagtacaacctgccatatccggacggttctgcaccgtccggatctaccgaaatctaccgagaaaagcagtcctgctgttggacaacgcactaaaagaagaactaaaagatggcgaaataatgtattaatagaatctataaaacgtgtctatcgacgaaagttattgacggcgttgattactggaatgtatgaaggagaaaacgtttcagagactgtaaaagaagtagtggttttgatatccggattttttcatatccggatcggtgtgtcgccacattgattgtggttgtttgactgtagtttgtgagttacaatgtccaccacctttgaaagtgaagttttaaaaaaactcgtttaaagttttgacaacttttattttcaatttctttttgtctgtcaaatagtaaagtgacgcgcaccggaatatgttttttgaatcgcgaagtaatctacaaaagagaaggggaacagttgttgaacgtttctcgctacactcaagcgtgctggcgcaaaaccgcggcaaagcgagtcgaaggtacggatattcaacatgctgtatctctggtaattttactccgagcaatctgaaattttcagagaatattcttgtagttatgcacttatatttacaataataaagaaaatcgaaaatttcaaaccatgccctccccccctaatgcgctttttatagcaatatgtcgagaactgacaaggttttttgtttatgttttaagtaaattgcttaattgttagtttttatgtttatacacaaaacaaaattaccgttttcaaaaagattggcagttatgtgtaagaagtttattcaggcagtcatagattgttcatgattttttaaatatctatcaaatataggaaatatgtctactaataatactggctatacctttggtttttttattgctgattattcgctttctttaatgttatttatttctataaaaaggttttgataaagtttttcttgaaatacaatttttagagtatggtaatcattttgggaaatttatagatttttctgtatacaaatttaggaaaagcggtgttaaaatatattcctgttatatagttacgaacgtatagtatatgtagtttcaaaattgtaggtactaaattgtcagaaatttgtatggtttaccgtgatgatattcttgccagattgttattttttttaataatctgtattttaaatagtcagataaaaacgacttaatgatatctctcaattaatattcaatagcgtaccgatcattcttttagttaaaagttaataatcaaatgaaaacaatcttgataaagtggtttgacgtcttcaggacgtcaaaataatcattattgcttaaataatactcgtgggatgatgaataactatggaaatcactagtatctacgttgatgataataacgaattgaccgtacaaccatacattcctacacatgcaatttgcttcattagtaattcatgtcattttttagaagtcgaaaaggcaaccaaattgaacaacgatatttattgcgactgctctggccaattatattcccaaactataattattgtcaaccgtttcgatattcgctgtgtgcaagtacttaaaggggatacgagaaacgatcgtgcgcaagtagcggagaaatcttgcaactttcttagcatatttcataaattaattgtcaaatttacgtatatttcatacctactatcattgaagaaaattttaaaaattatatgttcctccacaatatttataggctattgattatgtattttagaaaggaactacaacgttaaccatttaaaggggtgcgtttttgagaggggggtgcattggtccctgggcacagggcgaattggggtgagttctatgcacttttggtgcaagcacgtctgcagaaagattgttccaggttaaatttactatcgaaatgtcatatttttaagtcaaaaatattttttctttacaaaatatattcggagaggggcaagaacaaagcacgaaagatagcaattttgtttttagccctatacctatatccctgtggacaaaagttgtggggcaaaaaggcaaaatttctttctttcgggattttttcttgcttttcttttgaatatatttttgtaaaaaaaaaatttgactttaaaatgtattatttggatagtaaatttaacctggaacggttttcctgtggacgtgtttgtaccaaaattgcatggaactcaccctaattcgacctgtgtctggggactgattcacttctttctcaggaaacgcacccatttaaatggtagcactccgcgattttttcaaatttagaggtccattgaccatatgagacaataaaatcccgttaacgttgtagttccttttagctctcttattttgaacataatcaatagcaatgtgatatgcaattattaagaaaatttagttgattgtattgtacttgtagtattgcattttaataattaattttatttactacatacacattctatgtttactttttaataacataacctcaatcttactttttctttttattcttttttgtgggctatggccttgataattatccagcaaccaggaataacataactggccaatgtaattaaaagtgctacaaatgttgctgagctatgaaaccaggtgtcgctcttccgaacttgcacggtcccaataggagtaaaataattgcatgtccactgcactgatttttgttaacctttgggcgggcgcatcaaatctgtgagattaaatcgctggtacctatgattaatgtgattcctaatacatttccagtgaaaatagtaactgtttgataagtgttggcgatacaattcttttttatatgcgtgtccgcgaagattataactcccaagatatttataacgaaacgatgtagttcataatagatgccgacgaaaacaattatttccctttctgtttctaccgacgaaacaattatttctgagaactttttagtaattataattttcgtggacccaccaacaaaaatgatgttttttgcgatactcctcaaaaaataatttttttcgctaacactttattagggattataattttcagaatcatataatcaaaaataatatttttcgcggcgttcattgaaagttctactcttaacggcatttttcggagttatacttttcgtaggcggcggcgatatgtgcaacaatttttctacattgtttcttatacatattttttgaattatataatttgttttaatttatacctgtatattaaaggttgcacccacctcgaagaataatttagctggctagaatcagcgaaaatgtttattgtaagttacacattcactcccaaagtcaattgtagcttacaaattattgtttcgttgattgaaagttacatgttgttatttttatttacgaataactttttaaataaatgtcaactaacattcctttaatattgactttgtgctctaattcaaattactataaaaaaccaccgtaagtccatcacatcttcagatttggctgactacaatcctggcaactgtcagatagatctagaattgcttgcaataattctcggcatacccaagacaagggtatgtcgagacagaaaatagacttaaccaaatgaaatagaattgtttaaagtgaatataaactagctgcactattctagttcttagtcactattaat

SEQ ID NO: 877 - DNA, 4824 bp, Diabrotica virgifera
  SmartBlast Evalue=6E-48; Info=Translocator protein n=1 Tax= Camponotus floridanus RepID=E2B081_9HYME
gtcatccactaataaagataagattgcattcaatcacctgagcactaaaggtaagatttattgaatgttttaagcgaatcttctggaactactaagtataaaaatgattcagttaaattggcctgctcttggtttcacaattttgcccaacttgggaggaattgctggtggctttataaccaggaagagtattaatccatggtacgaaaatctgaagaaaccaaaatgcagaccaccaaattgggcatttggccctgtttggacaactttgtacagtggaatggggtatgcttcatatcttgtgtacagagacgggggcggatttcagggacccgccaaattaccattaattgtctacggggttaatctcgcagctaattgggcatggactccaattttctttggaaagaaggatctacagctggctcttattgagattcagctaataaacggcactgccttgggtatggtataccttttccacaagatcaaccctacagctggctaccttatcgtaccatattgcatctggttaggtttggccacagcgctaaactactgcatttggagagacaacaaaaccactccagctataactgaagctaaagccgaagctaaagaacaataaagaataaatgacagtagtacaatgatgcatgtttaaggggaggtatggtttgaaatcaacatttcaagcacagttttgtgatttttttttaaactatggtacaactattttatttttaaattaaataatcatattaagtacaattaaaaaaaaatgtcaaggaaaaatactgaaaaataagccaacggtggcaaatttttacagacacctaaaaaattggatttttcggtggacatcacaactcgtcacaggatcatgtgaaataaaaaattcaaaaagattttattagtttatgagtttcttgaggtaagtaacgcttttaagttttttttatttttgacgatttttgagtttttggtattactcggaagtcaaaaaagcaaaattatttgtaacaaaagggtgaaaatcaacatatttattattgttaaacaaaaaattggcataaaaccaaatatgctcgacagcgttacctcacgaaatgtccaaagaaaatatttgcaaaatttcaggtggatcggaagagtacagtacaacctgccatatccggacggttctgcaccgtccggatctaccgaaatctaccgagaaaagcagtcctgctgttggacaacgcactaaaagaagaactaaaagatggcgaaataatgtattaatagaatctataaaacgtgtctatcgacgaaagttattgacggcgttgattactggaatgtatgaaggagaaaacgtttcagagactgtaaaagaagtagtggttttgatatccggattttttcatatccggatcggtgtgtcgccacattgattgtggttgtttgactgtagtttgtgagttacaatgtccaccacctttgaaagtgaagttttaaaaaaactcgtttaaagttttgacaacttttattttcaatttctttttgtctgtcaaatagtaaagtgacgcgcaccggaatatgttttttgaatcgcgaagtaatctacaaaagagaaggggaacagttgttgaacgtttctcgctacactcaagcgtgctggcgcaaaaccgcggcaaagcgagtcgaaggtacggatattcaacatgctgtatctctggtaattttactccgagcaatctgaaattttcagagaatattcttgtagttatgcacttatatttacaataataaagaaaatcgaaaatttcaaaccatgccctccccccctaatgcgctttttatagcaatatgtcgagaactgacaaggttttttgtttatgttttaagtaaattgcttaattgttagtttttatgtttatacacaaaacaaaattaccgttttcaaaaagattggcagttatgtgtaagaagtttattcaggcagtcatagattgttcatgattttttaaatatctatcaaatataggaaatatgtctactaataatactggctatacctttggtttttttattgctgattattcgctttctttaatgttatttatttctataaaaaggttttgataaagtttttcttgaaatacaatttttagagtatggtaatcattttgggaaatttatagatttttctgtatacaaatttaggaaaagcggtgttaaaatatattcctgttatatagttacgaacgtatagtatatgtagtttcaaaattgtaggtactaaattgtcagaaatttgtatggtttaccgtgatgatattcttgccagattgttattttttttaataatctgtattttaaatagtcagataaaaacgacttaatgatatctctcaattaatattcaatagcgtaccgatcattcttttagttaaaagttaataatcaaatgaaaacaatcttgataaagtggtttgacgtcttcaggacgtcaaaataatcattattgcttaaataatactcgtgggatgatgaataactatggaaatcactagtatctacgttgatgataataacgaattgaccgtacaaccatacattcctacacatgcaatttgcttcattagtaattcatgtcattttttagaagtcgaaaaggcaaccaaattgaacaacgatatttattgcgactgctctggccaattatattcccaaactataattattgtcaaccgtttcgatattcgctgtgtgcaagtacttaaaggggatacgagaaacgatcgtgcgcaagtagcggagaaatcttgcaactttcttagcatatttcataaattaattgtcaaatttacgtatatttcatacctactatcattgaagaaaattttaaaaattatatgttcctccacaatatttataggctattgattatgtattttagaaaggaactacaacgttaaccatttaaaggggtgcgtttttgagaggggggtgcattggtccctgggcacagggcgaattggggtgagttctatgcacttttggtgcaagcacgtctgcagaaagattgttccaggttaaatttactatcgaaatgtcatatttttaagtcaaaaatattttttctttacaaaatatattcggagaggggcaagaacaaagcacgaaagatagcaattttgtttttagccctatacctatatccctgtggacaaaagttgtggggcaaaaaggcaaaatttctttctttcgggattttttcttgcttttcttttgaatatatttttgtaaaaaaaaaatttgactttaaaatgtattatttggatagtaaatttaacctggaacggttttcctgtggacgtgtttgtaccaaaattgcatggaactcaccctaattcgacctgtgtctggggactgattcacttctttctcaggaaacgcacccatttaaatggtagcactccgcgattttttcaaatttagaggtccattgaccatatgagacaataaaatcccgttaacgttgtagttccttttagctctcttattttgaacataatcaatagcaatgtgatatgcaattattaagaaaatttagttgattgtattgtacttgtagtattgcattttaataattaattttatttactacatacacattctatgtttactttttaataacataacctcaatcttactttttctttttattcttttttgtgggctatggccttgataattatccagcaaccaggaataacataactggccaatgtaattaaaagtgctacaaatgttgctgagctatgaaaccaggtgtcgctcttccgaacttgcacggtcccaataggagtaaaataattgcatgtccactgcactgatttttgttaacctttgggcgggcgcatcaaatctgtgagattaaatcgctggtacctatgattaatgtgattcctaatacatttccagtgaaaatagtaactgtttgataagtgttggcgatacaattcttttttatatgcgtgtccgcgaagattataactcccaagatatttataacgaaacgatgtagttcataatagatgccgacgaaaacaattatttccctttctgtttctaccgacgaaacaattatttctgagaactttttagtaattataattttcgtggacccaaaaacaaaaatgatgttttttgcgatactcctcaaaaaataatttttttcgctaacactttattagggattataattttcagaatcatataatcaaaaataatattcttcgcgacgttcattgaaagttctactcttaccggcatgtttcggagttatacttttcgtaggcggcggcgatatagtctatatcactctcgtcttcagctagaatagcttggtcgtcagcgaagtgtattgtgtacaatctatcgtcatcgattgggatgcccatattgcagcactttcttctccacagtgagagtgcctcatttaaatatattttaaagagtgtaggtgctatgcagcagccttgctttaggcccttactaataggaatttctctcgttaatttgtttccagttttaatgtttaccgtcatatttttgtaaagctgttgtactgcttgtatattttttttgcttattccttgtttttccattgctatccagagcattgaaagtggtacactatcgtatgcctttgtcagatcaataaaaactatatgggtggaaaggttgtgggctaatcttttctcaataacttgctttatagcaaatatgctgtccatacaggatctgcctgcacgaaagcctttttgttcttct

SEQ ID NO: 878 - DNA, 2541 bp, Diabrotica virgifera
cgtatggagctcaaagtacatcccaatggggggggggggttataacccccaaaacccccctggttccgcctatgtagctaaatacaaaatttctatagctacagggttgccacgttgtatcatgaaacgagaaatataaacggtagatgtctctcttatcaatcaaaattcgataactttagcgaaatataaattttatatagctacagggttgtcacgttatgaaacgagaaatacaaacttatttgccagatagattccattacatttttaattatttgtgcttaaacaaaacatttttcgttcctaaaatatgtatcgtttagaggtataaataacaaaatgattgaaacgattgtttgatttgcttaagaactaaaaataaatcagcaggatattgttattgatctggatatagtctatccgttggaactttggaaattattggccaagtatgttttatactgtctctttattggccacaaaacttaaaaccatggaattaacagcttattttagcacaatatatacaaagaatttgtttttttttttctcaaagagttgttttaacaattaactattgccttagtgtttaaattattcaagtaaatgtatatttataagctaacaatatgtaatattgtataacgtataaattgatatttcctaattattatatgaatatgtttgtgtgaagagccaacggaataactgttgatttaagattctgaaactatttatttaccaggttgtctagaaacttaccatagaatagaaaactacaaattgatggattcattttaggtcttttacatataaatcagcttgtccaaaaattcctcccaaggaagctacagccctttaaaggtggcgccaaataatgcaatgtaaattagctctccaaaaattcgtcccaacgaagctgctgctctttaaagatggcatcaaaacacaaccaatgcaaatgacagctgagaattgtttttattcttttatttcataaaatgccaaagcaactctgaacgaattgaatgaacaataatgaacttataataataaacagggattttgtacataaatattaatgtcaaaattggagcaaataacttaaaagaaaataacgaacaatgatgtatttatttcttgcgtgcctcttcgtttttcccgcctgtaatattcttaaactatttcttttctttgccaccctaaacacatatcccaattatttcactcttttaattaaccagattttaaaaacaacatattctatcttctggtattacttctccttctttcaatgtttctgacagtccaaagaagaatctccaactatatcgctggtacctatgattaatgtgattcctaatacatttccagtgaaaatagtaactgtttgataagtgttggcgatacaattcttttttatatgcgtgtccgcgaagattataactcccaagatatttataacgaaacgatgtagttcataatagatgccgacgaaaacaattatttccctttctgtttctaccgacgaaacaattatttctgagaactttttagtaattataattttcgtggacccaaaaacaaaaatgatgttttttgcgatactcctcaaaaaataatttttttcgctaacactttattagggattataattttcagaatcatataatcaaaaataatattcttcgcgacgttcattgaaagttctactcttaccggcatttttcggagttatacttttcgtaggcggcggcgaaatacttagatatttggtgtgcctacgggtggcgtttttctttgatgattaaataacttgtttttgttaattatttatgtgattgtttaaaaatgttagctgaaaataaaaaataaccatttttaattgaatagtagagtttgttaatttttgtttttaagtttaggcagaaatttatttttaatctcatagatgaaatgcgcccgaacgtgttcagattttattgcgcccgaccgaaagtagttaatatttaaggtttgttccaactcgatacaaaaccgttcttgaatcgttatgcgcatgcgcaataacgaataattatgcgtagtaacacatttatcgttactgcgcatactcgtaaccgttcaaaaacggttttgtatggagttggaacaaacctttagttgttcttccattggaaaatgtcgctgtcatttctgagaacgtactgactacaattctgaaactatactctaatacgtcttttacgttatttggtggagaaatgaatttattgacagtcgaaagatgcaattataaccccgaaatacatacaaaattttaagttttatatgtatacacgtctatacattacaaatactgttggatagtacctgtatttaatgaaaatttatttaactttaatcgcatactatgtatcatttgtcacatctacagtgttcaattgcacaaaaagacttattttgataatgttattactagttcaaattttatggttttttatttgctatataaattttattaaacatttaacattt

SEQ ID NO: 879 - DNA, 2274 bp, Diabrotica virgifera
cgtatggagctcaaagtacatcccaatggggggggggggttataacccccaaaacccccctggttccgcctatgtagctaaatacaaaatttctatagctacagggttgccacgttgtatcatgaaacgagaaatataaacggtagatgtctctcttatcaatcaaaattcgataactttagcgaaatataaattttatatagctacagggttgtcacgttatgaaacgagaaatacaaacttatttgccagatagattccattacatttttaattatttgtgcttaaacaaaacatttttcgttcctaaaatatgtatcgtttagaggtataaataacaaaatgattgaaacgattgtttgatttgcttaagaactaaaaataaatcagcaggatattgttattgatctggatatagtctatccgttggaactttggaaattattggccaagtatgttttatactgtctctttattggccacaaaacttaaaaccatggaattaacagcttattttagcacaatatatacaaagaatttgtttttttttttctcaaagagttgttttaacaattaactattgccttagtgtttaaattattcaagtaaatgtatatttataagctaacaatatgtaatattgtataacgtataaattgatatttcctaattattatatgaatatgtttgtgtgaagagccaacggaataactgttgatttaagattctgaaactatttatttaccaggttgtctagaaacttaccatagaatagaaaactacaaattgatggattcattttaggtcttttacatataaatcagcttgtccaaaaattcctcccaaggaagctacagccctttaaaggtggcgccaaataatgcaatgtaaattagctctccaaaaattcgtcccaacgaagctgctgctctttaaagatggcatcaaaacacaaccaatgcaaatgacagctgagaattgtttttattcttttatttcataaaatgccaaagcaactctgaacgaattgaatgaacaataatgaacttataataataaacagggattttgtacataaatattaatgtcaaaattggagcaaataacttaaaagaaaataacgaacaatgatgtatttatttcttgcgtgcctcttcgtttttcccgcctgtaatattcttaaactatttcttttctttgccaccctaaacacatatcccaattatttcactcttttaattaaccagattttaaaaacaacatattctatcttctggtattacttctccttctttcaatgtttctgacagtccaaagaagaatctccaactatatcgctggtacctatgattaatgtgattcctaatacatttccagtgaaaatagtaactgtttgataagtgttggcgatacaattcttttttatatgcgtgtccgcgaagattataactcccaagatatttataacgaaacgatgtagttcataatagatgccgacgaaaacaattatttccctttctgtttctaccgacgaaacaattatttctgagaactttttagtaattataattttcgtggacccaccaacaaaaatgatgttttttgcgatactcctcaaaaaataatttttttcgctaacactttattagggattataattttcagaatcatataatcaaaaataatatttttcgcggcgttcattgaaagttctactcttaacggcatttttcggagttatacttttcgtaggcggcggcgatatgtgcaacaatttttctacattgtttcttatacatattttttgaattatataatttgttttaatttatacctgtatattaaaggttgcacccacctcgaagaataatttagctggctagaatcagcgaaaatgtttattgtaagttacacattcactcccaaagtcaattgtagcttacaaattattgtttcgttgattgaaagttacatgttgttatttttatttacgaataactttttaaataaatgtcaactaacattcctttaatattgactttgtgctctaattcaaattactataaaaaaccaccgtaagtccatcacatcttcagatttggctgactacaatcctggcaactgtcagatagatctagaattgcttgcaataattctcggcatacccaagacaagggtatgtcgagacagaaaatagacttaaccaaatgaaatagaattgtttaaagtgaatataaactagctgcactattctagttcttagtcactattaat

SEQ ID NO: 880 - DNA, 2229 bp, Diabrotica virgifera
  SmartBlast Evalue=6E-21; Info=Endonuclease-reverse transcriptase n=1 Tax=Schistosoma japonicum RepID=C7C208_SCHJA
cgtatggagctcaaagtacatcccaatggggggggggggttataacccccaaaacccccctggttccgcctatgtagctaaatacaaaatttctatagctacagggttgccacgttgtatcatgaaacgagaaatataaacggtagatgtctctcttatcaatcaaaattcgataactttagcgaaatataaattttatatagctacagggttgtcacgttatgaaacgagaaatacaaacttatttgccagatagattccattacatttttaattatttgtgcttaaacaaaacatttttcgttcctaaaatatgtatcgtttagaggtataaataacaaaatgattgaaacgattgtttgatttgcttaagaactaaaaataaatcagcaggatattgttattgatctggatatagtctatccgttggaactttggaaattattggccaagtatgttttatactgtctctttattggccacaaaacttaaaaccatggaattaacagcttattttagcacaatatatacaaagaatttgtttttttttttctcaaagagttgttttaacaattaactattgccttagtgtttaaattattcaagtaaatgtatatttataagctaacaatatgtaatattgtataacgtataaattgatatttcctaattattatatgaatatgtttgtgtgaagagccaacggaataactgttgatttaagattctgaaactatttatttaccaggttgtctagaaacttaccatagaatagaaaactacaaattgatggattcattttaggtcttttacatataaatcagcttgtccaaaaattcctcccaaggaagctacagccctttaaaggtggcgccaaataatgcaatgtaaattagctctccaaaaattcgtcccaacgaagctgctgctctttaaagatggcatcaaaacacaaccaatgcaaatgacagctgagaattgtttttattcttttatttcataaaatgccaaagcaactctgaacgaattgaatgaacaataatgaacttataataataaacagggattttgtacataaatattaatgtcaaaattggagcaaataacttaaaagaaaataacgaacaatgatgtatttatttcttgcgtgcctcttcgtttttcccgcctgtaatattcttaaactatttcttttctttgccaccctaaacacatatcccaattatttcactcttttaattaaccagattttaaaaacaacatattctatcttctggtattacttctccttctttcaatgtttctgacagtccaaagaagaatctccaactatatcgctggtacctatgattaatgtgattcctaatacatttccagtgaaaatagtaactgtttgataagtgttggcgatacaattcttttttatatgcgtgtccgcgaagattataactcccaagatatttataacgaaacgatgtagttcataatagatgccgacgaaaacaattatttccctttctgtttctaccgacgaaacaattatttctgagaactttttagtaattataattttcgtggacccaaaaacaaaaatgatgttttttgcgatactcctcaaaaaataatttttttcgctaacactttattagggattataattttcagaatcatataatcaaaaataatattcttcgcgacgttcattgaaagttctactcttaccggcatgtttcggagttatacttttcgtaggcggcggcgatatagtctatatcactctcgtcttcagctagaatagcttggtcgtcagcgaagtgtattgtgtacaatctatcgtcatcgattgggatgcccatattgcagcactttcttctccacagtgagagtgcctcatttaaatatattttaaagagtgtaggtgctatgcagcagccttgctttaggcccttactaataggaatttctctcgttaatttgtttccagttttaatgtttaccgtcatatttttgtaaagctgttgtactgcttgtatattttttttgcttattccttgtttttccattgctatccagagcattgaaagtggtacactatcgtatgcctttgtcagatcaataaaaactatatgggtggaaaggttgtgggctaatcttttctcaataacttgctttatagcaaatatgctgtccatacaggatctgcctgcacgaaagcctttttgttcttct

SEQ ID NO: 881 - DNA, 1345 bp, Diabrotica virgifera
cccgcctgtaatattcttaaactatttcttttctttgccaccccaaacacatatcccaattatttcactcttttaattaaccagattttaaaaacaacatattctatcttctggtattacttctccttctttcaatgtttctgacagtaaaaagaagaatctccaactatatcgctggtacctatgattaatgtgattcctaatacatttccagtgtaaataataactcttgataagtattggcgattacaatttttttttatatgcgtgtccgcgaagattataacttccaaaatatttataatgaaaagatttagttcataatagatgccgacgaaaacaattatttctgagaactttttagtaattataattttcgtggacccaaaaacaaaaatgatgttttttgcgatactcctcaaaaaataatttttttcgctaacactttattagggattataattttcagaatcatataatcaaaaataatattcttcgcgacgttcattgaaagttctactcttaccggcatttttcggagttatacttttcgtaggcggcggcgaaatacttagatatttggtgtgcctacgggtggcgtttttctttgatgattaaataacttgtttttgttaattatttatgtgattgtttaaaaatgttagctgaaaataaaaaataaccatttttaattgaatagtagagtttgttaatttttgtttttaagtttaggcagaaatttatttttaatctcatagatgaaatgcgcccgaacgtgttcagattttattgcgcccgaccgaaagtagttaatatttaaggtttgttccaactcgatacaaaaccgttcttgaatcgttatgcgcatgcgcaataacgaataattatgcgtagtaacacatttatcgttactgcgcatactcgtaaccgttcaaaaacggttttgtatggagttggaacaaacctttagttgttcttccattggaaaatgtcgctgtcatttctgagaacgtactgactacaattctgaaactatactctaatacgtcttttacgttatttggtggagaaatgaatttattgacagtcgaaagatgcaattataaccccgaaatacatacaaaattttaagttttatatgtatacacgtctatacattacaaatactgttggatagtacctgtatttaatgaaaatttatttaactttaatcgcatactatgtatcatttgtcacatctacagtgttcaattgcacaaaaagacttattttgataatgttattactagttcaaattttatggttttttatttgctatataaattttattaaacatttaacattt

SEQ ID NO: 882 - DNA, 1194 bp, Diabrotica virgifera
  SmartBlast Evalue=2E-46; Info=Endonuclease-reverse transcriptase HmRTE-e01 n=1 Tax=Heliconius melpomene RepID= C6Y4D5_9NEOP
tatatatataataagcgagtcttctacagctgtcgccgcttctcgcatcctaatctccagcgatttctgtcgaagcaatcttcagtttttaagtctctggcggtcattgcatcttcgacatcttctctccagcatcgtcttggtctatctcgttttcttcttgtgggtggagtccatttttctatttttttcggccatctattttcaggcattctctgaaggtgtccataccagttaagtcttttggcttcgattgtgtctattatatctagatcgatttccatttgtctcctaatatcatcgtttctcaccctatcaagtctagtgagtcggcaacatcgtctccaatagttcatttccatcgccttgatttttgacttgtttctttggttgatttcccagagttcagcgccgtacaacccaatactttctattattgttttatacattcttcttttattttcttttgttattttattactccacaatagtccgtgtagctgtctggtggctgatcttgcttggccaatcctggaatgtatttcgtcgttactccctgcttttgaagatatttggactcctaagtatttgaagacttctgttggatttatagttcccatttcaatttgtaggcgttctggtgtttctcctacaactaagtactcggttttttgtatattaattgtaaggccccacttagtgtactcctcttccagttttctgagcatatagtctatatcactctcgtcttcagctagaatagcttggtcgtcagcgaagtgtattgtgtacaatctatcgtcatcgattgggatgcccatattgcagcactttcttctccacagtgagagtgcctcatttaaatatattttaaagagtgtaggtgctatgcagcagccttgctttaggcccttactaataggaatttctctcgttaatttgtttccagttttaatgtttaccgtcatatttttgtaaagctgttgtactgcttgtatattttttttgcttattccttgtttttccattgctatccagagcattgaaagtggtacactatcgtatgcctttgtcagatcaataaaaactatatgggtggaaaggttgtgggctaatcttttctcaataacttgctttatagcaaatatgctgtccatacaggatctgcctgcacgaaagcctttttgttcttct

SEQ ID NO: 883 - DNA, 1078 bp, Diabrotica virgifera
cccgcctgtaatattcttaaactatttcttttctttgccaccccaaacacatatcccaattatttcactcttttaattaaccagattttaaaaacaacatattctatcttctggtattacttctccttctttcaatgtttctgacagtaaaaagaagaatctccaactatatcgctggtacctatgattaatgtgattcctaatacatttccagtgtaaataataactcttgataagtattggcgattacaatttttttttatatgcgtgtccgcgaagattataacttccaaaatatttataatgaaaagatttagttcataatagatgccgacgaaaacaattatttctgagaactttttagtaattataattttcgtggacccaccaacaaaaatgatgttttttgcgatactcctcaaaaaataatttttttcgctaacactttattagggattataattttcagaatcatataatcaaaaataatatttttcgcggcgttcattgaaagttctactcttaacggcatttttcggagttatacttttcgtaggcggcggcgatatgtgcaacaatttttctacattgtttcttatacatattttttgaattatataatttgttttaatttatacctgtatattaaaggttgcacccacctcgaagaataatttagctggctagaatcagcgaaaatgtttattgtaagttacacattcactcccaaagtcaattgtagcttacaaattattgtttcgttgattgaaagttacatgttgttatttttatttacgaataactttttaaataaatgtcaactaacattcctttaatattgactttgtgctctaattcaaattactataaaaaaccaccgtaagtccatcacatcttcagatttggctgactacaatcctggcaactgtcagatagatctagaattgcttgcaataattctcggcatacccaagacaagggtatgtcgagacagaaaatagacttaaccaaatgaaatagaattgtttaaagtgaatataaactagctgcactattctagttcttagtcactattaat

SEQ ID NO: 884 - DNA, 1151 bp, Diabrotica virgifera
ataaacaaacctctatgtagaattgaattggggtgaattttttatttgagtgtttttggtgtaaagttaatattcggagttatagagcaataattgaaaaaaatacgattttgtcggcgccattttgtttataaaaaaagtagcacactatctgcggactttgcatacctatattaataatatataggatcttataattcgattccagcaataaaattgctggtaaataacctttctttgtactttactaattagaccagcgtattataactatttttttttcaaaatttaaagattatgcaaaaaaagaaaaatttatattttgtcgataaaatattaaacaagcatctcatctttataatctttataagtttgatcaatgtatcatgattattttggttattattgcgatcgtaaattgttaattaacaattgaattgttgctaaaatattcgtttaattttcaccggcttctggaattacaatctataccaagaaagctttgatgtcactaagttatttaattattgattaataattacttacctaaaacttcatttgaaaattagagttttgttgggaaaacccgcatttccgaggaacattttcgtcggagcaaatcgtgaaaaacaatctctatgcaaaatttaattgcggtgaatttttatttgggtgttttgttgtaaagttaaaatcttcggagttatagagcaataattgaaaaaaatacgatttgtcggcgccattttgtttataaaaaaagtagcacactatctgcggactttgcatacctatattattaatatataggatcttataattcgactccagcaataaaattgctggtaaataacttttccatgaattttgctaattagcccagaatatctataatttcatgcttcttacaatattagaatattgatgttatttataattaaacattacatagctaaatataacataatcttatacacctactaaaataaaaactaaaataactactcatttaccttatctctttccgttgttttaactgcaatttgcaattttattagtaatccattcgcacatactggcccttcgaagtaggcaacacaaaatacaacatttagtaatgaactacaaaaatgttcacgtgagttacactt

SEQ ID NO: 885 - DNA, 1308 bp, Diabrotica virgifera
  SmartBlast Evalue=4E-17; Info=Transposable element Tc3 transposase n=1 Tax=Lepeophtheirus salmonis RepID=C1BSK0_9MAXI
gcggcgaatgttgtcctccaagtggtcaatcgtttcaagcttgtcggcgtagattagctacttcacatatccccacgctcacagaaaatagtctagcggtgttaaatcgcacgatcttggaggccaatccacgggtcagaaacgtgaaactatgcagttaccaaacatttccttcaataagccaatgtgacacgcgctgtctgacatgtcttgttgaaaccacaactttttcacatcatggttgttcaaaatcagtaattgtactaaaccgactagtgcttctaacgactagaaccactagtgttcagtgttctaacatcctactaactgtaacctcatttagtcatttaccttacggctacggcttccgaagtctcagcaagtacacgaaccggttgacgtcccctgcgatgagacaccacctgcagcatccgacactatgttactgcccatagtgtcacttattgttccaattctacactctagactctaaattattaggaattttaaagttttacgcgcgaccgacaacttcggatatttttagtcggtattacgcgaacccggatttctctctctcctcggatcactattgaaaagttcgcacacgatcgcactctttccgcaaagaattaacccataacttaaaaattctcctcgttcgctcgtcgctcacacacacgccaacacacacgtagctatgtattatgtattatacccgtccacatacacaactcacgcgagtttaaagcgtgtcagtcgcttcgagtgaacatctccggctctgtatcaagcctactttcgcgctaaaaattacaaaaaaaagtatttttaatctttgattaaaattaaactaatatttgatattctttgtgagtaattagactataccacagactcacttttaagctttgaaacaattaaaacaaattataaacaacggagatttcgtatatttactttgctgtttcatggcttttttgcaaatggttggaaaatttttaaagcattcattttcaagacctatgaaatacgcattttaagtattttttaaattagaatataataaacaatttctgagaaatgttaatttgtttataacaatttttttaaacatttaaagattgtgcaaaagaatgaaaaatttatattttgtctttatactttataatctttctaagtttgatcagtgtctcatgattgttttggttgttgttgcggctgtaaattgttaattaagcattgaattgttgctaaagtgttcgtttcattttcaccggcttctgaatttgataatctataacaaga

SEQ ID NO: 886 - DNA, 1119 bp, Diabrotica virgifera
ttcacagtctttaatgttttaaagaaaatagttataaacaaattaacgtttctcagagggtttttattatattgtaattttgaaaaatagctaaaatgcgcatttcaaatatcttgaaggtgaatgctttaaaactttttgcagccatttgcaaaaaagttatgaaacagcaaagtaaacatacgattactacggtgtttatatatttttttaattctttcaaagcgtagaagtgagtttaaagtacaagctaattatttacaaaaaaatatcgattatcagtttaatggttatattttaattaaagattataaatatatttttttgtaatttacacgcgcgaaagtagagtaatacagtactgtagctaaaattttcactcggagcgacgacggccgcgcgacgtacacttttaataaataatgtatgctgcgtgtcagtcgcttcgagtgaacattttagctccgactctgtatcaggcctacttttgcgctaaaaattacaaaaaaagtatttttaatctttgattgaaatataaccattgcactaatttttgacattctttgtgagtaattagttgtaccatagactcacttttaagctttgaaacaattaaaacaaattataaacaacggagatttcgtatatttactttgctgtttcatggcttttttgcaaatggttggaaaatttttaaagcattcattttcaagacctatgaaatacgcattttaagtattttttaaattagaatataataaacaatttctgagaaatgttaatttgtttataacaatttttttaaacatttaaagattgtgcaaaagaatgaaaaatttgtgttttgtcgacaaaatattaaatgggcatcacacctttataatctttctaagtttgatcaatgtctcatgattgttttggttgttgttgcgactgtaaattgttaattaacaattgaattgttgctgaaatattcgtttgattttcaccggcttttggaattgcgactgtatcaggaaggctttgatgtcactaagttatttaattgttgattaatggttacttacctaaagctttatttgaaaattagagtttttgttgggaaggcccgcattttcc

SEQ ID NO: 887 - DNA, 1000 bp, Diabrotica virgifera
ttcacagtctttaatgttttaaagaaaatagttataaacaaattaacgtttctcagagggtttttattatattgtaattttgaaaaatagctaaaatgcgcatttcaaatatcttgaaggtgaatgctttaaaactttttgcagccatttgcaaaaaagttatgaaacagcaaagtaaacatacgattactacggtgtttatatatttttttaattctttcaaagcgtagaagtgagtttaaagtacaagctaattatttacaaaaaaatatcgattatcagtttaatggttatattttaattaaagattataaatatatttttttgtaatttacacgcgcgaaagtagagtaatacagtactgtagctaaaattttcactcggagcgacgacggccgcgcgacgtacacttttaataaataatgtatgctgcgtgtcagtcgcttcgagtgaacattttagctccgactctgtatcaggcctacttttgcgctaaaaattacaaaaaaagtatttttaatctttgattgaaatataaccattgcactaatttttgacattctttgtgagtaattagttgtaccatagactcacttttaagctttgaaacaattaaaacaaattataaacaacggagatttcgtatatttactttgctgtttcatggcttttttgcaaatggttggaaaatttttaaagcattcattttcaagacctatgaaatacgcattttaagtattttttaaattagaatataataaacaatttctgagaaatgttaatttgtttataacaatttttttaaacatttaaagattgtgcaaaagaatgaaaaatttatattttgtctttatactttataatctttctaagtttgatcagtgtctcatgattgttttggttgttgttgcggctgtaaattgttaattaagcattgaattgttgctaaagtgttcgtttcattttcaccggcttctgaatttgataatctataacaaga

SEQ ID NO: 888 - DNA, 960 bp, Diabrotica virgifera
aggatcccataatttgattcgagcaataaaaccgctggcaaataacctttctttgtactttactaattagaccagcgtattataactatttttttttatttaattatgcaaaaaacgaaaaatttatatttcgtcgataaaatattaaataagcatttcatctttataatctttataaagtttgatcaatgtatcatgattattttggtttttattgcgatcataaattgttaattaacaattgaattgttgctaaaatattcgtttaattttcaccggcttctggaattacaatctataccaagaaagctttgatgtcactaagttatttaattattgattaataattacttacctaaaacttcatttgaaaattagagttttgttgggaaaacccgcatttccgaggaacattttcgtcggagcaaatcgtgaaaaacaatctctatgcaaaatttaattgcggtgaatttttatttgggtgttttgttgtaaagttaaaatcttcggagttatagagcaataattgaaaaaaatacgatttgtcggcgccattttgtttataaaaaaagtagcacactatctgcggactttgcatacctatattattaatatataggatcttataattcgactccagcaataaaattgctggtaaataacttttccatgaattttgctaattagcccagaatatctataatttcatgcttcttacaatattagaatattgatgttatttataattaaacattacatagctaaatataacataatcttatacacctactaaaataaaaactaaaataactactcatttaccttatctctttccgttgttttaactgcaatttgcaattttattagtaatccattcgcacatactggcccttcgaagtaggcaacacaaaatacaacatttagtaatgaactacaaaaatgttcacgtgagttacactt

SEQ ID NO: 889 - DNA, 959 bp, Diabrotica virgifera
taggatcttatattcgattccagcagtggaattgctggtaaataacctttctttgtactttactaattagaccagcgtattataactatttttttttcaaaatttaaagaatatgcaaaaaaagaagaatttatattttgtcgataaaatattaaataagcatctcatctttataagtttgatcaatgtatcatgattattttggttattgattgcgatcgtaaatttgttaattaacaattgaattgttgctaaaatattcgtttaattttcaccggcttctggaattacaatctataccaagaaagctttgatgtcactaagttatttaattattgattaataattacttacctaaaacttcatttgaaaattagagttttgttgggaaaacccgcatttccgaggaacattttcgtcggagcaaatcgtgaaaaacaatctctatgcaaaatttaattgcggtgaatttttatttgggtgttttgttgtaaagttaaaatcttcggagttatagagcaataattgaaaaaaatacgatttgtcggcgccattttgtttataaaaaaagtagcacactatctgcggactttgcatacctatattattaatatataggatcttataattcgactccagcaataaaattgctggtaaataacttttccatgaattttgctaattagcccagaatatctataatttcatgcttcttacaatattagaatattgatgttatttataattaaacattacatagctaaatataacataatcttatacacctactaaaataaaaactaaaataactactcatttaccttatctctttccgttgttttaactgcaatttgcaattttattagtaatccattcgcacatactggcccttcgaagtaggcaacacaaaatacaacatttagtaatgaactacaaaaatgttcacgtgagttacactt

SEQ ID NO: 890 - DNA, 848 bp, Diabrotica virgifera
tttgtattttgtcgacaaagtattgaataggcatctcatctgtatgatctttctacgtttgatcaatgtatcatgattactttggttgttgttgcgactgtgaattgttggttaacagaattgaattgttgctaaaatgttcgtttagttttcaccggcttctgcaataattgtaatctataccaagaaagcatatatatttcaccaagttatttaattattgataaataattacttgcccaaaaaattaatttgaaaattcgagattttgttgggaaaacccacattttccgaggaaaattttcgtcggagcaaatcgggaaaacatgcctctatgtagaattaaattggggtgaatttttatttgagtgtttttggtgtaaagttaaaatcttcggagttatagagcaataattgaaaaaaatacgatttgtcggcgccattttgtttataaaaaaagtagcacactatctgcggactttgcatacctatattattaatatataggatcttataattcgactccagcaataaaattgctggtaaataacttttccatgaattttgctaattagcccagaatatctataatttcatgcttcttacaatattagaatattgatgttatttataattaaacattacatagctaaatataacataatcttatacacctactaaaataaaaactaaaataactactcatttaccttatctctttccgttgttttaactgcaatttgcaattttattagtaatccattcgcacatactggcccttcgaagtaggcaacacaaaatacaacatttagtaatgaactacaaaaatgttcacgtgagttacactt

SEQ ID NO: 891 - DNA, 1985 bp, Diabrotica virgifera
  SmartBlast Evalue=6E-17; Info=Transposable element Tc3 transposase n=1 Tax=Lepeophtheirus salmonis RepID=C1BSK0_9MAXI
gcggcgaatgttgtcctccaagtggtcaatcgtttcaagcttgtcggcgtagattagctacttcacatatccccacgctcacagaaaatagtctagcggtgttaaatcgcacgatcttggaggccaatccacgggtcagaaacgtgaaactatgcagttaccaaacatttccttcaataagccaatgtgacacgcgctgtctgacatgtcttgttgaaaccacaactttttcacatcatggttgttcaaaatcagtaattgtactaaaccgactagtgcttctaacgactagaaccactagtgttcagtgttctaacatcctactaactgtaacctcatttagtcatttaccttacggctacggcttccgaagtctcagcaagtacacgaaccggttgacgtcccctgcgatgagacaccacctgcagcatccgacactatgttactgcccatagtgtcacttattgttccaattctacactctagactctaaattattaggaattttaaagttttacgcgcgaccgacaacttcggatatttttagtcggtattacgcgaacccggatttctctctctcctcggatcactattgaaaagttcgcacacgatcgcactctttccgcaaagaattaacccataacttaaaaattctcctcgttcgctcgtcgctcacacacacgccaacacacacgtagctatgtattatgtattatacccgtccacatacacaactcacgcgagtttaaagcgtgtcagtcgcttcgagtgaacatctccggctctgtatcaagcctactttcgcgctaaaaattacaaaaaaaagtatttttaatctttgattaaaattaaactaatatttgatattctttgtgagtaattagactataccacagactcacttttaagctttgaaacaattaaaacaaattataaacaacggagatttcgtatatttactttgctgtttcatggcttttttgcaaatggttggaaaatttttaaagcattcattttcaagacctatgaaatacgcattttaagtattttttaaattagaatataataaacaatttctgagaaatgttaatttgtttataacaatttttttaaacatttaaagattgtgcaaaagaatgaaaaatttgtgttttgtcgacaaaatattaaatgggcatcacacctttataatctttctaagtttgatcaatgtctcatgattgttttggttgttgttgcgactgtaaattgttaattaacaattgaattgttgctgaaatattcattccattttcaccggcttctgcagttataatctataccaagaaagcttttattttaccaagttatttaattattgataaataattacttgcccaaaaaattaatttgaaaattcgagattttgttgggaaaacccacattttccgaggaaaattttcgtcggagcaaatcgggaaaacatgcctctatgtagaattaaattggggtgaatttttatttgagtgtttttggtgtaaagttaaaatcttcggagttatagagcaataattgaaaaaaatacgatttgtcggcgccattttgtttataaaaaaagtagcacactatctgcggactttgcatacctatattattaatatataggatcttataattcgactccagcaataaaattgctggtaaataacttttccatgaattttgctaattagcccagaatatctataatttcatgcttcttacaatattagaatattgatgttatttataattaaacattacatagctaaatataacataatcttatacacctactaaaataaaaactaaaataactactcatttaccttatctctttccgttgttttaactgcaatttgcaattttattagtaatccattcgcacatactggcccttcgaagtaggcaacacaaaatacaacatttagtaatgaactacaaaaatgttcacgtgagttacactt

SEQ ID NO: 892 - DNA, 1677 bp, Diabrotica virgifera
ttcacagtctttaatgttttaaagaaaatagttataaacaaattaacgtttctcagagggtttttattatattgtaattttgaaaaatagctaaaatgcgcatttcaaatatcttgaaggtgaatgctttaaaactttttgcagccatttgcaaaaaagttatgaaacagcaaagtaaacatacgattactacggtgtttatatatttttttaattctttcaaagcgtagaagtgagtttaaagtacaagctaattatttacaaaaaaatatcgattatcagtttaatggttatattttaattaaagattataaatatatttttttgtaatttacacgcgcgaaagtagagtaatacagtactgtagctaaaattttcactcggagcgacgacggccgcgcgacgtacacttttaataaataatgtatgctgcgtgtcagtcgcttcgagtgaacattttagctccgactctgtatcaggcctacttttgcgctaaaaattacaaaaaaagtatttttaatctttgattgaaatataaccattgcactaatttttgacattctttgtgagtaattagttgtaccatagactcacttttaagctttgaaacaattaaaacaaattataaacaacggagatttcgtatatttactttgctgtttcatggcttttttgcaaatggttggaaaatttttaaagcattcattttcaagacctatgaaatacgcattttaagtattttttaaattagaatataataaacaatttctgagaaatgttaatttgtttataacaatttttttaaacatttaaagattgtgcaaaagaatgaaaaatttgtgttttgtcgacaaaatattaaatgggcatcacacctttataatctttctaagtttgatcaatgtctcatgattgttttggttgttgttgcgactgtaaattgttaattaacaattgaattgttgctgaaatattcattccattttcaccggcttctgcagttataatctataccaagaaagcttttattttaccaagttatttaattattgataaataattacttgcccaaaaaattaatttgaaaattcgagattttgttgggaaaacccacattttccgaggaaaattttcgtcggagcaaatcgggaaaacatgcctctatgtagaattaaattggggtgaatttttatttgagtgtttttggtgtaaagttaaaatcttcggagttatagagcaataattgaaaaaaatacgatttgtcggcgccattttgtttataaaaaaagtagcacactatctgcggactttgcatacctatattattaatatataggatcttataattcgactccagcaataaaattgctggtaaataacttttccatgaattttgctaattagcccagaatatctataatttcatgcttcttacaatattagaatattgatgttatttataattaaacattacatagctaaatataacataatcttatacacctactaaaataaaaactaaaataactactcatttaccttatctctttccgttgttttaactgcaatttgcaattttattagtaatccattcgcacatactggcccttcgaagtaggcaacacaaaatacaacatttagtaatgaactacaaaaatgttcacgtgagttacactt

SEQ ID NO: 893 - DNA, 1753 bp, Diabrotica virgifera
  SmartBlast Evalue=1E-26; Info=Transposable element Tc3 transposase n=1 Tax=Lepeophtheirus salmonis RepID=C1BSK0_9MAXI
ataaacaaacctctatgtagaattgaattggggtgaattttttatttgagtgtttttggtgtaaagttaatattcggagttatagagcaataattgaaaaaaatacgattttgtcggcgccattttgtttataaaaaaagtagcacactatctgcggactttgcatacctatattaataatatataggatcttataattcgattccagcaataaaattgctggtaaataacctttctttgtactttactaattagaccagcgtattataactatttttttttcaaaatttaaagattatgcaaaaaaagaaaaatttatattttgtcgataaaatattaaacaagcatctcatctttataatctttataagtttgatcaatgtatcatgattattttggttattattgcgatcgtaaattgttaattaacaattgaattgttgctaaaatattcgtttaattttcaccggcttctggaattacaatctataccaagaaagctttgatgtcactaagttatttaattattgattaataattacttacctaaaactttatttgaaaattatagtttttgttaggaaaacccgcattttccgaggaaaattttcgtcggagcaaatcgtggaaaaacatatctctatgcagaatttaattgcggtgaatttttatttgggtgtttttgttgtaaagttaaaatcttcggagttatagagcaatacttgaaaaaatacgatttgtcggcgccattttgtttataaaaaaagtagcacactatctgcggactttgcatacctatattattaatatataggatcttataattcgattccagcaatgtaaataacttttccatgaattttgctaattagcccagagtatcaaaacttcaaatcgtccttcctagacggttgtcacatcacactgccccgaaaaccaaaaacgttaaaaataattcttcgaatctgttcctatcgtctattaaaagttttaacatcgaaaagaaaaataaacccattaatatttatcactgttctcaaaagtgtaacgaaggtatcccggagtggttcacccttatcgcgtgtcataaaaatttaattaccaccccagacgaaaaaatatcggattacgcgtaaagaatttggaaatccgacgaataacatattaacttcgttgacggccataaaaccatagacgttacagtaatcatgtctctatagccattaccattgactgtaacgttcgtaccagcatcatttttgaagaattattgaccaatgattctaccagtatataaagtacaccacacagtcagtttttctggatgtaatggtgtctcaacatacacttgaggattattttcactccaaatacggcagttttgtctattgacatagccattcaaccaaaagtgagcttcatcaaaattcgcttatgaaaatcgggatcaacggcaatctcgttttgggccctttcgccttatctacgccttgctaggtaatcgtgtagcttcaattcttgcacgagttggattttgtatcttccataaagtggatggacacataatcaactgctgtgcacgatgacggatataatgattcgggtcttcctctatgttacgctatacaatagcaacaacttcttctgtacgacgtctctgtggatgcgtattatcaaatcttgacatttcccattaattttgaggaaccaaaaaaatagcgccatctagcggtatgagtagtatgaccagagc

SEQ ID NO: 894 - DNA, 1751 bp, Diabrotica virgifera
  SmartBlast Evalue=1E-26; Info=Transposable element Tc3 transposase n=1 Tax=Lepeophtheirus salmonis RepID=C1BSK0_9MAXI
ataaacaaacctctatgtagaattgaattggggtgaattttttatttgagtgtttttggtgtaaagttaatattcggagttatagagcaataattgaaaaaaatacgattttgtcggcgccattttgtttataaaaaaagtagtacactgtctgcggactttgcatgcctatattataatacataggatcttatattcgattccagcagtggaattgctggtaaataacctttctttgtactttactaattagaccagcgtattataactatttttttttcaaaatttaaagattatgcaaaaaaaagaaaatttatattttgtcgataaaatattaaataagcatctcatctttataatctttataagtttgatcagcgtatcatgattattttggttattattgcgatcgtaaattgttaattaacaattgaattgttgctaaaatattcgtttaattttcaccagcttctggaattacaatctataccaagaaagctttgatgtcactaagttatttaattattgattaataattacttaccgaaaactttatttgaaaattagagtttttgttaggaaaacccgcattttccgaggaaaattttcgtcggagcaaatcgtggaaaaacatatctctatgcagaatttaattgcggtgaatttttatttgggtgtttttgttgtaaagttaaaatcttcggagttatagagcaatacttgaaaaaatacgatttgtcggcgccattttgtttataaaaaaagtagcacactatctgcggactttgcatacctatattattaatatataggatcttataattcgattccagcaatgtaaataacttttccatgaattttgctaattagcccagagtatcaaaacttcaaatcgtccttcctagacggttgtcacatcacactgccccgaaaaccaaaaacgttaaaaataattcttcgaatctgttcctatcgtctattaaaagttttaacatcgaaaagaaaaataaacccattaatatttatcactgttctcaaaagtgtaacgaaggtatcccggagtggttcacccttatcgcgtgtcataaaaatttaattaccaccccagacgaaaaaatatcggattacgcgtaaagaatttggaaatccgacgaataacatattaacttcgttgacggccataaaaccatagacgttacagtaatcatgtctctatagccattaccattgactgtaacgttcgtaccagcatcatttttgaagaattattgaccaatgattctaccagtatataaagtacaccacacagtcagtttttctggatgtaatggtgtctcaacatacacttgaggattattttcactccaaatacggcagttttgtctattgacatagccattcaaccaaaagtgagcttcatcaaaattcgcttatgaaaatcgggatcaacggcaatctcgttttgggccctttcgccttatctacgccttgctaggtaatcgtgtagcttcaattcttgcacgagttggattttgtatcttccataaagtggatggacacataatcaactgctgtgcacgatgacggatataatgattcgggtcttcctctatgttacgctatacaatagcaacaacttcttctgtacgacgtctctgtggatgcgtattatcaaatcttgacatttcccattaattttgaggaaccaaaaaaatagcgccatctagcggtatgagtagtatgaccagagc

SEQ ID NO: 895 - DNA, 1580 bp, Diabrotica virgifera
  SmartBlast Evalue=5E-17; Info=Transposable element Tc3 transposase n=1 Tax=Lepeophtheirus salmonis RepID=C1BSK0_9MAXI
gcggcgaatgttgtcctccaagtggtcaatcgtttcaagcttgtcggcgtagattagctacttcacatatccccacgctcacagaaaatagtctagcggtgttaaatcgcacgatcttggaggccaatccacgggtcagaaacgtgaaactatgcagttaccaaacatttccttcaataagccaatgtgacacgcgctgtctgacatgtcttgttgaaaccacaactttttcacatcatggttgttcaaaatcagtaattgtactaaaccgactagtgcttctaacgactagaaccactagtgttcagtgttctaacatcctactaactgtaacctcatttagtcatttaccttacggctacggcttccgaagtctcagcaagtacacgaaccggttgacgtcccctgcgatgagacaccacctgcagcatccgacactatgttactgcccatagtgtcacttattgttccaattctacactctagactctaaattattaggaattttaaagttttacgcgcgaccgacaacttcggatatttttagtcggtattacgcgaacccggatttctctctctcctcggatcactattgaaaagttcgcacacgatcgcactctttccgcaaagaattaacccataacttaaaaattctcctcgttcgctcgtcgctcacacacacgccaacacacacgtagctatgtattatgtattatacccgtccacatacacaactcacgcgagtttaaagcgtgtcagtcgcttcgagtgaacatctccggctctgtatcaagcctactttcgcgctaaaaattacaaaaaaaagtatttttaatctttgattaaaattaaactaatatttgatattctttgtgagtaattagactataccacagactcacttttaagctttgaaacaattaaaacaaattataaacaacggagatttcgtatatttactttgctgtttcatggcttttttgcaaatggttggaaaatttttaaagcattcattttcaagacctatgaaatacgcattttaagtattttttaaattagaatataataaacaatttctgagaaatgttaatttgtttataacaatttttttaaacatttaaagattgtgcaaaagaatgaaaaatttgtgttttgtcgacaaaatattaaatgggcatcacacctttataatctttctaagtttgatcaatgtctcatgattgttttggttgttgttgcgactgtaaattgttgattggcaaagttgaattgttgctggagtattcgtttcattttcaccggcttctgaatttataatctataccaagaagcttttatttcaccgggctatataattgttgataaataattgctggcccaaaaaatttatttgaaaattcgagattttgttgaaaagggcccgcattttccgaggaaggttttcgtcggagcaggtcggaaaagacacgcttctgtgtagagttgaattggggtggatttttgtttgagtgtttttggtgtgaagttagaatcttcggagttatagagcagtaattgaaagaaatacgatttgtcggcgc

SEQ ID NO: 896 - DNA, 1562 bp, Diabrotica virgifera
  SmartBlast Evalue=8E-27; Info=Transposable element Tc3 transposase n=1 Tax=Lepeophtheirus salmonis RepID=C1BSK0_9MAXI
aggatcccataatttgattcgagcaataaaaccgctggcaaataacctttctttgtactttactaattagaccagcgtattataactatttttttttatttaattatgcaaaaaacgaaaaatttatatttcgtcgataaaatattaaataagcatttcatctttataatctttataaagtttgatcaatgtatcatgattattttggtttttattgcgatcataaattgttaattaacaattgaattgttgctaaaatattcgtttaattttcaccggcttctggaattacaatctataccaagaaagctttgatgtcactaagttatttaattattgattaataattacttacctaaaactttatttgaaaattatagtttttgttaggaaaacccgcattttccgaggaaaattttcgtcggagcaaatcgtggaaaaacatatctctatgcagaatttaattgcggtgaatttttatttgggtgtttttgttgtaaagttaaaatcttcggagttatagagcaatacttgaaaaaatacgatttgtcggcgccattttgtttataaaaaaagtagcacactatctgcggactttgcatacctatattattaatatataggatcttataattcgattccagcaatgtaaataacttttccatgaattttgctaattagcccagagtatcaaaacttcaaatcgtccttcctagacggttgtcacatcacactgccccgaaaaccaaaaacgttaaaaataattcttcgaatctgttcctatcgtctattaaaagttttaacatcgaaaagaaaaataaacccattaatatttatcactgttctcaaaagtgtaacgaaggtatcccggagtggttcacccttatcgcgtgtcataaaaatttaattaccaccccagacgaaaaaatatcggattacgcgtaaagaatttggaaatccgacgaataacatattaacttcgttgacggccataaaaccatagacgttacagtaatcatgtctctatagccattaccattgactgtaacgttcgtaccagcatcatttttgaagaattattgaccaatgattctaccagtatataaagtacaccacacagtcagtttttctggatgtaatggtgtctcaacatacacttgaggattattttcactccaaatacggcagttttgtctattgacatagccattcaaccaaaagtgagcttcatcaaaattcgcttatgaaaatcgggatcaacggcaatctcgttttgggccctttcgccttatctacgccttgctaggtaatcgtgtagcttcaattcttgcacgagttggattttgtatcttccataaagtggatggacacataatcaactgctgtgcacgatgacggatataatgattcgggtcttcctctatgttacgctatacaatagcaacaacttcttctgtacgacgtctctgtggatgcgtattatcaaatcttgacatttcccattaattttgaggaaccaaaaaaatagcgccatctagcggtatgagtagtatgaccagagc

SEQ ID NO: 897 - DNA, 1561 bp, Diabrotica virgifera
  SmartBlast Evalue=8E-27; Info=Transposable element Tc3 transposase n=1 Tax=Lepeophtheirus salmonis RepID=C1BSK0_9MAXI
taggatcttatattcgattccagcagtggaattgctggtaaataacctttctttgtactttactaattagaccagcgtattataactatttttttttcaaaatttaaagaatatgcaaaaaaagaagaatttatattttgtcgataaaatattaaataagcatctcatctttataagtttgatcaatgtatcatgattattttggttattgattgcgatcgtaaatttgttaattaacaattgaattgttgctaaaatattcgtttaattttcaccggcttctggaattacaatctataccaagaaagctttgatgtcactaagttatttaattattgattaataattacttacctaaaactttatttgaaaattatagtttttgttaggaaaacccgcattttccgaggaaaattttcgtcggagcaaatcgtggaaaaacatatctctatgcagaatttaattgcggtgaatttttatttgggtgtttttgttgtaaagttaaaatcttcggagttatagagcaatacttgaaaaaatacgatttgtcggcgccattttgtttataaaaaaagtagcacactatctgcggactttgcatacctatattattaatatataggatcttataattcgattccagcaatgtaaataacttttccatgaattttgctaattagcccagagtatcaaaacttcaaatcgtccttcctagacggttgtcacatcacactgccccgaaaaccaaaaacgttaaaaataattcttcgaatctgttcctatcgtctattaaaagttttaacatcgaaaagaaaaataaacccattaatatttatcactgttctcaaaagtgtaacgaaggtatcccggagtggttcacccttatcgcgtgtcataaaaatttaattaccaccccagacgaaaaaatatcggattacgcgtaaagaatttggaaatccgacgaataacatattaacttcgttgacggccataaaaccatagacgttacagtaatcatgtctctatagccattaccattgactgtaacgttcgtaccagcatcatttttgaagaattattgaccaatgattctaccagtatataaagtacaccacacagtcagtttttctggatgtaatggtgtctcaacatacacttgaggattattttcactccaaatacggcagttttgtctattgacatagccattcaaccaaaagtgagcttcatcaaaattcgcttatgaaaatcgggatcaacggcaatctcgttttgggccctttcgccttatctacgccttgctaggtaatcgtgtagcttcaattcttgcacgagttggattttgtatcttccataaagtggatggacacataatcaactgctgtgcacgatgacggatataatgattcgggtcttcctctatgttacgctatacaatagcaacaacttcttctgtacgacgtctctgtggatgcgtattatcaaatcttgacatttcccattaattttgaggaaccaaaaaaatagcgccatctagcggtatgagtagtatgaccagagc

SEQ ID NO: 898 - DNA, 1272 bp, Diabrotica virgifera
ttcacagtctttaatgttttaaagaaaatagttataaacaaattaacgtttctcagagggtttttattatattgtaattttgaaaaatagctaaaatgcgcatttcaaatatcttgaaggtgaatgctttaaaactttttgcagccatttgcaaaaaagttatgaaacagcaaagtaaacatacgattactacggtgtttatatatttttttaattctttcaaagcgtagaagtgagtttaaagtacaagctaattatttacaaaaaaatatcgattatcagtttaatggttatattttaattaaagattataaatatatttttttgtaatttacacgcgcgaaagtagagtaatacagtactgtagctaaaattttcactcggagcgacgacggccgcgcgacgtacacttttaataaataatgtatgctgcgtgtcagtcgcttcgagtgaacattttagctccgactctgtatcaggcctacttttgcgctaaaaattacaaaaaaagtatttttaatctttgattgaaatataaccattgcactaatttttgacattctttgtgagtaattagttgtaccatagactcacttttaagctttgaaacaattaaaacaaattataaacaacggagatttcgtatatttactttgctgtttcatggcttttttgcaaatggttggaaaatttttaaagcattcattttcaagacctatgaaatacgcattttaagtattttttaaattagaatataataaacaatttctgagaaatgttaatttgtttataacaatttttttaaacatttaaagattgtgcaaaagaatgaaaaatttgtgttttgtcgacaaaatattaaatgggcatcacacctttataatctttctaagtttgatcaatgtctcatgattgttttggttgttgttgcgactgtaaattgttgattggcaaagttgaattgttgctggagtattcgtttcattttcaccggcttctgaatttataatctataccaagaagcttttatttcaccgggctatataattgttgataaataattgctggcccaaaaaatttatttgaaaattcgagattttgttgaaaagggcccgcattttccgaggaaggttttcgtcggagcaggtcggaaaagacacgcttctgtgtagagttgaattggggtggatttttgtttgagtgtttttggtgtgaagttagaatcttcggagttatagagcagtaattgaaagaaatacgatttgtcggcgc

SEQ ID NO: 899 - DNA, 1427 bp, Diabrotica virgifera
  SmartBlast Evalue=4E-17; Info=Transposable element Tc3 transposase n=1 Tax=Lepeophtheirus salmonis RepID=C1BSK0_9MAXI
gcggcgaatgttgtcctccaagtggtcaatcgtttcaagcttgtcggcgtagattagctacttcacatatccccacgctcacagaaaatagtctagcggtgttaaatcgcacgatcttggaggccaatccacgggtcagaaacgtgaaactatgcagttaccaaacatttccttcaataagccaatgtgacacgcgctgtctgacatgtcttgttgaaaccacaactttttcacatcatggttgttcaaaatcagtaattgtactaaaccgactagtgcttctaacgactagaaccactagtgttcagtgttctaacatcctactaactgtaacctcatttagtcatttaccttacggctacggcttccgaagtctcagcaagtacacgaaccggttgacgtcccctgcgatgagacaccacctgcagcatccgacactatgttactgcccatagtgtcacttattgttccaattctacactctagactctaaattattaggaattttaaagttttacgcgcgaccgacaacttcggatatttttagtcggtattacgcgaacccggatttctctctctcctcggatcactattgaaaagttcgcacacgatcgcactctttccgcaaagaattaacccataacttaaaaattctcctcgttcgctcgtcgctcacacacacgccaacacacacgtagctatgtattatgtattatacccgtccacatacacaactcacgcgagtttaaagcgtgtcagtcgcttcgagtgaacatctccggctctgtatcaagcctactttcgcgctaaaaattacaaaaaaaagtatttttaatctttgattaaaattaaactaatatttgatattctttgtgagtaattagactataccacagactcacttttaagctttgaaacaattaaaacaaattataaacaacggagatttcgtatatttactttgctgtttcatggcttttttgcaaatggttggaaaatttttaaagcattcattttcaagacctatgaaatacgcattttaagtattttttaaattagaatataataaacaatttctgagaaatgttaatttgtttataacaatttttttaaacatttaaagattgtgcaaaagaatgaaaaatttgtgttttgtcgacaaaatattaaatgggcatcacacctttataatctttctaagtttgatcaatgtctcatgattgttttggttgttgttgcgactgtaaattgttaattaacaattgaattgttgctgaaatattcgtttgattttcaccggcttttggaattgcgactgtatcaggaaggctttgatgtcactaagttatttaattgttgattaatggttacttacctaaagctttatttgaaaattagagtttttgttgggaaggcccgcattttcc

SEQ ID NO: 900 - DNA, 953 bp, Diabrotica virgifera
  SmartBlast Evalue=4E-41; Info=Encapsulation-relating protein n= 1 Tax=Diabrotica virgifera virgifera RepID=D7EYY4_DIAVI
ttaacagataatcatttattcgaaaacaacaatcaaaattaacatgaaaactcaaaaatcaataataaaaagaaaacaaaatttagtacacacgtggtactctttggtagatttgtggctgtctcaagctcaactgttgttcttgagagaccaattggttaagtgctgattgttggggcaaaactcctctttggagtaatagtacaacttgctgatggatcagttgttgttgagcgattaattcttgaggaacaagatctccttgctgaaccaattggaccaattgtttgtagatcaggaagtagctggaaacaagttgttggggaacaacacgaccttgttgaacaaaaacttgaactaattgtctaaggctagcttgttggtagatgaattgcttgatcaatacttggatgaattgttcaacttgttggtaggccaattgttggaataaaactagttcttgtggaacagtttgttcttgttggataagtacctggatttgttctttgatttgagattgttgaagaactacctgttgaacaagtctttggacttgttggtaaaaatttctttgaacagcgtacaattgttgatcaacttgattaccttgttcaacgaggtattggatgaagttgatcatgttaagttgttgggtgctcaaaactttaatcaattggcgaacttgttggtagactaatacttgttgggaaagcaagtcttggggaagacgttgtccttgttgaatgaattgctcaacttgttgagagatcacattttggtgatataccaatgattggataagctgatctacttgtttgttcaaaccatactgttggacatatatttcttgagaaattggttggttctgttctacaagttgttgtgctctctggttaattaaggattgttcgctgtatacttgatttaacacttcttggttaacgaattgttca

SEQ ID NO: 901 - DNA, 1814 bp, Diabrotica virgifera
ataggtacgttatattaaaataatatacgtatttaaaattgaataaatgaattatattgcttacatagattatgttatattcaaataataattaatatatttgtatttatatcagcaaagcatatgttatttacgattgattttgacacatctgtcaatgtcaaaataaattttaaattattcatagctattaataaaatataaatgacatttgttagtaaatttaattagtatataaaataaataataaatttaaaaatacaatttgagtattttgaaaaaaataattatttagtaacgactttaaaaaggtttgtacacttttgtctaacgggcacccctttaacggaagtacctaataataatggactcttccatctattgtttacgattcacatgcgttgacgatttactatacttcatcagtaattacatttttcgccaacttaaaaaaaaatattaaagaaaataattaaaagttttgcggtactttatttatacttatttaattggtttagatgtacgtaaaacatttattattttaaaatttgaaattgttttatatatttatatttatatattttatttgaaataaaaattgttttgaaagtttgttaatggtaaaattaacgggtaaaatcactagtatatattatattaaattggatatatattaaattataggcataatgtatattaaataaaattaaatctaatggaatcgaattgaatcgaaccgaatataatcgaatatataagaagtattcatacactccgcaagtgccccgctctatttttattttaacattatggagccaaggagccaaaattttcatgttttgtaattagattaattgatttaatagctttcctctactttcttaatttgattatcttgtttctctcccatttctgcagttgttcccagctgtgattccattagttaagtcaatagggaacttgcacattttttttattacataataatgttcagttttgtataaaaatgagatttccaaaatttcacgcttcaaaaactcataataacttagaagtacaaatttaaagtcttctttattttaaaatagttcaaacgacccgtaacgccacagagtttaactatgtggttctgtttatggttatatttacgtatattcttcttctttagtttattggcctccacctacttgggtatttggccagctcgtcgtcggggaaaaaaggaaaaatatttatattctaatgacatttatcgtacgtcgttgtaataatatataccagtttgttgagattggagtttgatacagtttttgaaggaaaggaaagaaggtttactattgaaaataaaaccattttgtaaaagtacaaattttctatgaatagttcaaacgatcaaaaacacttttaacgtcacataactgtattttttactgacgtttataatgtctaatttaaaattatatatacaattggtgtagaatgtaaacatacaacccgtgacgtcacgacgcgttttggggtggctggtataagttgaatttttagtagtctttaggggccaaacgaaagacaaacaaaacttttttatctttgatacaggttctaaattatgttctgttgtgatttataacattttttcgaatttaaaaatttatgcaagttccctattgatacaaaaatcattgatcacacaaagatgcaatgatcatttacattatactcgtaaaggcacgtatccactaggttcgcgaacctcttgcgctccgcgctccctgaactgctccaatggatacggcatgcgctcctctacatat

SEQ ID NO: 902 - DNA, 1319 bp, Diabrotica virgifera
  SmartBlast Evalue=9E-42; Info=Carbonyl reductase [NADPH] 1 n=1 Tax=Harpegnathos saltator RepID=E2BU93_9HYME
catgaaatacataaaatatgcacaatatatctaaattacgtacagttgtatacagtattgtttatttcttagtaaaaaacttggtcaaagtgaaaaaatgtttgttttgtctgatgaaaatcggttcgggttagccggacttccgggttatcggaggccgacttatcggggttccactgtagttattgaagcaaaggaaagaaggtttactatggaaaataaaaccattttgtaaaagtacaagttttctatgaatagttcaaacgatcaaaaacacttgtgacgtcacataactgtattttctactgacgtttataatgtctaatttaaattatatacaattttgtttactttgttggttcagaatgtaaacatatagcccgatgacgtcacgacgcgttttgggctggctgatataatttgaatttttaatcgtctttaggggccaatcgaaaaagaaacaaaacttttttatctttgatacaggttctaaattatgttctgttgtgatttatagcatttttttcgaatttaaaattttatgcaagttccctattgtcaactttctgttaatattcagtttcaatacattttctggcgttctaaacgtcactagacataaaaataaacattgcaaccaatgaagggtccaggcacgtttaggactgtaatagctcaatgttcctatgtgtctagtagggtggcggttactgtatatgatacttacttgagaaacttcccaattaattgattgagctccggtatcgttaaatcatttctggaaaattctcttctgagattctctgacggaatttttaataaatgcccctcacaactggagacgtttacgacttttgcgttgtttcttaataaaggaaacaaagcctcacaaactctgacagttccaaaataattggtttctatagtttgtgagctttgcgcaaacgtaggatttggagctgctgaccaaaagcaaattgctgcattattaattagtaaatccaaacccccatgttctttttcaataaaattcctaaattcatctacactagtttggctgtcgatgtctagctgatgaaatactgctttcaggttttctttctctaactttgccacagctgatttacctcttgttacatctcgagctgtcaagtaaacaatgccgtcaaatctttcacacagacctttgatagtggcatatccgatgcctttattcccaccagttaacacagccactttttgtggactcatcttgtaattgtgatgaaacaattagttaatcgatgaaaaaaatagagatttttgaagataggtagaga

SEQ ID NO: 903 - DNA, 1259 bp, Diabrotica virgifera
  SmartBlast Evalue=0.000000003; Info="CG1674, isoform E n=2 Tax= Drosophila melanogaster RepID=Q9V4C1_DROME"
gtccgacaacgagctcgatattctgttggctagcttgatctgatcctcgaccgttggatggaaacctttttcataaaatgccgaagaagcaaatacttttcgacatttagtaggtttaatttgttctccatcggcgggggtgaagattttttcaaggttaattggtggctttgggggagcattttcatcctggccatttctggaatggatattaatctcctcggtgcaccttcgaagggcttcgtttttctccgcatactggtccaaatcagataatatttcctttagagagtttctgatgttcccgtctttaatttcggatttatttccattctgttggctttgtacaggtgaaaatagcgagttgatatctaatggagctaacggctgaactggtgtgtaacccaaagtctcaaaaatatttgactgcgtcgacgaagatacttcagacgacaacctcagttctggaaaaagtggtatttctgttacctttggaacctccgagatttttggaacttgtggcaatctaggagcttcgtatggtttgggcaactctggttcggtatataattcttgttgtattggtatgtcatacactttagtttgtttttcaataactgttggggaatctatctttaattcaggtattaccaactttctctcactttgtggtgctatgttagcttgttcgtcttggttgtgagaatattctgacttctgtaaactcgaatttgcttgttttactagctcaaaggattggggtaactcaaactgtaaaggtgcgaatggttggagaggttcaaatgttttaatgggtcctacacgatcgtatcctaaattagaaaggggaactgaagaggcttctaaatttgattcagttagtttctggctttttgtttgctgatacttctacactttctgattgttgtacgtttttggttgagtggatttgctgctgtcgatggtcttccactatcgatttgtcgatggtgctgtcaaaagtggctttcttctctgccacttgtgtgtggccaagatccttgtgagtctctgatagtgtggtttcttccgtttcttctatctcttcctccctgtttcctgctccaagagctacagtcttgttttcgggaatagctacttgtgatttagacatgttgaagttttagatttagtatatcagcttctcagttgtgccttttctattttaggatatagtttaaaggatttcaaaatcaatcaaaaataactttgctgcatac

SEQ ID NO: 904 - DNA, 998 bp, Diabrotica virgifera
  SmartBlast Evalue=8E-69; Info=Carbonyl reductase [NADPH] 1 n=1 Tax=Harpegnathos saltator RepID=E2BU93_9HYME
gataatcaaatagcttttattaataaattaatgttaaacatcaattatggatcatctgttagcattatagatactattgcgttagtatggtggattcggcatttggttactgtaccaatcaactaaactgcaatctgtccagatatattttcccttaagatcggcgtctaacgcggcaaataaagaactttttgctccctcttcgggagttaaaaaaccatgatgttctgtcatgtccgtcttcacaaatccaggatacactgcattgatggaaatattacgatttggctgttcttcatcaaacattctctgctggatgaaagtcagtgccgatacagccacttttgaaacaccgtaggtcgatcctccccagccgtcttctctgtgtttttctatttcaacagctttgagaaacttcccaattaattgattgagctccggtatcgttaaatcatttctggaaaattctcttctgagattctctgacggaatttttaataaatgcccctcacaactggagacgtttacgacttttgcgttgtttcttaataaaggaaacaaagcctcacaaactctgacagttccaaaataattggtttctatagtttgtgagctttgcgcaaacgtaggatttggagctgctgaccaaaagcaaattgctgcattattaattagtaaatccaaacccccatgttctttttcaataaaattcctaaattcatctacactagtttggctgtcgatgtctagctgatgaaatactgctttcaggttttctttctctaactttgccacagctgatttacctcttgttacatctcgagctgtcaagtaaacaatgccgtcaaatctttcacacagacctttgatagtggcatatccgatgcctttattcccaccagttaacacagccactttttgtggactcatcttgtaattgtgatgaaacaattagttaatcgatgaaaaaaatagagatttttgaagataggtagaga

SEQ ID NO: 905 - DNA, 899 bp, Diabrotica virgifera
gtatgcagcaaagttatttttgattgattttgaaatcctttaaactatatcctaaaatagaaaaggcacaactgagaagctgatatactaaatctaaaacttcaacatgtctaaatcacaagtagctattcccgaaaacaagactgtagctcttggagcaggaaacagggaggaagagatagaagaaacggaagaaaccacactatcagagactcacaaggatcttggccacacacaagtggcagagaagaaagccacttttgacagcaccatcgacaaatcgatagtggaagaccatcgacagcagcaaatccactcaaccaaaaacgtacaacaatcagaaagtgtagaagtatcagcaaacaaaaaggtattcagttctcattttgaatcttctcaaagcttcgagtccgaagagtttgaggagtatgaaattcagggatgaataagaattgtattaggatatattttttaaatatatattgggatctatccacttccatgttgtcactttaacctaaagtgtacgaaatacttacccagaagaaacatatcactaattttttatatagttgggtaattctttctatatttttcgtttcatttttgttttatagttcttaatttactccttaacatgtttatttatatatgttggatgattttcaatttagacattttagtgttattaattaagaaaattcactgccccgtttatgtttagagaatgtagggcaagtttttgctttatgattggaacataataatttaaaaatccagttagtaaaactctccttaccagttgatctaaaggcacgtatccactaggttcgcgaacctcttgcgctccgcgctccctgaactgctccaatggatacggcatgcgctcctctacatat

SEQ ID NO: 906 - DNA, 842 bp, Diabrotica virgifera
gtatgcagcaaagttatttttgattgattttgaaatcctttaaactatatcctaaaatagaaaaggcacaactgagaagctgatatactaaatctaaaacttcaacatgtctaaatcacaagtagctattcccgaaaacaagactgtagctcttggagcaggaaacagggaggaagagatagaagaaacggaagaaaccacactatcagagactcacaaggatcttggccacacacaagtggcagagaagaaagccacttttgacagcaccatcgacaaatcgatagtggaagaccatcgacagcagcaaatccactcaaccaaaaacgtacaacaatcagaaagtgtagaagtatcagcaaacaaaaaggtattcagttctcattttgaatcttctcaaagcttcgagtccgaagagtttgaggagtatgaaattcagggatgaataagaattgtattaggatatattttttaaatatatattgggatctatccacttccatgttgtcactttaacctaaagtgtacgaaatacttacccagaagaaacatatcactaattttttatatagttgggtaattctttctatatttttcgtttcatttttgttttatagttcttaatttactccttaacatgtttatttatatatgttggatgattttcaatttagacattttagtgttattaattaagaaaattcactgccttaacgttatttgaaatactaataggtatgttgaataaggaacttgtaagagaggtggcgaatcccattgactgagatttaaattataaaataattgacaaactgtacttacaatttaattatatgctctat

SEQ ID NO: 907 - DNA, 718 bp, Diabrotica virgifera
catgaaatacataaaatatgcacaatatatctaaattacgtacagttgtatacagtattgtttatttcttagtaaaaaacttggtcaaagtgaaaaaatgtttgttttgtctgatgaaaatcggttcgggttagccggacttccgggttatcggaggccgacttatcggggttccactgtagttattgaagcaaaggaaagaaggtttactatggaaaataaaaccattttgtaaaagtacaagttttctatgaatagttcaaacgatcaaaaacacttgtgacgtcacataactgtattttctactgacgtttataatgtctaatttaaattatatacaattttgtttactttgttggttcagaatgtaaacatatagcccgatgacgtcacgacgcgttttgggctggctgatataatttgaatttttaatcgtctttaggggccaatcgaaaaagaaacaaaacttttttatctttgatacaggttctaaattatgttctgttgtgatttatagcatttttttcgaatttaaaattttatgcaagttccctattgtctggggactttctttttctgatgtctgaagtttatttttgctctttgctaataacggagtttaacatttgacaggaaattacacggtcgtcttctttctagtctaataatattattatatacattattataatacttatacatgtaattctatacataa

SEQ ID NO: 908 - DNA, 701 bp, Diabrotica virgifera
catgaaatacataaaatatgcacaatatatctaaattacgtacagttgtatacagtattgtttatttcttagtaaaaaacttggtcaaagtgaaaaaatgtttgttttgtctgatgaaaatcggttcgggttagccggacttccgggttatcggaggccgacttatcggggttccactgtagttattgaagcaaaggaaagaaggtttactatggaaaataaaaccattttgtaaaagtacaagttttctatgaatagttcaaacgatcaaaaacacttgtgacgtcacataactgtattttctactgacgtttataatgtctaatttaaattatatacaattttgtttactttgttggttcagaatgtaaacatatagcccgatgacgtcacgacgcgttttgggctggctgatataatttgaatttttaatcgtctttaggggccaatcgaaaaagaaacaaaacttttttatctttgatacaggttctaaattatgttctgttgtgatttataacattttttcgaatttaaaaatttatgcaagttccctattgatacaaaaatcattgatcacacaaagatgcaatgatcatttacattatactcgtaaaggcacgtatccactaggttcgcgaacctcttgcgctccgcgctccctgaactgctccaatggatacggcatgcgctcctctacatat

SEQ ID NO: 909 - DNA, 7632 bp, Diabrotica virgifera
  SmartBlast Evalue=1E-130; Info=UDP-glucose 4-epimerase n=1 Tax= Aedes aegypti RepID=Q172F3_AEDAE
taccgctcggttatttaacgaagtaagtaattttgaggtggtgggttacagttgaaaaaatgaagggtaacagcacaattttggtgactggtggtgctggatacgtaggatctcacacagttgttgaactactaaaaaataattataccgtgatagcattagataatttagttaattgctatgctattggatcagagaagccagaagctttgaaaagggttgaaaaaataactggggagactgttacattttataatgtagatatcaaagacagagaagctttggataaaatttttaaagctcatagaatcgacgcggtaatacattttgctgccttgaaggcagttggagagtccgttagtatacctttaaaatattaccacaacaatgttggtggatccgctacactctttgaggttatggctgctaatggtgtcaaaaaggtcgttttttcatcgtcagctactgtttatggtgacccacaattcttgcctattactgaaagccatccaactggacaagggtgtaccaacccttacggaaaatcaaaatatttcgttgaagaggtattgaaggatgtatgcacatcagatccggaatggaaagtaattttgttaagatatttcaatcctgttggtgctcacgaatctggacttattggagaagatccatctggaattcctaacaatcttatgccttatattgcccaggtagccgtaggtcgtcgtgaaaaacttcaagtattcggcaacgactatcaaacaccagacggtacaggagtcagagactacatccacataaccgatctcgccattggccatctgaaagcgctaaaccacatatattcttctagctttaattcgtggaaagcctacaatctcggaacaggtcgaggttactctgtccttgaaatgatcaaggcattcgctgaagcatcaggaaaacaaatcaaatatgatatcgtagaaagaagaggcggagatatagctgagtgctacgctgatgccactctggctaaaatcgaactagggtggcaggccaccagggacgttatggcaatgtgcagggatacgtggaattggcaaaagaaaaatcccaaagggtttcaaacttcttcttgaaaattgatgtttttcgttgtgaagcgtagaaaagatactgcggagttgtagcctttacgaaatacataactgaaagtcgaaaaattaccatgataataaaaaatgttctcgctataatgtactaggttcgttcatatggatgttaaattaacacttgtaacacagtaagtcgaaactaaacacttcttttctgagaaacgcagtgtttaaatacattcaatgagtatgtattatatttttatcgccttttgtagtataactaaatggaaaatggagtacatataataaatagtgtacaatatagcgaagaaattccagacatcatttatatttgccttcatagatcgtatccagctgtactactactatcgttgtgtacgcgtgcgatcttgacatatagtcgctttaaggtggtggtactcatagtcaacacatttccaatttggaactaaaatatattcgcatatcctctaaaaaaaaatgccccatctagtactgtaagtaactcaaatgttataataaaatctctaagtctaacttgttcagttctgaaaaatcgtgcactcttaagtttaacaaattatcttcacaatttcaggtccaacttattttatcagcaaaaaacgtgcattgcttcatggtagctaattttggtctagtagctaattttggttttggtctagggaactagatgttgtataattttacttttattgagtgtccattacaatggacaatgggaaaaagtctagtttaacatccgtatgaatctagtcttaagcgtaattaaattgatatcgaaggttattgaaaacggaatcagtagcacaattgtaaggcaacgcagattatttttttttaacagcaatttcatttcaaataactcagagaacaattataattctttccattattagaaaaattatataaattttttaatatacagcagatgtcggttatgttaaggttttgcctcgcaaaacacgtaaacacagaaataacattttgtttactaaatgttgtataattttcgttttatatgagtgtccattacaatggacaatgggaaagagtctagtttaacatccgtatgaatctagtcttaagcgtaattaaattgatatcgaaggttattgaaaacggaatctgtagcacaattataaggcagcgcagattatttttttgagcagcaatttcatttcaagtaactcagagaacaattataattctttccattattagaaaaattatataatttttttttaatatagagcaaatgccaattattttgaggttttgcctcgcaggttttaagagcaaccatttttaaggcattggttaagtaaatcgagacaaaaaaacagtaccaggtgcacgttaatctgaacataattttaaacttcatagatgataaacataaaggttaattaaccaaagaaagcaacaatattacaccttactgttatgaaaacttttacgcacgtttttcttgttaagatgaatataaaggagaaatgtatttgatcagtgcgtcctcccagtcttgacgtacggatcagaaacacttaccttaactaaagcctcgactaccaaactaagagtcacgcagagaaaaatggagcggtcaatgttaggaataactctgcgagacaaaatcagaaacgaagaaatcaggagaagaacaaaggtgactgacgtcatcgaaaggatagccaggttgaagtggagatgggcaggacacatagccagaatgacagatgggcgatggacaaagagattattagaatggagtccaagagaagacaaagagaagcgtcggtcgaccgcctacaagatggactgacgactttagaaagctaaataaaaactggatgagagcggcgcaggatagatggggttggaaacgaggggaggaggcaggaggcatatgttcagcagtggacttttgaggctggatgaagaaaggagaagcttatcagttcttttgttgattgagacgtttgactttcttgactgggtttatttactgaggcgaatacgcttctaaatcagttatttagtattcatcaacacaaaactgttacaatgctaacactactcgccccagaatgatttatttggtgtcgagttgccagatgcgattttctaaatcccccacttttatactaaaattccccaaatttaaatttttgccacattttaatagctttgttcgcggagacagtccatgactggtttctgactgatgcgcatgcgcagttccgttttcaagcgcttaaaaacggaattgcgcatgcgaatcagtcgggggccagtcgtggactgtctccccaaacaaagctaatgaattagtagcagtagtactacgagcatgtactacacggtagtacccaaatgcagagaacagaaaaccaaaattatactacttatcaacagagggcgctgaaataattcataggttttatcgtcttcgattatatgacagtagaatatacagttcttttcttctttctatgtatattcacaaatttaatttaccatgaccgttaaaattctccataattcttcccccaaaaaatccctcaaacatttttgcttataaaaattcccccagacgcattcaaattaccccaaaaatcgggggaaataccctaatctggcaactcatgtccaacttccaatcgtatgactggtgggagaagtctggtgactatagacaaaagtacgtcatttgcgcaacctcattatagtcggcatttgcagttaccttctgtgatatattttcagttatgtatttctagaagtacattatatgtgtcatttctacgtcacaacatttgaaaaattactacttaagcattatctactttatacaaatataaattatatgttatacaaaataggaatgtgatatacgtttatttaaatttactgtttagttttgcagagtattagaccatgtctcatgagtaattgcttgatgtgttagaaacggttattataacatttaatttaaaggcacttatcaaaagtaattgcctctattgtttatttcaaactagtggccttttgagcgatattaggttcatattaagtggttcaaaaattcttggatgctcgtgaaggtcatccagtatccggtatttcaaagaagcacgtggagaaaattgcagatagaatgatattccattctattggcaatttatctacatatactccttttgaaataccgcagatttttattttctctataactaaattattgtccttctcatcattcatgttaaggcaaaaaagaactacccctctttgtttagccaattttaaccaacatatttttcagtctttaacgcaacagttttttatggcaaagtctgtttccccaacgttaaaaacgtcattagcttaataatccttatgtgtaattgattaaattttaattaaattttcaatctatagcgcttcgtccacgtcaacatgatcaccagaacatctcccatttcatattatgtggtatattttcttaccatagaacctttcccttgaatccacataagttctatagggtttagttagcatatttcctttgttttgccacttcgtcaataacgtattgtacaaagtaacatttgtgtacattcacaattgctatttttttttttttcattatgtcatcttagaaaatttcttctcagaaatctactgaattatttgtgtttttttttttcaagcagttgtggacgagtttccagatcttgaatggtacggagtctgctgtaattagctctataatttgctcaaagtattcctaaaaaatcagcactcacatctttgtgtcaatcacgaatttctgttaagcctttactcaagcaacttgatataaaaaaaacaagacgaaccatttactatttgccacataatagggaacttgcacatttttttattacataataatgttcagttttgtataaaaatgagatttccaaaatttcacgcttcaaaaaactcatagtaacttagaagtacaaatttaaagtcttctttatcttaaaatggttcaaacgacccgtgacgtcacagagtttaactaaggtttaactatgtggttcagtttatggttatatttacgtatattcttcttctttagtttattggcctccacctacttgggtatttggccagctcgtcgtcggggaaaaaaggaaaaatatttatattctaatgacatttatcgtacgtcgttgtaataatatataccagtttgttgagattggagtttgatacagtttttgaaggaaaggaaagaaggtttactattgaaaataaaaccattttgtaaaagtacaaattttctatgaatagttcaaacgatcaaaaacacttttaacgtcacataactgtattttttactgacgtttataatgtctaatttaaaattatatatacaattggtgtagaatgtaaacatacaacccgtgacgtcacgacgcgttttggggtggctggtataagttgaatttttagtagtctttaggggccaaacgaaagacaaacaaaacttttttatctttgatacaggttctaaattatgttctgttgtgatttataccatttttttcgaatttaaaattgtatgcaagttccctattagaaatgaacaacagatttagatagggttaaaattatcttgaacacattgagctaaactgcatatcaaagcaaaggaatattccaaatcaacaaatgttttttgtagtaattaaattttagttgttttcaaattttggattagaaaatgaaagtgattttcagaatttttgtttagatttaccaattatgtacatgcaatgttaaataatgcagtttccctattgcgtttgttccccacattccgaactttgtgttttacttattgttttaagtatatctatatttgcagcggacacaccttttcaaattatgaaagaaatacatattttacttttatctgattttaatcaaaatatattttcatgttccttgttatgtcccactggatgacatttatgaatagttcatttaattctgtataaaaatacttctagttggcaatcatcatggaaagagtttatcatttttctcgatctgcagcagttctttactgttgttttcactccattgctttaaattattcaaccaggacatgcttcgtctccccgtagtcttttccttccaccttctcttcttattcctaaacgatcataaaacggcatctcatgtttttaatgacacaaatgttatcgatctcaaaacttacctacctactcttcagtcgtagtgtagactttgaatggagtcagttttaaaaagaaaatgcaaaagtactccaactatgtactacattttgactactagtcaaaaaccagagtaataatttttgtgttaaaaactctttcctcaaagcatgaacatgtttacctgtgaatattgttaactgcacaacggaattcataagtcctatgatctcctgtacgttattgttgctcataaaaacatgttctctgtatgtcccatatgttatgtcttatacaatatgttcagttttcgattagatataagcgactgtaagaagtgctaaattcggcaacattggttaatccactatcgttgtttaatcgccgaatgacggcgaaagacgtgtgcgctttgttaccatttatagaccgtatatctaatatgaaactaaacatgctgtatgtacaccacttccgagttccgaggcagaatgaattaaaactatgatgttaacaacattagattgttttaaatttaaacttaccattaattacgttacaaatacaactagttcataaaagttgtccagagaggaaccagtgttaaaagtactattatctagctatttatactatttattgttgtaacatatcctgtgtgtatatacaatcgacatttttaacttatcgcctatcatgaaattgatttttaaaacttggagttttttcactgatataatatattcaaaatggtttaagctgaaattagatgtgtgcttgactattttatgacgattaatatacttaatctagtaaaatctactttaatatggtgctcttgatgatatacttatgatgtactcttattttacctggtttattgcaaacttaaaaatatccgtgattttttttggttttccatagattattcgtataaagcttaaatgtggcaacaaagcacaagtactatttgtataacttattcttccttgcaatatgaattaatttaacaattttacgatgacagtcgtcagtaagatatctaaaataagcttatttctgacttataattaaaagtagatttttagtaaatctaataaatattactcaggtttaaatcattttgaaaggaaaattcttcgactttgatctaataaatgttaactttgtaaatgatatttaaaaaataatgtagacacattttaaaaaatgtctggcgtacaaagtatacaaatata

SEQ ID NO: 910 - DNA, 6532 bp, Diabrotica virgifera
  SmartBlast Evalue=1E-130; Info=UDP-glucose 4-epimerase n=1 Tax= Aedes aegypti RepID=Q172F3_AEDAE
taccgctcggttatttaacgaagtaagtaattttgaggtggtgggttacagttgaaaaaatgaagggtaacagcacaattttggtgactggtggtgctggatacgtaggatctcacacagttgttgaactactaaaaaataattataccgtgatagcattagataatttagttaattgctatgctattggatcagagaagccagaagctttgaaaagggttgaaaaaataactggggagactgttacattttataatgtagatatcaaagacagagaagctttggataaaatttttaaagctcatagaatcgacgcggtaatacattttgctgccttgaaggcagttggagagtccgttagtatacctttaaaatattaccacaacaatgttggtggatccgctacactctttgaggttatggctgctaatggtgtcaaaaaggtcgttttttcatcgtcagctactgtttatggtgacccacaattcttgcctattactgaaagccatccaactggacaagggtgtaccaacccttacggaaaatcaaaatatttcgttgaagaggtattgaaggatgtatgcacatcagatccggaatggaaagtaattttgttaagatatttcaatcctgttggtgctcacgaatctggacttattggagaagatccatctggaattcctaacaatcttatgccttatattgcccaggtagccgtaggtcgtcgtgaaaaacttcaagtattcggcaacgactatcaaacaccagacggtacaggagtcagagactacatccacataaccgatctcgccattggccatctgaaagcgctaaaccacatatattcttctagctttaattcgtggaaagcctacaatctcggaacaggtcgaggttactctgtccttgaaatgatcaaggcattcgctgaagcatcaggaaaacaaatcaaatatgatatcgtagaaagaagaggcggagatatagctgagtgctacgctgatgccactctggctaaaatcgaactagggtggcaggccaccagggacgttatggcaatgtgcagggatacgtggaattggcaaaagaaaaatcccaaagggtttcaaacttcttcttgaaaattgatgtttttcgttgtgaagcgtagaaaagatactgcggagttgtagcctttacgaaatacataactgaaagtcgaaaaattaccatgataataaaaaatgttctcgctataatgtactaggttcgttcatatggatgttaaattaacacttgtaacacagtaagtcgaaactaaacacttcttttctgagaaacgcagtgtttaaatacattcaatgagtatgtattatatttttatcgccttttgtagtataactaaatggaaaatggagtacatataataaatagtgtacaatatagcgaagaaattccagacatcatttatatttgccttcatagatcgtatccagctgtactactactatcgttgtgtacgcgtgcgatcttgacatatagtcgctttaaggtggtggtactcatagtcaacacatttccaatttggaactaaaatatattcgcatatcctctaaaaaaaaatgccccatctagtactgtaagtaactcaaatgttataataaaatctctaagtctaacttgttcagttctgaaaaatcgtgcactcttaagtttaacaaattatcttcacaatttcaggtccaacttattttatcagcaaaaaacgtgcattgcttcatggtagctaattttggtctagtagctaattttggttttggtctagggaactagatgttgtataattttacttttattgagtgtccattacaatggacaatgggaaaaagtctagtttaacatccgtatgaatctagtcttaagcgtaattaaattgatatcgaaggttattgaaaacggaatcagtagcacaattgtaaggcaacgcagattatttttttttaacagcaatttcatttcaaataactcagagaacaattataattctttccattattagaaaaattatataaattttttaatatacagcagatgtcggttatgttaaggttttgcctcgcaaaacacgtaaacacagaaataacattttgtttactaaatgttgtataattttcgttttatatgagtgtccattacaatggacaatgggaaagagtctagtttaacatccgtatgaatctagtcttaagcgtaattaaattgatatcgaaggttattgaaaacggaatctgtagcacaattataaggcagcgcagattatttttttgagcagcaatttcatttcaagtaactcagagaacaattataattctttccattattagaaaaattatataatttttttttaatatagagcaaatgccaattattttgaggttttgcctcgcaggttttaagagcaaccatttttaaggcattggttaagtaaatcgagacaaaaaaacagtaccaggtgcacgttaatctgaacataattttaaacttcatagatgataaacataaaggttaattaaccaaagaaagcaacaatattacaccttactgttatgaaaacttttacgcacgtttttcttgttaagatgaatataaaggagaaatgtatttgatcagtgcgtcctcccagtcttgacgtacggatcagaaacacttaccttaactaaagcctcgactaccaaactaagagtcacgcagagaaaaatggagcggtcaatgttaggaataactctgcgagacaaaatcagaaacgaagaaatcaggagaagaacaaaggtgactgacgtcatcgaaaggatagccaggttgaagtggagatgggcaggacacatagccagaatgacagatgggcgatggacaaagagattattagaatggagtccaagagaagacaaagagaagcgtcggtcgaccgcctacaagatggactgacgactttagaaagctaaataaaaactggatgagagcggcgcaggatagatggggttggaaacgaggggaggaggcaggaggcatatgttcagcagtggacttttgaggctggatgaagaaaggagaagcttatcagttcttttgttgattgagacgtttgactttcttgactgggtttatttactgaggcgaatacgcttctaaatcagttatttagtattcatcaacacaaaactgttacaatgctaacactactcgccccagaatgatttatttggtgtcgagttgccagatgcgattttctaaatcccccacttttatactaaaattccccaaatttaaatttttgccacattttaatagctttgttcgcggagacagtccatgactggtttctgactgatgcgcatgcgcagttccgttttcaagcgcttaaaaacggaattgcgcatgcgaatcagtcgggggccagtcgtggactgtctccccaaacaaagctaatgaattagtagcagtagtactacgagcatgtactacacggtagtacccaaatgcagagaacagaaaaccaaaattatactacttatcaacagagggcgctgaaataattcataggttttatcgtcttcgattatatgacagtagaatatacagttcttttcttctttctatgtatattcacaaatttaatttaccatgaccgttaaaattctccataattcttcccccaaaaaatccctcaaacatttttgcttataaaaattcccccagacgcattcaaattaccccaaaaatcgggggaaataccctaatctggcaactcatgtccaacttccaatcgtatgactggtgggagaagtctggtgactatagacaaaagtacgtcatttgcgcaacctcattatagtcggcatttgcagttaccttctgtgatatattttcagttatgtatttctagaagtacattatatgtgtcatttctacgtcacaacatttgaaaaattactacttaagcattatctactttatacaaatataaattatatgttatacaaaataggaatgtgatatacgtttatttaaatttactgtttagttttgcagagtattagaccatgtctcatgagtaattgcttgatgtgttagaaacggttattataacatttaatttaaaggcacttatcaaaagtaattgcctctattgtttatttcaaactagtggccttttgagcgatattaggttcatattaagtggttcaaaaattcttggatgctcgtgaaggtcatccagtatccggtatttcaaagaagcacgtggagaaaattgcagatagaatgatattccattctattggcaatttatctacatatactccttttgaaataccgcagatttttattttctctataactaaattattgtccttctcatcattcatgttaaggcaaaaaagaactacccctctttgtttagccaattttaaccaacatatttttcagtctttaacgcaacagttttttatggcaaagtctgtttccccaacgttaaaaacgtcattagcttaataatccttatgtgtaattgattaaattttaattaaattttcaatctatagcgcttcgtccacgtcaacatgatcaccagaacatctcccatttcatattatgtggtatattttcttaccatagaacctttcccttgaatccacataagttctatagggtttagttagcatatttcctttgttttgccacttcgtcaataacgtattgtacaaagtaacatttgtgtacattcacaattgctatttttttttttttcattatgtcatcttagaaaatttcttctcagaaatctactgaattatttgtgtttttttttttcaagcagttgtggacgagtttccagatcttgaatggtacggagtctgctgtaattagctctataatttgctcaaagtattcctaaaaaatcagcactcacatctttgtgtcaatcacgaatttctgttaagcctttactcaagcaacttgatataaaaaaaacaagacgaaccatttactatttgccacataatagggaacttgcacatttttttattacataataatgttcagttttgtataaaaatgagatttccaaaatttcacgcttcaaaaaactcatagtaacttagaagtacaaatttaaagtcttctttatcttaaaatggttcaaacgacccgtgacgtcacagagtttaactaaggtttaactatgtggttcagtttatggttatatttacgtatattcttcttctttagtttattggcctccacctacttgggtatttggccagctcgtcgtcggggaaaaaaggaaaaatatttatattctaatgacatttatcgtacgtcgttgtaataatatataccagtttgttgagattggagtttgatacagtttttgaaggaaaggaaagaaggtttactattgaaaataaaaccattttgtaaaagtacaaattttctatgaatagttcaaacgatcaaaaacacttttaacgtcacataactgtattttttactgacgtttataatgtctaatttaaaattatatatacaattggtgtagaatgtaaacatacaacccgtgacgtcacgacgcgttttggggtggctggtataagttgaatttttagtagtctttaggggccaaacgaaagacaaacaaaacttttttatctttgatacaggttctaaattatgttctgttgtgatttatagcatttttttcgaatttaaaattttatgcaagttccctattgtcaactttctgttaatattcagtttcaatacattttctggcgttctaaacgtcactagacataaaaataaacattgcaaccaatgaagggtccaggcacgtttaggactgtaatagctcaatgttcctatgtgtctagtagggtggcggttactgtatatgatacttacttgagaaacttcccaattaattgattgagctccggtatcgttaaatcatttctggaaaattctcttctgagattctctgacggaatttttaataaatgcccctcacaactggagacgtttacgacttttgcgttgtttcttaataaaggaaacaaagcctcacaaactctgacagttccaaaataattggtttctatagtttgtgagctttgcgcaaacgtaggatttggagctgctgaccaaaagcaaattgctgcattattaattagtaaatccaaacccccatgttctttttcaataaaattcctaaattcatctacactagtttggctgtcgatgtctagctgatgaaatactgctttcaggttttctttctctaactttgccacagctgatttacctcttgttacatctcgagctgtcaagtaaacaatgccgtcaaatctttcacacagacctttgatagtggcatatccgatgcctttattcccaccagttaacacagccactttttgtggactcatcttgtaattgtgatgaaacaattagttaatcgatgaaaaaaatagagatttttgaagataggtagaga

SEQ ID NO: 911 - DNA, 5931 bp, Diabrotica virgifera
  SmartBlast Evalue=1E-130; Info=UDP-glucose 4-epimerase n=1 Tax= Aedes aegypti RepID=Q172F3_AEDAE
taccgctcggttatttaacgaagtaagtaattttgaggtggtgggttacagttgaaaaaatgaagggtaacagcacaattttggtgactggtggtgctggatacgtaggatctcacacagttgttgaactactaaaaaataattataccgtgatagcattagataatttagttaattgctatgctattggatcagagaagccagaagctttgaaaagggttgaaaaaataactggggagactgttacattttataatgtagatatcaaagacagagaagctttggataaaatttttaaagctcatagaatcgacgcggtaatacattttgctgccttgaaggcagttggagagtccgttagtatacctttaaaatattaccacaacaatgttggtggatccgctacactctttgaggttatggctgctaatggtgtcaaaaaggtcgttttttcatcgtcagctactgtttatggtgacccacaattcttgcctattactgaaagccatccaactggacaagggtgtaccaacccttacggaaaatcaaaatatttcgttgaagaggtattgaaggatgtatgcacatcagatccggaatggaaagtaattttgttaagatatttcaatcctgttggtgctcacgaatctggacttattggagaagatccatctggaattcctaacaatcttatgccttatattgcccaggtagccgtaggtcgtcgtgaaaaacttcaagtattcggcaacgactatcaaacaccagacggtacaggagtcagagactacatccacataaccgatctcgccattggccatctgaaagcgctaaaccacatatattcttctagctttaattcgtggaaagcctacaatctcggaacaggtcgaggttactctgtccttgaaatgatcaaggcattcgctgaagcatcaggaaaacaaatcaaatatgatatcgtagaaagaagaggcggagatatagctgagtgctacgctgatgccactctggctaaaatcgaactagggtggcaggccaccagggacgttatggcaatgtgcagggatacgtggaattggcaaaagaaaaatcccaaagggtttcaaacttcttcttgaaaattgatgtttttcgttgtgaagcgtagaaaagatactgcggagttgtagcctttacgaaatacataactgaaagtcgaaaaattaccatgataataaaaaatgttctcgctataatgtactaggttcgttcatatggatgttaaattaacacttgtaacacagtaagtcgaaactaaacacttcttttctgagaaacgcagtgtttaaatacattcaatgagtatgtattatatttttatcgccttttgtagtataactaaatggaaaatggagtacatataataaatagtgtacaatatagcgaagaaattccagacatcatttatatttgccttcatagatcgtatccagctgtactactactatcgttgtgtacgcgtgcgatcttgacatatagtcgctttaaggtggtggtactcatagtcaacacatttccaatttggaactaaaatatattcgcatatcctctaaaaaaaaatgccccatctagtactgtaagtaactcaaatgttataataaaatctctaagtctaacttgttcagttctgaaaaatcgtgcactcttaagtttaacaaattatcttcacaatttcaggtccaacttattttatcagcaaaaaacgtgcattgcttcatggtagctaattttggtctagtagctaattttggttttggtctagggaactagatgttgtataattttacttttattgagtgtccattacaatggacaatgggaaaaagtctagtttaacatccgtatgaatctagtcttaagcgtaattaaattgatatcgaaggttattgaaaacggaatcagtagcacaattgtaaggcaacgcagattatttttttttaacagcaatttcatttcaaataactcagagaacaattataattctttccattattagaaaaattatataaattttttaatatacagcagatgtcggttatgttaaggttttgcctcgcaaaacacgtaaacacagaaataacattttgtttactaaatgttgtataattttcgttttatatgagtgtccattacaatggacaatgggaaagagtctagtttaacatccgtatgaatctagtcttaagcgtaattaaattgatatcgaaggttattgaaaacggaatctgtagcacaattataaggcagcgcagattatttttttgagcagcaatttcatttcaagtaactcagagaacaattataattctttccattattagaaaaattatataatttttttttaatatagagcaaatgccaattattttgaggttttgcctcgcaggttttaagagcaaccatttttaaggcattggttaagtaaatcgagacaaaaaaacagtaccaggtgcacgttaatctgaacataattttaaacttcatagatgataaacataaaggttaattaaccaaagaaagcaacaatattacaccttactgttatgaaaacttttacgcacgtttttcttgttaagatgaatataaaggagaaatgtatttgatcagtgcgtcctcccagtcttgacgtacggatcagaaacacttaccttaactaaagcctcgactaccaaactaagagtcacgcagagaaaaatggagcggtcaatgttaggaataactctgcgagacaaaatcagaaacgaagaaatcaggagaagaacaaaggtgactgacgtcatcgaaaggatagccaggttgaagtggagatgggcaggacacatagccagaatgacagatgggcgatggacaaagagattattagaatggagtccaagagaagacaaagagaagcgtcggtcgaccgcctacaagatggactgacgactttagaaagctaaataaaaactggatgagagcggcgcaggatagatggggttggaaacgaggggaggaggcaggaggcatatgttcagcagtggacttttgaggctggatgaagaaaggagaagcttatcagttcttttgttgattgagacgtttgactttcttgactgggtttatttactgaggcgaatacgcttctaaatcagttatttagtattcatcaacacaaaactgttacaatgctaacactactcgccccagaatgatttatttggtgtcgagttgccagatgcgattttctaaatcccccacttttatactaaaattccccaaatttaaatttttgccacattttaatagctttgttcgcggagacagtccatgactggtttctgactgatgcgcatgcgcagttccgttttcaagcgcttaaaaacggaattgcgcatgcgaatcagtcgggggccagtcgtggactgtctccccaaacaaagctaatgaattagtagcagtagtactacgagcatgtactacacggtagtacccaaatgcagagaacagaaaaccaaaattatactacttatcaacagagggcgctgaaataattcataggttttatcgtcttcgattatatgacagtagaatatacagttcttttcttctttctatgtatattcacaaatttaatttaccatgaccgttaaaattctccataattcttcccccaaaaaatccctcaaacatttttgcttataaaaattcccccagacgcattcaaattaccccaaaaatcgggggaaataccctaatctggcaactcatgtccaacttccaatcgtatgactggtgggagaagtctggtgactatagacaaaagtacgtcatttgcgcaacctcattatagtcggcatttgcagttaccttctgtgatatattttcagttatgtatttctagaagtacattatatgtgtcatttctacgtcacaacatttgaaaaattactacttaagcattatctactttatacaaatataaattatatgttatacaaaataggaatgtgatatacgtttatttaaatttactgtttagttttgcagagtattagaccatgtctcatgagtaattgcttgatgtgttagaaacggttattataacatttaatttaaaggcacttatcaaaagtaattgcctctattgtttatttcaaactagtggccttttgagcgatattaggttcatattaagtggttcaaaaattcttggatgctcgtgaaggtcatccagtatccggtatttcaaagaagcacgtggagaaaattgcagatagaatgatattccattctattggcaatttatctacatatactccttttgaaataccgcagatttttattttctctataactaaattattgtccttctcatcattcatgttaaggcaaaaaagaactacccctctttgtttagccaattttaaccaacatatttttcagtctttaacgcaacagttttttatggcaaagtctgtttccccaacgttaaaaacgtcattagcttaataatccttatgtgtaattgattaaattttaattaaattttcaatctatagcgcttcgtccacgtcaacatgatcaccagaacatctcccatttcatattatgtggtatattttcttaccatagaacctttcccttgaatccacataagttctatagggtttagttagcatatttcctttgttttgccacttcgtcaataacgtattgtacaaagtaacatttgtgtacattcacaattgctatttttttttttttcattatgtcatcttagaaaatttcttctcagaaatctactgaattatttgtgtttttttttttcaagcagttgtggacgagtttccagatcttgaatggtacggagtctgctgtaattagctctataatttgctcaaagtattcctaaaaaatcagcactcacatctttgtgtcaatcacgaatttctgttaagcctttactcaagcaacttgatataaaaaaaacaagacgaaccatttactatttgccacataatagggaacttgcacatttttttattacataataatgttcagttttgtataaaaatgagatttccaaaatttcacgcttcaaaaaactcatagtaacttagaagtacaaatttaaagtcttctttatcttaaaatggttcaaacgacccgtgacgtcacagagtttaactaaggtttaactatgtggttcagtttatggttatatttacgtatattcttcttctttagtttattggcctccacctacttgggtatttggccagctcgtcgtcggggaaaaaaggaaaaatatttatattctaatgacatttatcgtacgtcgttgtaataatatataccagtttgttgagattggagtttgatacagtttttgaaggaaaggaaagaaggtttactattgaaaataaaaccattttgtaaaagtacaaattttctatgaatagttcaaacgatcaaaaacacttttaacgtcacataactgtattttttactgacgtttataatgtctaatttaaaattatatatacaattggtgtagaatgtaaacatacaacccgtgacgtcacgacgcgttttggggtggctggtataagttgaatttttagtagtctttaggggccaaacgaaagacaaacaaaacttttttatctttgatacaggttctaaattatgttctgttgtgatttatagcatttttttcgaatttaaaattttatgcaagttccctattgtctggggactttctttttctgatgtctgaagtttatttttgctctttgctaataacggagtttaacatttgacaggaaattacacggtcgtcttctttctagtctaataatattattatatacattattataatacttatacatgtaattctatacataa

SEQ ID NO: 912 - DNA, 5914 bp, Diabrotica virgifera
  SmartBlast Evalue=1E-130; Info=UDP-glucose 4-epimerase n=1 Tax= Aedes aegypti RepID=Q172F3_AEDAE
taccgctcggttatttaacgaagtaagtaattttgaggtggtgggttacagttgaaaaaatgaagggtaacagcacaattttggtgactggtggtgctggatacgtaggatctcacacagttgttgaactactaaaaaataattataccgtgatagcattagataatttagttaattgctatgctattggatcagagaagccagaagctttgaaaagggttgaaaaaataactggggagactgttacattttataatgtagatatcaaagacagagaagctttggataaaatttttaaagctcatagaatcgacgcggtaatacattttgctgccttgaaggcagttggagagtccgttagtatacctttaaaatattaccacaacaatgttggtggatccgctacactctttgaggttatggctgctaatggtgtcaaaaaggtcgttttttcatcgtcagctactgtttatggtgacccacaattcttgcctattactgaaagccatccaactggacaagggtgtaccaacccttacggaaaatcaaaatatttcgttgaagaggtattgaaggatgtatgcacatcagatccggaatggaaagtaattttgttaagatatttcaatcctgttggtgctcacgaatctggacttattggagaagatccatctggaattcctaacaatcttatgccttatattgcccaggtagccgtaggtcgtcgtgaaaaacttcaagtattcggcaacgactatcaaacaccagacggtacaggagtcagagactacatccacataaccgatctcgccattggccatctgaaagcgctaaaccacatatattcttctagctttaattcgtggaaagcctacaatctcggaacaggtcgaggttactctgtccttgaaatgatcaaggcattcgctgaagcatcaggaaaacaaatcaaatatgatatcgtagaaagaagaggcggagatatagctgagtgctacgctgatgccactctggctaaaatcgaactagggtggcaggccaccagggacgttatggcaatgtgcagggatacgtggaattggcaaaagaaaaatcccaaagggtttcaaacttcttcttgaaaattgatgtttttcgttgtgaagcgtagaaaagatactgcggagttgtagcctttacgaaatacataactgaaagtcgaaaaattaccatgataataaaaaatgttctcgctataatgtactaggttcgttcatatggatgttaaattaacacttgtaacacagtaagtcgaaactaaacacttcttttctgagaaacgcagtgtttaaatacattcaatgagtatgtattatatttttatcgccttttgtagtataactaaatggaaaatggagtacatataataaatagtgtacaatatagcgaagaaattccagacatcatttatatttgccttcatagatcgtatccagctgtactactactatcgttgtgtacgcgtgcgatcttgacatatagtcgctttaaggtggtggtactcatagtcaacacatttccaatttggaactaaaatatattcgcatatcctctaaaaaaaaatgccccatctagtactgtaagtaactcaaatgttataataaaatctctaagtctaacttgttcagttctgaaaaatcgtgcactcttaagtttaacaaattatcttcacaatttcaggtccaacttattttatcagcaaaaaacgtgcattgcttcatggtagctaattttggtctagtagctaattttggttttggtctagggaactagatgttgtataattttacttttattgagtgtccattacaatggacaatgggaaaaagtctagtttaacatccgtatgaatctagtcttaagcgtaattaaattgatatcgaaggttattgaaaacggaatcagtagcacaattgtaaggcaacgcagattatttttttttaacagcaatttcatttcaaataactcagagaacaattataattctttccattattagaaaaattatataaattttttaatatacagcagatgtcggttatgttaaggttttgcctcgcaaaacacgtaaacacagaaataacattttgtttactaaatgttgtataattttcgttttatatgagtgtccattacaatggacaatgggaaagagtctagtttaacatccgtatgaatctagtcttaagcgtaattaaattgatatcgaaggttattgaaaacggaatctgtagcacaattataaggcagcgcagattatttttttgagcagcaatttcatttcaagtaactcagagaacaattataattctttccattattagaaaaattatataatttttttttaatatagagcaaatgccaattattttgaggttttgcctcgcaggttttaagagcaaccatttttaaggcattggttaagtaaatcgagacaaaaaaacagtaccaggtgcacgttaatctgaacataattttaaacttcatagatgataaacataaaggttaattaaccaaagaaagcaacaatattacaccttactgttatgaaaacttttacgcacgtttttcttgttaagatgaatataaaggagaaatgtatttgatcagtgcgtcctcccagtcttgacgtacggatcagaaacacttaccttaactaaagcctcgactaccaaactaagagtcacgcagagaaaaatggagcggtcaatgttaggaataactctgcgagacaaaatcagaaacgaagaaatcaggagaagaacaaaggtgactgacgtcatcgaaaggatagccaggttgaagtggagatgggcaggacacatagccagaatgacagatgggcgatggacaaagagattattagaatggagtccaagagaagacaaagagaagcgtcggtcgaccgcctacaagatggactgacgactttagaaagctaaataaaaactggatgagagcggcgcaggatagatggggttggaaacgaggggaggaggcaggaggcatatgttcagcagtggacttttgaggctggatgaagaaaggagaagcttatcagttcttttgttgattgagacgtttgactttcttgactgggtttatttactgaggcgaatacgcttctaaatcagttatttagtattcatcaacacaaaactgttacaatgctaacactactcgccccagaatgatttatttggtgtcgagttgccagatgcgattttctaaatcccccacttttatactaaaattccccaaatttaaatttttgccacattttaatagctttgttcgcggagacagtccatgactggtttctgactgatgcgcatgcgcagttccgttttcaagcgcttaaaaacggaattgcgcatgcgaatcagtcgggggccagtcgtggactgtctccccaaacaaagctaatgaattagtagcagtagtactacgagcatgtactacacggtagtacccaaatgcagagaacagaaaaccaaaattatactacttatcaacagagggcgctgaaataattcataggttttatcgtcttcgattatatgacagtagaatatacagttcttttcttctttctatgtatattcacaaatttaatttaccatgaccgttaaaattctccataattcttcccccaaaaaatccctcaaacatttttgcttataaaaattcccccagacgcattcaaattaccccaaaaatcgggggaaataccctaatctggcaactcatgtccaacttccaatcgtatgactggtgggagaagtctggtgactatagacaaaagtacgtcatttgcgcaacctcattatagtcggcatttgcagttaccttctgtgatatattttcagttatgtatttctagaagtacattatatgtgtcatttctacgtcacaacatttgaaaaattactacttaagcattatctactttatacaaatataaattatatgttatacaaaataggaatgtgatatacgtttatttaaatttactgtttagttttgcagagtattagaccatgtctcatgagtaattgcttgatgtgttagaaacggttattataacatttaatttaaaggcacttatcaaaagtaattgcctctattgtttatttcaaactagtggccttttgagcgatattaggttcatattaagtggttcaaaaattcttggatgctcgtgaaggtcatccagtatccggtatttcaaagaagcacgtggagaaaattgcagatagaatgatattccattctattggcaatttatctacatatactccttttgaaataccgcagatttttattttctctataactaaattattgtccttctcatcattcatgttaaggcaaaaaagaactacccctctttgtttagccaattttaaccaacatatttttcagtctttaacgcaacagttttttatggcaaagtctgtttccccaacgttaaaaacgtcattagcttaataatccttatgtgtaattgattaaattttaattaaattttcaatctatagcgcttcgtccacgtcaacatgatcaccagaacatctcccatttcatattatgtggtatattttcttaccatagaacctttcccttgaatccacataagttctatagggtttagttagcatatttcctttgttttgccacttcgtcaataacgtattgtacaaagtaacatttgtgtacattcacaattgctatttttttttttttcattatgtcatcttagaaaatttcttctcagaaatctactgaattatttgtgtttttttttttcaagcagttgtggacgagtttccagatcttgaatggtacggagtctgctgtaattagctctataatttgctcaaagtattcctaaaaaatcagcactcacatctttgtgtcaatcacgaatttctgttaagcctttactcaagcaacttgatataaaaaaaacaagacgaaccatttactatttgccacataatagggaacttgcacatttttttattacataataatgttcagttttgtataaaaatgagatttccaaaatttcacgcttcaaaaaactcatagtaacttagaagtacaaatttaaagtcttctttatcttaaaatggttcaaacgacccgtgacgtcacagagtttaactaaggtttaactatgtggttcagtttatggttatatttacgtatattcttcttctttagtttattggcctccacctacttgggtatttggccagctcgtcgtcggggaaaaaaggaaaaatatttatattctaatgacatttatcgtacgtcgttgtaataatatataccagtttgttgagattggagtttgatacagtttttgaaggaaaggaaagaaggtttactattgaaaataaaaccattttgtaaaagtacaaattttctatgaatagttcaaacgatcaaaaacacttttaacgtcacataactgtattttttactgacgtttataatgtctaatttaaaattatatatacaattggtgtagaatgtaaacatacaacccgtgacgtcacgacgcgttttggggtggctggtataagttgaatttttagtagtctttaggggccaaacgaaagacaaacaaaacttttttatctttgatacaggttctaaattatgttctgttgtgatttataacattttttcgaatttaaaaatttatgcaagttccctattgatacaaaaatcattgatcacacaaagatgcaatgatcatttacattatactcgtaaaggcacgtatccactaggttcgcgaacctcttgcgctccgcgctccctgaactgctccaatggatacggcatgcgctcctctacatat

SEQ ID NO: 913 - DNA, 3532 bp, Diabrotica virgifera
ataggtacgttatattaaaataatatacgtatttaaaattgaataaatgaattatattgcttacatagattatgttatattcaaataataattaatatatttgtatttatatcagcaaagcatatgttatttacgattgattttgacacatctgtcaatgtcaaaataaattttaaattattcatagctattaataaaatataaatgacatttgttagtaaatttaattagtatataaaataaataataaatttaaaaatacaatttgagtattttgaaaaaaataattatttagtaacgactttaaaaaggtttgtacacttttgtctaacgggcacccctttaacggaagtacctaataataatggactcttccatctattgtttacgattcacatgcgttgacgatttactatacttcatcagtaattacatttttcgccaacttaaaaaaaaatattaaagaaaataattaaaagttttgcggtactttatttatacttatttaattggtttagatgtacgtaaaacatttattattttaaaatttgaaattgttttatatatttatatttatatattttatttgaaataaaaattgttttgaaagtttgttaatggtaaaattaacgggtaaaatcactagtatatattatattaaattggatatatattaaattataggcataatgtatattaaataaaattaaatctaatggaatcgaattgaatcgaaccgaatataatcgaatatataagaagtattcatacactccgcaagtgccccgctctatttttattttaacattatggagccaaggagccaaaattttcatgttttgtaattagattaattgatttaatagctttcctctactttcttaatttgattatcttgtttctctcccatttctgcagttgttcccagctgtgattccattagttaagtcaatagggaacttgcacattttttttattacataataatgttcagttttgtataaaaatgagatttccaaaatttcacgcttcaaaaactcataataacttagaagtacaaatttaaagtcttctttattttaaaatagttcaaacgacccgtaacgccacagagtttaactatgtggttctgtttatggttatatttacgtatattcttcttctttagtttattggcctccacctacttgggtatttggccagctcgtcgtcggggaaaaaaggaaaaatatttatattctaatgacatttatcgtacgtcgttgtaataatatataccagtttgttgagattggagtttgatacagtttttgaaggaaaggaaagaaggtttactattgaaaataaaaccattttgtaaaagtacaaattttctatgaatagttcaaacgatcaaaaacacttttaacgtcacataactgtattttttactgacgtttataatgtctaatttaaaattatatatacaattggtgtagaatgtaaacatacaacccgtgacgtcacgacgcgttttggggtggctggtataagttgaatttttagtagtctttaggggccaaacgaaagacaaacaaaacttttttatctttgatacaggttctaaattatgttctgttgtgatttataccatttttttcgaatttaaaattgtatgcaagttccctattagaaatgaacaacagatttagatagggttaaaattatcttgaacacattgagctaaactgcatatcaaagcaaaggaatattccaaatcaacaaatgttttttgtagtaattaaattttagttgttttcaaattttggattagaaaatgaaagtgattttcagaatttttgtttagatttaccaattatgtacatgcaatgttaaataatgcagtttccctattgcgtttgttccccacattccgaactttgtgttttacttattgttttaagtatatctatatttgcagcggacacaccttttcaaattatgaaagaaatacatattttacttttatctgattttaatcaaaatatattttcatgttccttgttatgtcccactggatgacatttatgaatagttcatttaattctgtataaaaatacttctagttggcaatcatcatggaaagagtttatcatttttctcgatctgcagcagttctttactgttgttttcactccattgctttaaattattcaaccaggacatgcttcgtctccccgtagtcttttccttccaccttctcttcttattcctaaacgatcataaaacggcatctcatgtttttaatgacacaaatgttatcgatctcaaaacttacctacctactcttcagtcgtagtgtagactttgaatggagtcagttttaaaaagaaaatgcaaaagtactccaactatgtactacattttgactactagtcaaaaaccagagtaataatttttgtgttaaaaactctttcctcaaagcatgaacatgtttacctgtgaatattgttaactgcacaacggaattcataagtcctatgatctcctgtacgttattgttgctcataaaaacatgttctctgtatgtcccatatgttatgtcttatacaatatgttcagttttcgattagatataagcgactgtaagaagtgctaaattcggcaacattggttaatccactatcgttgtttaatcgccgaatgacggcgaaagacgtgtgcgctttgttaccatttatagaccgtatatctaatatgaaactaaacatgctgtatgtacaccacttccgagttccgaggcagaatgaattaaaactatgatgttaacaacattagattgttttaaatttaaacttaccattaattacgttacaaatacaactagttcataaaagttgtccagagaggaaccagtgttaaaagtactattatctagctatttatactatttattgttgtaacatatcctgtgtgtatatacaatcgacatttttaacttatcgcctatcatgaaattgatttttaaaacttggagttttttcactgatataatatattcaaaatggtttaagctgaaattagatgtgtgcttgactattttatgacgattaatatacttaatctagtaaaatctactttaatatggtgctcttgatgatatacttatgatgtactcttattttacctggtttattgcaaacttaaaaatatccgtgattttttttggttttccatagattattcgtataaagcttaaatgtggcaacaaagcacaagtactatttgtataacttattcttccttgcaatatgaattaatttaacaattttacgatgacagtcgtcagtaagatatctaaaataagcttatttctgacttataattaaaagtagatttttagtaaatctaataaatattactcaggtttaaatcattttgaaaggaaaattcttcgactttgatctaataaatgttaactttgtaaatgatatttaaaaaataatgtagacacattttaaaaaatgtctggcgtacaaagtatacaaatata

SEQ ID NO: 914 - DNA, 3227 bp, Diabrotica virgifera
  SmartBlast Evalue=1E-130; Info=UDP-glucose 4-epimerase n=1 Tax= Aedes aegypti RepID=Q172F3_AEDAE
taccgctcggttatttaacgaagtaagtaattttgaggtggtgggttacagttgaaaaaatgaagggtaacagcacaattttggtgactggtggtgctggatacgtaggatctcacacagttgttgaactactaaaaaataattataccgtgatagcattagataatttagttaattgctatgctattggatcagagaagccagaagctttgaaaagggttgaaaaaataactggggagactgttacattttataatgtagatatcaaagacagagaagctttggataaaatttttaaagctcatagaatcgacgcggtaatacattttgctgccttgaaggcagttggagagtccgttagtatacctttaaaatattaccacaacaatgttggtggatccgctacactctttgaggttatggctgctaatggtgtcaaaaaggtcgttttttcatcgtcagctactgtttatggtgacccacaattcttgcctattactgaaagccatccaactggacaagggtgtaccaacccttacggaaaatcaaaatatttcgttgaagaggtattgaaggatgtatgcacatcagatccggaatggaaagtaattttgttaagatatttcaatcctgttggtgctcacgaatctggacttattggagaagatccatctggaattcctaacaatcttatgccttatattgcccaggtagccgtaggtcgtcgtgaaaaacttcaagtattcggcaacgactatcaaacaccagacggtacaggagtcagagactacatccacataaccgatctcgccattggccatctgaaagcgctaaaccacatatattcttctagctttaattcgtggaaagcctacaatctcggaacaggtcgaggttactctgtccttgaaatgatcaaggcattcgctgaagcatcaggaaaacaaatcaaatatgatatcgtagaaagaagaggcggagatatagctgagtgctacgctgatgccactctggctaaaatcgaactagggtggcaggccaccagggacgttatggcaatgtgcagggatacgtggaattggcaaaagaaaaatcccaaagggtttcaaacttcttcttgaaaattgatgtttttcgttgtgaagcgtagaaaagatactgcggagttgtagcctttacgaaatacataactgaaagtcgaaaaattaccatgataataaaaaatgttctcgctataatgtactaggttcgttcatatggatgttaaattaacacttgtaacacagtaagtcgaaactaaacacttcttttctgagaaacgcagtgtttaaatacattcaatgagtatgtattatatttttatcgccttttgtagtataactaaatggaaaatggagtacatataataaatagtgtacaatatagcgaagaaattccagacatcatttatatttgccttcatagatcgtatccagctgtactactactatcgttgtgtacgcgtgcgatcttgacatatagtcgctttaaggtggtggtactcatagtcaacacatttccaatttggaactaaaatatattcgcatatcctctaaaaaaaaatgccccatctagtactgtaagtaactcaaatgttataataaaatctctaagtctaacttgttcagttctgaaaaatcgtgcactcttaagtttaacaaattatcttcacaatttcaggtccaacttattttatcagcaaaaaacgtgcattgcttcatggtagctaattttggtctagtagctaattttggttttggtctagggaactagatgttgtataattttacttttattgagtgtccattacaatggacaatgggaaaaagtctagtttaacatccgtatgaatctagtcttaagcgtaattaaattgatatcgaaggttattgaaaacggaatcagtagcacaattgtaaggcaacgcagattatttttttttaacagcaatttcatttcaaataactcagagaacaattataattctttccattattagaaaaattatataaattttttaatatacagcagatgtcggttatgttaaggttttgcctcgcaaaacacgtaaacacagaaataacattttgtttactaaatgttgtataattttcgttttatatgagtgtccattacaatggacaatgggaaagagtctagtttaacatccgtatgaatctagtcttaagcgtaattaaattgatatcgaaggttattgaaaacggaatctgtagcacaattataaggcagcgcagattatttttttgagcagcaatttcatttcaagtaactcagagaacaattataattctttccattattagaaaaattatataatttttttttaatatagagcaaatgccaattattttgaggttttgcctcgcaggttttaagagcaaccatttttaaggcattggttaagtaaatcgagacaaaaaaacagtaccaggtgcacgttaatctgaacataattttaaacttcatagatgataaacataaaggttaattaaccaaagaaagcaacaatattacaccttactgttatgaaaacttttacgcacgtttttcttgttaagatgaatataaaggagaaatgtatttgatcagtgcgtcctcccagtcttgacgtacggatcagaaacacttaccttaactaaagcctcgactaccaaactaagagtcacgcagagaaaaatggagcggtcaatgttaggaataactctgcgagacaaaatcagaaacgaagaaatcaggagaagaacaaaggtgactgacgtcatcgaaaggatagccaggttgaagtggagatgggcaggacacatagccagaatgacagatgggcgatggacaaaaggttattggaatggaggccaagagaagacaagagaagcgtcggttgaccgcctacaagatggacagacgacgtaagaaagctaaataaaaactggatgagagcggcgcggatagacgtggttggaaacgaggggaggaggcctatgttcagcagtggacttttgaggctggatgataattgtaagtttttattattacctcaaatgcgattaaaataataacaaagttcttttaccgggcttccggtacttttcgcaacctagttttccatttaggttcaaatggtcacttgggtgttacgtaacgtttaggtaggaggagggggttcaaaa

SEQ ID NO: 915 - DNA, 2432 bp, Diabrotica virgifera
  SmartBlast Evalue=2E-41; Info=Carbonyl reductase [NADPH] 1 n=1 Tax=Harpegnathos saltator RepID=E2BU93_9HYME
ataggtacgttatattaaaataatatacgtatttaaaattgaataaatgaattatattgcttacatagattatgttatattcaaataataattaatatatttgtatttatatcagcaaagcatatgttatttacgattgattttgacacatctgtcaatgtcaaaataaattttaaattattcatagctattaataaaatataaatgacatttgttagtaaatttaattagtatataaaataaataataaatttaaaaatacaatttgagtattttgaaaaaaataattatttagtaacgactttaaaaaggtttgtacacttttgtctaacgggcacccctttaacggaagtacctaataataatggactcttccatctattgtttacgattcacatgcgttgacgatttactatacttcatcagtaattacatttttcgccaacttaaaaaaaaatattaaagaaaataattaaaagttttgcggtactttatttatacttatttaattggtttagatgtacgtaaaacatttattattttaaaatttgaaattgttttatatatttatatttatatattttatttgaaataaaaattgttttgaaagtttgttaatggtaaaattaacgggtaaaatcactagtatatattatattaaattggatatatattaaattataggcataatgtatattaaataaaattaaatctaatggaatcgaattgaatcgaaccgaatataatcgaatatataagaagtattcatacactccgcaagtgccccgctctatttttattttaacattatggagccaaggagccaaaattttcatgttttgtaattagattaattgatttaatagctttcctctactttcttaatttgattatcttgtttctctcccatttctgcagttgttcccagctgtgattccattagttaagtcaatagggaacttgcacattttttttattacataataatgttcagttttgtataaaaatgagatttccaaaatttcacgcttcaaaaactcataataacttagaagtacaaatttaaagtcttctttattttaaaatagttcaaacgacccgtaacgccacagagtttaactatgtggttctgtttatggttatatttacgtatattcttcttctttagtttattggcctccacctacttgggtatttggccagctcgtcgtcggggaaaaaaggaaaaatatttatattctaatgacatttatcgtacgtcgttgtaataatatataccagtttgttgagattggagtttgatacagtttttgaaggaaaggaaagaaggtttactattgaaaataaaaccattttgtaaaagtacaaattttctatgaatagttcaaacgatcaaaaacacttttaacgtcacataactgtattttttactgacgtttataatgtctaatttaaaattatatatacaattggtgtagaatgtaaacatacaacccgtgacgtcacgacgcgttttggggtggctggtataagttgaatttttagtagtctttaggggccaaacgaaagacaaacaaaacttttttatctttgatacaggttctaaattatgttctgttgtgatttatagcatttttttcgaatttaaaattttatgcaagttccctattgtcaactttctgttaatattcagtttcaatacattttctggcgttctaaacgtcactagacataaaaataaacattgcaaccaatgaagggtccaggcacgtttaggactgtaatagctcaatgttcctatgtgtctagtagggtggcggttactgtatatgatacttacttgagaaacttcccaattaattgattgagctccggtatcgttaaatcatttctggaaaattctcttctgagattctctgacggaatttttaataaatgcccctcacaactggagacgtttacgacttttgcgttgtttcttaataaaggaaacaaagcctcacaaactctgacagttccaaaataattggtttctatagtttgtgagctttgcgcaaacgtaggatttggagctgctgaccaaaagcaaattgctgcattattaattagtaaatccaaacccccatgttctttttcaataaaattcctaaattcatctacactagtttggctgtcgatgtctagctgatgaaatactgctttcaggttttctttctctaactttgccacagctgatttacctcttgttacatctcgagctgtcaagtaaacaatgccgtcaaatctttcacacagacctttgatagtggcatatccgatgcctttattcccaccagttaacacagccactttttgtggactcatcttgtaattgtgatgaaacaattagttaatcgatgaaaaaaatagagatttttgaagataggtagaga

SEQ ID NO: 916 - DNA, 2419 bp, Diabrotica virgifera
catgaaatacataaaatatgcacaatatatctaaattacgtacagttgtatacagtattgtttatttcttagtaaaaaacttggtcaaagtgaaaaaatgtttgttttgtctgatgaaaatcggttcgggttagccggacttccgggttatcggaggccgacttatcggggttccactgtagttattgaagcaaaggaaagaaggtttactatggaaaataaaaccattttgtaaaagtacaagttttctatgaatagttcaaacgatcaaaaacacttgtgacgtcacataactgtattttctactgacgtttataatgtctaatttaaattatatacaattttgtttactttgttggttcagaatgtaaacatatagcccgatgacgtcacgacgcgttttgggctggctgatataatttgaatttttaatcgtctttaggggccaatcgaaaaagaaacaaaacttttttatctttgatacaggttctaaattatgttctgttgtgatttataccatttttttcgaatttaaaattgtatgcaagttccctattagaaatgaacaacagatttagatagggttaaaattatcttgaacacattgagctaaactgcatatcaaagcaaaggaatattccaaatcaacaaatgttttttgtagtaattaaattttagttgttttcaaattttggattagaaaatgaaagtgattttcagaatttttgtttagatttaccaattatgtacatgcaatgttaaataatgcagtttccctattgcgtttgttccccacattccgaactttgtgttttacttattgttttaagtatatctatatttgcagcggacacaccttttcaaattatgaaagaaatacatattttacttttatctgattttaatcaaaatatattttcatgttccttgttatgtcccactggatgacatttatgaatagttcatttaattctgtataaaaatacttctagttggcaatcatcatggaaagagtttatcatttttctcgatctgcagcagttctttactgttgttttcactccattgctttaaattattcaaccaggacatgcttcgtctccccgtagtcttttccttccaccttctcttcttattcctaaacgatcataaaacggcatctcatgtttttaatgacacaaatgttatcgatctcaaaacttacctacctactcttcagtcgtagtgtagactttgaatggagtcagttttaaaaagaaaatgcaaaagtactccaactatgtactacattttgactactagtcaaaaaccagagtaataatttttgtgttaaaaactctttcctcaaagcatgaacatgtttacctgtgaatattgttaactgcacaacggaattcataagtcctatgatctcctgtacgttattgttgctcataaaaacatgttctctgtatgtcccatatgttatgtcttatacaatatgttcagttttcgattagatataagcgactgtaagaagtgctaaattcggcaacattggttaatccactatcgttgtttaatcgccgaatgacggcgaaagacgtgtgcgctttgttaccatttatagaccgtatatctaatatgaaactaaacatgctgtatgtacaccacttccgagttccgaggcagaatgaattaaaactatgatgttaacaacattagattgttttaaatttaaacttaccattaattacgttacaaatacaactagttcataaaagttgtccagagaggaaccagtgttaaaagtactattatctagctatttatactatttattgttgtaacatatcctgtgtgtatatacaatcgacatttttaacttatcgcctatcatgaaattgatttttaaaacttggagttttttcactgatataatatattcaaaatggtttaagctgaaattagatgtgtgcttgactattttatgacgattaatatacttaatctagtaaaatctactttaatatggtgctcttgatgatatacttatgatgtactcttattttacctggtttattgcaaacttaaaaatatccgtgattttttttggttttccatagattattcgtataaagcttaaatgtggcaacaaagcacaagtactatttgtataacttattcttccttgcaatatgaattaatttaacaattttacgatgacagtcgtcagtaagatatctaaaataagcttatttctgacttataattaaaagtagatttttagtaaatctaataaatattactcaggtttaaatcattttgaaaggaaaattcttcgactttgatctaataaatgttaactttgtaaatgatatttaaaaaataatgtagacacattttaaaaaatgtctggcgtacaaagtatacaaatata

SEQ ID NO: 917 - DNA, 1831 bp, Diabrotica virgifera
ataggtacgttatattaaaataatatacgtatttaaaattgaataaatgaattatattgcttacatagattatgttatattcaaataataattaatatatttgtatttatatcagcaaagcatatgttatttacgattgattttgacacatctgtcaatgtcaaaataaattttaaattattcatagctattaataaaatataaatgacatttgttagtaaatttaattagtatataaaataaataataaatttaaaaatacaatttgagtattttgaaaaaaataattatttagtaacgactttaaaaaggtttgtacacttttgtctaacgggcacccctttaacggaagtacctaataataatggactcttccatctattgtttacgattcacatgcgttgacgatttactatacttcatcagtaattacatttttcgccaacttaaaaaaaaatattaaagaaaataattaaaagttttgcggtactttatttatacttatttaattggtttagatgtacgtaaaacatttattattttaaaatttgaaattgttttatatatttatatttatatattttatttgaaataaaaattgttttgaaagtttgttaatggtaaaattaacgggtaaaatcactagtatatattatattaaattggatatatattaaattataggcataatgtatattaaataaaattaaatctaatggaatcgaattgaatcgaaccgaatataatcgaatatataagaagtattcatacactccgcaagtgccccgctctatttttattttaacattatggagccaaggagccaaaattttcatgttttgtaattagattaattgatttaatagctttcctctactttcttaatttgattatcttgtttctctcccatttctgcagttgttcccagctgtgattccattagttaagtcaatagggaacttgcacattttttttattacataataatgttcagttttgtataaaaatgagatttccaaaatttcacgcttcaaaaactcataataacttagaagtacaaatttaaagtcttctttattttaaaatagttcaaacgacccgtaacgccacagagtttaactatgtggttctgtttatggttatatttacgtatattcttcttctttagtttattggcctccacctacttgggtatttggccagctcgtcgtcggggaaaaaaggaaaaatatttatattctaatgacatttatcgtacgtcgttgtaataatatataccagtttgttgagattggagtttgatacagtttttgaaggaaaggaaagaaggtttactattgaaaataaaaccattttgtaaaagtacaaattttctatgaatagttcaaacgatcaaaaacacttttaacgtcacataactgtattttttactgacgtttataatgtctaatttaaaattatatatacaattggtgtagaatgtaaacatacaacccgtgacgtcacgacgcgttttggggtggctggtataagttgaatttttagtagtctttaggggccaaacgaaagacaaacaaaacttttttatctttgatacaggttctaaattatgttctgttgtgatttatagcatttttttcgaatttaaaattttatgcaagttccctattgtctggggactttctttttctgatgtctgaagtttatttttgctctttgctaataacggagtttaacatttgacaggaaattacacggtcgtcttctttctagtctaataatattattatatacattattataatacttatacatgtaattctatacataa

SEQ ID NO: 918 - DNA, 1445 bp, Diabrotica virgifera
  SmartBlast Evalue=1E-31; Info=Protein FAM100B n=2 Tax= Formicidae RepID=E2B7V9_9HYME
gtggagtgcttgtatatttcaaaacgagtgtagtctattccggtctttacaagatttttaaaatggatgcccctttaagagaacaagtaatgataaatcaatttgttgtagcagcaggttgtgcacacgatcaagctaaacagatattacaatcagcgcattggcaatttgagacggcactaagtatatttttcaagatgctgctctacctacctgccctccaggagcttcaacacattttggacaagtgataactccatgcaatactccagcgactccgccaaatttccccgacacactactggcattttccaaactgtcggcaggcaacggcaacagtccgtccacgaattcggcaggagccgcccctcttccgccacagtctcgccgctccccgcagcccatttttcaccagcagcgataaaatagtgccagttggcttttgtgcccccattaaatcacatttacgctcagtgtaaaaaactttgtatgtaaattggagactatgataaatgctagtgaaatttgttgagatatatattttggttaagtattttgttgagagaacactgtttttggttttttcttgtggtaaaacagaacaagcagaattttttttgttgacgacggtagaaccgttaagataggttgacgatgtttcaaaataattgatcgacaaacggatggtcaataaagtttgtcttgtacagtttcttgtatattatttagtatgatatttccaatgatatcctctatataacgctcctttcacacactaagaatttgaacgtgcgatcgctagaacgcacgatgacattccaatggtggctcaagcaatcctatggtaactttcacattgcaccgaacgttcaaacctccgtgcaatgagaaaggttccatattagggtggttcgaaaaaaacttttttttaaaaattatcaaggaaaaaattcctgtactggctgtataccatagatcacaaaaaataaaaaccttattttgtaaaaggtatatgtatttaaaaaccctaaaaagggactgtatcacaaaacgttttcggaatcaatattccatcatcagtgttatcacaggtttacatgctttaagccaccaaaatgtacgggtaaaaacccttaaattgattttaaacagttggggttacattatattatctgatttaaagatgtttaaaatatttccagattaacccctggcatcacatgacatcgaccatattggttgaggaattgtaggtagaaccttacatgacagagtttaagtgacaactgttttaaaaactgttttaaactgttttaaaaactgttttaaactgttttaaattgtttaaaatagtttattgtttaaattgtttccaatagtggaatattgatgaagagtattacctaacctacaaaaatattacagaatttttacatgtagagctt

SEQ ID NO: 919 - DNA, 8280 bp, Diabrotica virgifera
  SmartBlast Evalue=1E-136; Info=Equilibrative nucleoside transporter n=1 Tax=Culex quinquefasciatus RepID=B0WGR4_CULQU
tagttattacggatttagaaaaaacaaaaaaaccctgagttaaaatcatataaaagtctatttacaataaaattcttattaatagttacatctttatcaacagtgtgacgcaaaattctagtcgcacaaggtttttgtttaaatacaatcagttgtttttaaattttacttgtccgagctcaaagtaagaaagtacataagaaataaattaagttggatataatcgatatattaatcttagtaagaaataatggcgagcgcactttaaaactactttacggcattccaaaatatatttaggcatacttaaaatacataaaattattcgtattcgatctatatacagtccgtctaatttacttaccgttgcacgtcattatttacgttagagatctaagttgacattgttgcccaattacaaaaaattcttgaattcattttaaatcaaatacgtcacacaatttttgcggaagtggattatacagcaaatcaaattaatattcaatgtaaataaataagaactttagaaatagaaaacaagaattaagttataatctcatgttaaagtacataataaaaatagtaaatatattgaaacaaatacttattgggaccgtgcaagttcggcaaagcgacacctggtttctacgctcagcaacattattcgcacttttaattatattggccaattatattagtcctggttactggataattgtcaaggccatagtccaaaaaaataataagaagaaaaaataagattcaggttatgttattaaatcgtaaacaattgtatgtagaaaataaaattagttattaaaatgcagtactgcaagcaaaatacaattaattaaatttgcctttatataattgcatattatatcaatattgtggagcaatatataatgtttcttcttcattgacagtagatatgaaatatacgtcaatttgacaatttcaattgacaatgaattatttaagaaagttacaatatttctccgctattctcgcacgatcgtttctcgtatcccctccaagtacttgcacaccgcgaacagtaaagaatataaacaaatatgatgtgtcatcaccgcaactgtcaaataaatgttaccaatttatgccaaaatatcaccttcgttcgattatagttacagtgtattccgaacaaatgtgcttcataaaaacgctttataatccatttagacaaattaaatgaaacatattattgtgtatttctttaagttaacattaatagaaatctttaaatattatttctacgcatatataataaaatatgcctagtggctgtaacgccagtgtactcggcaaagtgattctaaaaaagaacacacctaccgcctaaatatttcgtgttgatatcatgtgacgtctcgggctatgccgcggatgacgtgtaacttcagggccgggtttaaagggagcaggctgggcagctgaccggggcccccacattttgggggcccccacaaagccccaaaaaaatcagcacattattcacatagaataatttttgtcaatcaattaactgtaatattttgttatatggaaggtttctctactattaaaaatgtatttttgcaggggacatgggaaatatgtaaaagctgcaggggacagtcctacgacaatgtgtcagtcataggtggaaaatacaatggtgttcagctaaaatttaggtaacacaatatcttggcgttgtagattccatgtgtcgcccactctctaaatttagttgctaaagctgcagctaagtgttgtctgctgccatataattatttgatttcttggaaggacatatttcttctacatatagatacaacttgttcatcgaatgtttaaaaacgtctttaagcgagagcaacgtcgaccatggcagaaatattattgttcctaaaaaagagtaaatactactagatggtcgtctagaagtgatgccgcaaacgaattagttaaaggctgtaatcagattaaaggagtattatccaaaatttcaaaagacgatgggcaacaatttgaaactcgtagcggtacaaatggtttgtataatcgagtgagtttactgaaaacagggatatttgcaatattttggaatgaaatcttagaggggacaaacagcacaagtcgtattctctaagatccaaatattgaccttaattcaggagtggcggcacttaaatcaattaaaaaattatattcttttaaggaatatttcagagactgaaatgacaacatcagataaatttaggactcaaaattttatagctattatagatcacttcatttcctcttcaagtcataggctatttgcatatgaatctattcattccaattttgtatttttacattatttggaaaatttaactccaaatgaaattgaagctcactcactgaagcctaccgacaattataggaatgatttagataaaaaactaggtgtcgaactagtacaatttgtagaatttttcaattcatttaaagaggaaatcggctcatcaaatataagtaaagaacttcaaatgtgccgacgcgacggttaaaagagaaaaatgtgaatgatgcatttccaaacgttgtagtgacacttcgtttatatttagttctgatggtaactaactacagtggagagagatcattctaaaaattttaagttatttaaaaatcgacttcggtctatgataggccaagagcgcttgaacaatctctttataatgagcattgaacacaatgccttaaagcaactagacatgcccgacataatcaaggaattttcagttaaaaaatctcgaaaagtacccggactttaaccataccatagtcataacaacaatttgtttaatggtaggaggtagggccccacaccaattctgcccaggggcccccactgccttaaatccggctctgcgtgcaacggtaagtaaattagatggggtatacagtcggaaaatacacttattttgaatttgctgtcattttctataacaaatgtttgttatttatatgttatgttatgttaatggcttctacaacaaatgtttgttatttatagaaaaagatagcaaatacaaaataagtgattgatgtgatcgttcatgggtattctttcatttttccgactgtaagtacttagccttcaaaaaaacgaaaattttggaaaagtgacgatttatttttgaacgtagcctcattttagttcgatacacgtgcagtgatacagcaccttttttaacccgtctgaaaaataccttttctcgaggtctgaaaagtaggtttccgtggcggtgatgaactccttattacacttaaatttctgcccggcgattgactttttcaaatttggaaacaaaaagaagtcgtacaggcccaaatctggagaatacgttggatggaacagcagtttgtagcccaattcaaccaatttggcaatggtgtaaaccggaccgttgttatggtggaagagtgattttttcttcccaattagggatgttttttctgaaattcggcgtcgaatagggccaataatgtggcatagtaaagccctgtgatcgtttagcccttttccaggaagtggatatacttagatgttcacatcttgtgaaacactgtaaatggtggccatcctctttccggtcgattggcagtcttcgccctcctcggtgcacgttcgcggggcaacgtcgactgtatcgactgttccttggcttgatctctggtgtataccagtggaaccatgtttcgtcgacggttatgaataactcatttggattacgcttaaatcgcatccgctccggtctaatggatatgaccaatgagattttttgagatgcctactgtctcagcgatctcacgcatcttcagttggcggtctaccaatacgagatcgtggatttctttcatgttatctcagtggtagccgttttcggggagtaacctgagagtgacttatcaaaaaccgacgtgtcaccaagttgaaacgtagaagaaaagtcactgtatacagcatccgagggatatttgatttcgctgggggatttcctttctaaaaacaaactgatattactctttttttaattttctaaaatccccaaacacgcccgcttacacacgcggtcaaaacaaaactatgagtccgatttggctgatattttcacaaatggcgtctgcaagaatgtattacacgatggtagttttctcttgcgacagtgacaccatcgggcggagaggctaagtacttattggatcacctataagcaaaagttttagtagctaaaaaacctttagtagcttaaaaaagaatttatatgcctttttaataaaaatttatcgtttaattttcatgactttgttataaaaaaatttcgattacaataataattaaggtttggtttatagctcgtattttttcttttggttgaagctattagaaagttacttcattcaaaatgcagatgagatacaagtgaaaaatctcccaagtgccgtaattttgcaatatctgcatttctaattattggatcaaggtttatcatacatcattttgaaggtttttttttatagtaacaaaaattgcattgtgtaaaaattgtatttttaagactagaactagaatattgcgttacgctgtatataagtcaaaaatataaagaataacaaaagtgtataaaccaacactggtaataaatacataatataaacgttatattattatatactaacgatgatgaataaataaaatcgagacctttgtggctagaaaattgttgatgtaaaggtttttacctatattttatacaaattttgctacaaaactcctagagccttgaaaagaaaaaaacaaaaatttagaataaaaaactataaaaggggtaaaataaaatttgaacacaaaacaaatttataatctcttccaatttatataaaaatttaatacaacataacaattaaaagaaatgtaaaggaaaataaaaacctttttttttgtaaatatttccaaactttttccattctttcaatattttgtttaaaaaaaatatgcaaataatattttaaatcaacaaaaacattatacttcttataaaaattcaaatgaaaatgaggactaatggatgtggaagatctacgattctatttttggattttggaaaaaatagctcaaagttagatcgttgaaatgtcggcaggttttaatttagcgcggccatttttgttgaagccttactgtttaaattgaactcttgagaaactaagattatgaataaatgcagctgctatataaaacacaattttttaaaaaacgtttactcgaaaaattctgtttttattttgtttctgaacttctaaagacaaccttccaaaaaattcgaagaagttgtcgcaagggcattccaagactttaacgacgcgacgtttatgacaccgttgggagacaaacattgtatttgtttatatttgtatcacattgcagaaaactgcaatatctctagcatgacatgtcatgaggggcgagcgttataacttattgcaattaataatacaaggaagaatacagagtagatatagtcgtcaaagaagacacatctcctggttaaacagtttaagagtttggtttaactcttctgctgatctctttagagcagcggtgtcgaaagtgcgaattaccatgatggttgccgaccgtcttagaggagatggcacgtgaagaagaagaagtaccacattgtgtttcttaagttttttacctttaatagttttttagttgtattttccgaacatttttttattgattttgtgtagttttcagttgtagaagtacttgaacgactttatttagttttaagcagtaaataaataaacaagagtgaatattttcgaaagttgttggtagacaatacagatgttgctagtacgtacaagcaaaagattggcaaaataaataatatagatccattttccctcaaggagtctgagttaacctacagtggagacatttttccaagtgtaagtaacatggacataattagttatgtagcatttttataggacgtgttatagcatttaaccattgtttttgtctctcagatgataacttatttagttcagttttatacttaaaatgtagcactgatggtaactgataaaactgaactttatcatgaatacttcgcattccacacttcaaaacacaacagaaattaggcatattatctttttaaattaattcttctagtgaaaatgttaaattaatcctagtacaaacaaaattacaaagaaacgcaaactaaaatgatctaaaacacattaagaactgatagaataacatttatgtatgcctcccggctaccatattgatttaattttgacagcatgttggcatgccctattggaccttcacaaaaatggcagcacgacgcttaccagcgtcgtccaatataaacataatactaaactgtatacatagtgtcacattttgtcgctattttttccgtaatccctttgtatatttataattacaatcctttggttcacaaaatgctaactaacaataatattttggggcatatgaccagaaattttcctcataaactgaacctaatcgcgaactccttttctgtgccatataccacacatttttgctaggcgccaacatggccgatcacccaaggccacaagaaggctattagaatgccggagaagattccagtgattaaagctgcggccgaaaacattccagctgtgggagcgtaccgatcgtccacagatcttggggcatacatcatgcctaaggaactgagatagccactcgacaaggccatcgaggcacttaacaagaagtatacgtagtcattggtgatcagtctaggtaaaactctctggatgcccttcacttggtaattacataacaaaaacaaaggtatgtacacgattcgggccgttactggaatccacaaaaatttcggactaggccatacaaaaaaggcaggcaaacaactacctatcattgcaaatatgttaaaggtcataaaacacatcagattcacataaatgaattcgggaacaaagaaactgtcatcacttctttgtattcctgattgaacagcaggaaatacagagatagttacgaaaaataccatccacacattcagtaattgtggaaaagactgtttgaaaatttttaaatacggaggtctttgaacttctccgctaggcatcggtgccaatcgcctctcttttttgtctttcagatcatagtacctgtagaatctattaagtggtagagcgaaataagtgtcgaaacatatcaagagcacgaaaagagcagatataaaataatagatggcagccattttaatactaggtgtgctaagtttagagacgaggctcacagtagccgtaaacgtgccactaacgttatttcctaatatcacagctgctgtatatttcgcaggcaatttggccgccataccgtaaacggtattctggtagattccgtttgcgcaattcagaacgacaacaaggactaacgtcgaccaaaagaaggcatacggcacatcactggtgttgatcattcccaacactatggtaacaatgaagactacgatttctataccgatgccccaaactatcctagtggttaggttgcctccgatttgtatgaatatatttgtatagttcagtattatcgaaggtatttgggcacaaaacgtcaaatactgcataaaagtcggtatgtacgggaaatcgaagtgtatatacgaggcagataacttataatctgtgaaatactcaatagctgtaataaacatattccaaggcatcaatacgccgataccgtggatgacgaatgtcatataaactaaattgaaccgatctggaggagcctccattgttaaatttttgaaattgagctcgtcttctggaaggttgttctcctcccacgccggatgtagcttgaccggttgctgcagtctggctttttcattaggattgctctccatcccttgaagttggtaagtgttggttccattattctcattatagtggactcctctggaacgattcatatttactgttcaatacaatattatccttctaaagagttccaaactaaatcatgatatttcctaattcaaagatacattgtgtatagttttattcacaaactgctcaattaattttagaaccccgaattgttttattgtaaacacgtgttttatgtataaccaacaagacaacctaacccgtaccttactacctcagcac

SEQ ID NO: 920 - DNA, 8280 bp, Diabrotica virgifera
  SmartBlast Evalue=1E-136; Info=Equilibrative nucleoside transporter n=1 Tax=Culex quinquefasciatus RepID=B0WGR4_CULQU
tagttattacggatttagaaaaaacaaaaaaaccctgagttaaaatcatataaaagtctatttacaataaaattcttattaatagttacatctttatcaacagtgtgacgcaaaattctagtcgcacaaggtttttgtttaaatacaatcagttgtttttaaattttacttgtccgagctcaaagtaagaaagtacataagaaataaattaagttggatataatcgatatattaatcttagtaagaaataatggcgagcgcactttaaaactactttacggcattccaaaatatatttaggcatacttaaaatacataaaattattcgtattcgatctatatacagtccgtctaatttacttaccgttgcacgtcattatttacgttagagatctaagttgacattgttgcccaattacaaaaaattcttgaattcattttaaatcaaatacgtcacacaatttttgcggaagtggattatacagcaaatcaaattaatattcaatgtaaataaataagaactttagaaatagaaaacaagaattaagttataatctcatgttaaagtacataataaaaatagtaaatatattgaaacaaatacttattgggaccgtgcaagttcggcaaagcgacacctggtttctacgctcagcaacattattcgcacttttaattatattggccaattatattagtcctggttactggataattgtcaaggccatagtccaaaaaaataataagaagaaaaaataagattcaggttatgttattaaatcgtaaacaattgtatgtagaaaataaaattagttattaaaatgcagtactgcaagcaaaatacaattaattaaatttgcctttatataattgcatattatatcaatattgtggagcaatatataatgtttcttcttcattgacagtagatatgaaatatacgtcaatttgacaatttcaattgacaatgaattatttaagaaagttacaatatttctccgctattctcgcacgatcgtttctcgtatcccctccaagtacttgcacaccgcgaacagtaaagaatataaacaaatatgatgtgtcatcaccgcaactgtcaaataaatgttaccaatttatgccaaaatatcaccttcgttcgattatagttacagtgtattccgaacaaatgtgcttcataaaaacgctttataatccatttagacaaattaaatgaaacatattattgtgtatttctttaagttaacattaatagaaatctttaaatattatttctacgcatatataataaaatatgcctagtggctgtaacgccagtgtactcggcaaagtgattctaaaaaagaacacacctaccgcctaaatatttcgtgttgatatcatgtgacgtctcgggctatgccgcggatgacgtgtaacttcagggccgggtttaaagggagcaggctgggcagctgaccggggcccccacattttgggggcccccacaaagccccaaaaaaatcagcacattattcacatagaataatttttgtcaatcaattaactgtaatattttgttatatggaaggtttctctactattaaaaatgtatttttgcaggggacatgggaaatatgtaaaagctgcaggggacagtcctacgacaatgtgtcagtcataggtggaaaatacaatggtgttcagctaaaatttaggtaacacaatatcttggcgttgtagattccatgtgtcgcccactctctaaatttagttgctaaagctgcagctaagtgttgtctgctgccatataattatttgatttcttggaaggacatatttcttctacatatagatacaacttgttcatcgaatgtttaaaaacgtctttaagcgagagcaacgtcgaccatggcagaaatattattgttcctaaaaaagagtaaatactactagatggtcgtctagaagtgatgccgcaaacgaattagttaaaggctgtaatcagattaaaggagtattatccaaaatttcaaaagacgatgggcaacaatttgaaactcgtagcggtacaaattgtttgcataatcgagtgagtttactgaaaatagggatatttgcaatattttggaatgaaatcttagaggggacaaacagcacaagtcgtattctctaagatccaaatattgaccttaattcaggagtggcggcacttaaatcaattaaaaaattatattcttttaaggaatatttcagagactgaaatgacaacatcagataaatttaggactcaaaattttatagctattatagatcacttcatttcctcttcaagtcataggctatttgcatatgaatctattcattccaattttgtatttttacattatttggaaaatttaactccaaatgaaattgaagctcactcactgaagcctaccgacaattataggaatgatttagataaaaaactaggtgtcgaactagtacaatttgtagaatttttcaattcatttaaagaggaaatcggctcatcaaatataagtaaagaacttcaaatgtgccgacgcgacggttaaaagagaaaaatgtgaatgatgcatttccaaacgttgtagtgacacttcgtttatatttagttctgatggtaactaactacagtggagagagatcattctaaaaattttaagttatttaaaaatcgacttcggtctatgataggccaagagcgcttgaacaatctctttataatgagcattgaacacaatgccttaaagcaactagacatgcccgacataatcaaggaattttcagttaaaaaatctcgaaaagtacccggactttaaccataccatagtcataacaacaatttgtttaatggtaggaggtagggccccacaccaattctgcccaggggcccccactgccttaaatccggctctgcgtgcaacggtaagtaaattagatggggtatacagtcggaaaatacacttattttgaatttgctgtcattttctataacaaatgtttgttatttatatgttatgttatgttaatggcttctacaacaaatgtttgttatttatagaaaaagatagcaaatacaaaataagtgattgatgtgatcgttcatgggtattctttcatttttccgactgtaagtacttagccttcaaaaaaacgaaaattttggaaaagtgacgatttatttttgaacgtagcctcattttagttcgatacacgtgcagtgatacagcaccttttttaacccgtctgaaaaataccttttctcgaggtctgaaaagtaggtttccgtggcggtgatgaactccttattacacttaaatttctgcccggcgattgactttttcaaatttggaaacaaaaagaagtcgtacaggcccaaatctggagaatacgttggatggaacagcagtttgtagcccaattcaaccaatttggcaatggtgtaaaccggaccgttgttatggtggaagagtgattttttcttcccaattagggatgttttttctgaaattcggcgtcgaatagggccaataatgtggcatagtaaagccctgtgatcgtttagcccttttccaggaagtggatatacttagatgttcacatcttgtgaaacactgtaaatggtggccatcctctttccggtcgattggcagtcttcgccctcctcggtgcacgttcgcggggcaacgtcgactgtatcgactgttccttggcttgatctctggtgtataccagtggaaccatgtttcgtcgacggttatgaataactcatttggattacgcttaaatcgcatccgctccggtctaatggatatgaccaatgagattttttgagatgcctactgtctcagcgatctcacgcatcttcagttggcggtctaccaatacgagatcgtggatttctttcatgttatctcagtggtagccgttttcggggagtaacctgagagtgacttatcaaaaaccgacgtgtcaccaagttgaaacgtagaagaaaagtcactgtatacagcatccgagggatatttgatttcgctgggggatttcctttctaaaaacaaactgatattactctttttttaattttctaaaatccccaaacacgcccgcttacacacgcggtcaaaacaaaactatgagtccgatttggctgatattttcacaaatggcgtctgcaagaatgtattacacgatggtagttttctcttgcgacagtgacaccatcgggcggagaggctaagtacttattggatcacctataagcaaaagttttagtagctaaaaaacctttagtagcttaaaaaagaatttatatgcctttttaataaaaatttatcgtttaattttcatgactttgttataaaaaaatttcgattacaataataattaaggtttggtttatagctcgtattttttcttttggttgaagctattagaaagttacttcattcaaaatgcagatgagatacaagtgaaaaatctcccaagtgccgtaattttgcaatatctgcatttctaattattggatcaaggtttatcatacatcattttgaaggtttttttttatagtaacaaaaattgcattgtgtaaaaattgtatttttaagactagaactagaatattgcgttacgctgtatataagtcaaaaatataaagaataacaaaagtgtataaaccaacactggtaataaatacataatataaacgttatattattatatactaacgatgatgaataaataaaatcgagacctttgtggctagaaaattgttgatgtaaaggtttttacctatattttatacaaattttgctacaaaactcctagagccttgaaaagaaaaaaacaaaaatttagaataaaaaactataaaaggggtaaaataaaatttgaacacaaaacaaatttataatctcttccaatttatataaaaatttaatacaacataacaattaaaagaaatgtaaaggaaaataaaaacctttttttttgtaaatatttccaaactttttccattctttcaatattttgtttaaaaaaaatatgcaaataatattttaaatcaacaaaaacattatacttcttataaaaattcaaatgaaaatgaggactaatggatgtggaagatctacgattctatttttggattttggaaaaaatagctcaaagttagatcgttgaaatgtcggcaggttttaatttagcgcggccatttttgttgaagccttactgtttaaattgaactcttgagaaactaagattatgaataaatgcagctgctatataaaacacaattttttaaaaaacgtttactcgaaaaattctgtttttattttgtttctgaacttctaaagacaaccttccaaaaaattcgaagaagttgtcgcaagggcattccaagactttaacgacgcgacgtttatgacaccgttgggagacaaacattgtatttgtttatatttgtatcacattgcagaaaactgcaatatctctagcatgacatgtcatgaggggcgagcgttataacttattgcaattaataatacaaggaagaatacagagtagatatagtcgtcaaagaagacacatctcctggttaaacagtttaagagtttggtttaactcttctgctgatctctttagagcagcggtgtcgaaagtgcgaattaccatgatggttgccgaccgtcttagaggagatggcacgtgaagaagaagaagtaccacattgtgtttcttaagttttttacctttaatagttttttagttgtattttccgaacatttttttattgattttgtgtagttttcagttgtagaagtacttgaacgactttatttagttttaagcagtaaataaataaacaagagtgaatattttcgaaagttgttggtagacaatacagatgttgctagtacgtacaagcaaaagattggcaaaataaataatatagatccattttccctcaaggagtctgagttaacctacagtggagacatttttccaagtgtaagtaacatggacataattagttatgtagcatttttataggacgtgttatagcatttaaccattgtttttgtctctcagatgataacttatttagttcagttttatacttaaaatgtagcactgatggtaactgataaaactgaactttatcatgaatacttcgcattccacacttcaaaacacaacagaaattaggcatattatctttttaaattaattcttctagtgaaaatgttaaattaatcctagtacaaacaaaattacaaagaaacgcaaactaaaatgatctaaaacacattaagaactgatagaataacatttatgtatgcctcccggctaccatattgatttaattttgacagcatgttggcatgccctattggaccttcacaaaaatggcagcacgacgcttaccagcgtcgtccaatataaacataatactaaactgtatacatagtgtcacattttgtcgctattttttccgtaatccctttgtatatttataattacaatcctttggttcacaaaatgctaactaacaataatattttggggcatatgaccagaaattttcctcataaactgaacctaatcgcgaactccttttctgtgccatataccacacatttttgctaggcgccaacatggccgatcacccaaggccacaagaaggctattagaatgccggagaagattccagtgattaaagctgcggccgaaaacattccagctgtgggagcgtaccgatcgtccacagatcttggggcatacatcatgcctaaggaactgagatagccactcgacaaggccatcgaggcacttaacaagaagtatacgtagtcattggtgatcagtctaggtaaaactctctggatgcccttcacttggtaattacataacaaaaacaaaggtatgtacacgattcgggccgttactggaatccacaaaaatttcggactaggccatacaaaaaaggcaggcaaacaactacctatcattgcaaatatgttaaaggtcataaaacacatcagattcacataaatgaattcgggaacaaagaaactgtcatcacttctttgtattcctgattgaacagcaggaaatacagagatagttacgaaaaataccatccacacattcagtaattgtggaaaagactgtttgaaaatttttaaatacggaggtctttgaacttctccgctaggcatcggtgccaatcgcctctcttttttgtctttcagatcatagtacctgtagaatctattaagtggtagagcgaaataagtgtcgaaacatatcaagagcacgaaaagagcagatataaaataatagatggcagccattttaatactaggtgtgctaagtttagagacgaggctcacagtagccgtaaacgtgccactaacgttatttcctaatatcacagctgctgtatatttcgcaggcaatttggccgccataccgtaaacggtattctggtagattccgtttgcgcaattcagaacgacaacaaggactaacgtcgaccaaaagaaggcatacggcacatcactggtgttgatcattcccaacactatggtaacaatgaagactacgatttctataccgatgccccaaactatcctagtggttaggttgcctccgatttgtatgaatatatttgtatagttcagtattatcgaaggtatttgggcacaaaacgtcaaatactgcataaaagtcggtatgtacgggaaatcgaagtgtatatacgaggcagataacttataatctgtgaaatactcaatagctgtaataaacatattccaaggcatcaatacgccgataccgtggatgacgaatgtcatataaactaaattgaaccgatctggaggagcctccattgttaaatttttgaaattgagctcgtcttctggaaggttgttctcctcccacgccggatgtagcttgaccggttgctgcagtctggctttttcattaggattgctctccatcccttgaagttggtaagtgttggttccattattctcattatagtggactcctctggaacgattcatatttactgttcaatacaatattatccttctaaagagttccaaactaaatcatgatatttcctaattcaaagatacattgtgtatagttttattcacaaactgctcaattaattttagaaccccgaattgttttattgtaaacacgtgttttatgtataaccaacaagacaacctaacccgtaccttactacctcagcac

SEQ ID NO: 921 - DNA, 6170 bp, Diabrotica virgifera
  SmartBlast Evalue=1E-136; Info=Equilibrative nucleoside transporter n=1 Tax=Culex quinquefasciatus RepID=B0WGR4_CULQU
tgacgtataaatccggaaaactctaatttctctatgaatcagtggagtttcaatcgagatcagtattcgttatgaaattgtaacgttacaaacgtcacatctttgctgttttatttttgaataattattttattctatcttctttattaattctttaataataatcttctatttgttttaccttttttcccgttaaaaattggttggttgaaatataaattttgaatggtatttcaaatagctggagtaactcatcgcctttttttaaagaagatagaataaataattgtttaaaaatggaatagcaaatatgtgacgtttgtaacgttacatactcctaccacccaccagaaaaattttgaacacaagtgagaaatttttctcaaagaaaacaggaacgttacaaaattagtaagatttaactatacaattttaaaatatgtatgttacaataatctgctttaatgttagaactttttatggatacatcagtcatcaaatttagtggaaacaaaggatctgatatccgccgacaaaaagttatgatatcatttaaacaattattgtacttatgttatcgatgtaaaatattcaaacataaagagtgcattaaacaagttgatgacgtataaatccggcaaactctattctctatgaatcagtggagtttcatctagatcagtattcgttatgaaatgagtaagatttaactatacaattttaaaatatgtatgtgtcccgctatttataactatttagaaaatgatttcttattgtaatcaatgtttatgttggccgtataataaagataacacaaacaaatgtttgttgtgtatttggcgcaattcaagcgttattttgttttttacagcaattcattatattgtcatacacaatataacacttttcaactatgacaattctttgtcatctaacatgtcaattgtctcaagccaggatgacatctcatgtcatttattgtcatttgtcatttatttggtgccatgatttccttgtctcttctgtaaagtttttctctatattgtacatgtgacatgtggtgtgtctcctgtagatacaatcagttataggatcattcaattgctcatatagtttcttgtgatttttctggtggtcggttctgttacaaaattggaagaatgaattataaaactcaagccccacgttgggctcccaagtacatcctgcgaatctcctgcacagttaaaattgaagttttttgggtaaagatacaagaatcaaaattatttttttaaacgcccagaaattttgaatttcttggtcatatgtcatttgtacaatctcatatgctcaatacttagtagtattaataacttaaccaaagaataaaacttatttaacaattcagtgacgtattaatgatagcttgagtatgcttgggcctggtttataccaaagtcgagaaatcaatggtgttaagttctggatggctagatggtggtttcttaacctggacttttaaatttttagtttctttaagcaggagtgttatagtctgactgttttgttgctttagaagatatagcagagatgctatgtaatgctagtacaagtattgataattttattatcaatattgttgtaatttgaccggattttctgacgttttggtcgatatcttaatgctactacatgaggctaggaactttttcttaaggaatatatactccgtttacctttaacgaattaaaaggccagaaaaagccattagcatcaacagagctcgcttaaagacatcatatttggagataaaccaagcccgatcgaaaaattttgttgttgtttttgtttattgttaatttttgtttaaactcgtcgtttatgcttctccaaacttccaagaactctttcgaaatgcttataatgccaaaattttacctttaatgtacatacattaagtaggaaataccaagatgattatattgaatataacggagcttttattgtacataaactttctcacctagatcaatttttactataagtgcacagagtgtccgcgaaagctctgttccagctgtacatatgatttaaagattaatgcataggtacgagtatagacattaaagacgttttgtggctgttttttttttgtttaattgagattaactagatgcctcatgttttcttcagagctcgtaattcggagatttgtcaaaaagtggcggtatcaatgtttggtataaacgtttaagaaattcaattagccgctttaaagaaaagcacttgccggtattttaacatcacattaatcattgtaaatgagtcatttgagaacttatactacatttaaatagttacaattattagacgataaatattaagcaagagaaattaaactttttttctgcttttaagaacaaaaacagcacattcattagaggaaccgaattcaaaattttttgcacatcacatttgaaaaattgttggtaaagaaatatattaatttgtcttgactaaattactatcctgttgataccgagaagactcggtatcctgttgttattttcggtttaaattttctagccaaattctgagtccactatagtatgtatattcgcttgtaaaaaatgtagcttgtcaatacaaaaacgcgtcatcaactctcaagtggtgctgaagaggaatctacttgttacaaaatcacgaatgctgtaactgattatacacaaaagcgtaacaaaagtaacaagtaggtactcacaagtaacgacaatcagcacctattttcacgtgttctgtgcatgtacgtgtttacaagctacatttctttccaagtgaatatactatacaatgatgagtacgctaataaccggcaaaataacgcaaaagacggaaaacataatacattgtgaaataaaaagagatgaaactagtagaggtgggaaattatcaacagaaacctataattaaacttataattaacaacattaattataattttacattatattaatagtttcccacctttagacgtgtggcgacacgctttaattacaatttttgctaattttaatttttaaaaacttttctcaaaacgaaataatacgggtcatataaaattcacatttaatatacaaaccagacgctaagaagggcacggttttacgaaacgaaatgtatccctaaccatatgtttttggtgtgttcagtttaacaaactgaatttcccataaattaattaccttatcagaccttatgtcaataactcactttggaaatgcattcgaagacgtttcttaaaactgcagaaatgtttcaacttttaaacgccagatctaaataatttatcgcctttctggccagatggtagaaacacaaacatattagcgtttgtggtctttttcagccacagcagtcgagatacaaccacgggtcgcttcacacaatcgcagcaggcgtcggtcgatcaacaaaccctcgctggaccaaacagtcaaacccttttacgagatgaacaagcacgccttttaaccaaaataaataaatatattattgttcgttgtttacacttattttaattaattccatttactcaattccgcagcacggaacaattgtgtattcatttatatttgtaccacattgtgtttcttaagttttttacctttaatagttttttagttgtattttccgaacatttttttattgattttgtgtagttttcagttgtagaagtacttgaacgactttatttagttttaagcagtaaataaataaacaagagtgaatattttcgaaagttgttggtagacaatacagatgttgctagtacgtacaagcaaaagattggcaaaataaataatatagatccattttccctcaaggagtctgagttaacctacagtggagacatttttccaagtgtaagtaacatggacataattagttatgtagcatttttataggacgtgttatagcatttaaccattgtttttgtctctcagatgataacttatttagttcagttttatacttaaaatgtagcactgatggtaactgataaaactgaactttatcatgaatacttcgcattccacacttcaaaacacaacagaaattaggcatattatctttttaaattaattcttctagtgaaaatgttaaattaatcctagtacaaacaaaattacaaagaaacgcaaactaaaatgatctaaaacacattaagaactgatagaataacatttatgtatgcctcccggctaccatattgatttaattttgacagcatgttggcatgccctattggaccttcacaaaaatggcagcacgacgcttaccagcgtcgtccaatataaacataatactaaactgtatacatagtgtcacattttgtcgctattttttccgtaatccctttgtatatttataattacaatcctttggttcacaaaatgctaactaacaataatattttggggcatatgaccagaaattttcctcataaactgaacctaatcgcgaactccttttctgtgccatataccacacatttttgctaggcgccaacatggccgatcacccaaggccacaagaaggctattagaatgccggagaagattccagtgattaaagctgcggccgaaaacattccagctgtgggagcgtaccgatcgtccacagatcttggggcatacatcatgcctaaggaactgagatagccactcgacaaggccatcgaggcacttaacaagaagtatacgtagtcattggtgatcagtctaggtaaaactctctggatgcccttcacttggtaattacataacaaaaacaaaggtatgtacacgattcgggccgttactggaatccacaaaaatttcggactaggccatacaaaaaaggcaggcaaacaactacctatcattgcaaatatgttaaaggtcataaaacacatcagattcacataaatgaattcgggaacaaagaaactgtcatcacttctttgtattcctgattgaacagcaggaaatacagagatagttacgaaaaataccatccacacattcagtaattgtggaaaagactgtttgaaaatttttaaatacggaggtctttgaacttctccgctaggcatcggtgccaatcgcctctcttttttgtctttcagatcatagtacctgtagaatctattaagtggtagagcgaaataagtgtcgaaacatatcaagagcacgaaaagagcagatataaaataatagatggcagccattttaatactaggtgtgctaagtttagagacgaggctcacagtagccgtaaacgtgccactaacgttatttcctaatatcacagctgctgtatatttcgcaggcaatttggccgccataccgtaaacggtattctggtagattccgtttgcgcaattcagaacgacaacaaggactaacgtcgaccaaaagaaggcatacggcacatcactggtgttgatcattcccaacactatggtaacaatgaagactacgatttctataccgatgccccaaactatcctagtggttaggttgcctccgatttgtatgaatatatttgtatagttcagtattatcgaaggtatttgggcacaaaacgtcaaatactgcataaaagtcggtatgtacgggaaatcgaagtgtatatacgaggcagataacttataatctgtgaaatactcaatagctgtaataaacatattccaaggcatcaatacgccgataccgtggatgacgaatgtcatataaactaaattgaaccgatctggaggagcctccattgttaaatttttgaaattgagctcgtcttctggaaggttgttctcctcccacgccggatgtagcttgaccggttgctgcagtctggctttttcattaggattgctctccatcccttgaagttggtaagtgttggttccattattctcattatagtggactcctctggaacgattcatatttactgttcaatacaatattatccttctaaagagttccaaactaaatcatgatatttcctaattcaaagatacattgtgtatagttttattcacaaactgctcaattaattttagaaccccgaattgttttattgtaaacacgtgttttatgtataaccaacaagacaacctaacccgtaccttactacctcagcac

SEQ ID NO: 922 - DNA, 3869 bp, Diabrotica virgifera
tgacgtataaatccggaaaactctaatttctctatgaatcagtggagtttcaatcgagatcagtattcgttatgaaattgtaacgttacaaacgtcacatctttgctgttttatttttgaataattattttattctatcttctttattaattctttaataataatcttctatttgttttaccttttttcccgttaaaaattggttggttgaaatataaattttgaatggtatttcaaatagctggagtaactcatcgcctttttttaaagaagatagaataaataattgtttaaaaatggaatagcaaatatgtgacgtttgtaacgttacatactcctaccacccaccagaaaaattttgaacacaagtgagaaatttttctcaaagaaaacaggaacgttacaaaattagtaagatttaactatacaattttaaaatatgtatgttacaataatctgctttaatgttagaactttttatggatacatcagtcatcaaatttagtggaaacaaaggatctgatatccgccgacaaaaagttatgatatcatttaaacaattattgtacttatgttatcgatgtaaaatattcaaacataaagagtgcattaaacaagttgatgacgtataaatccggcaaactctattctctatgaatcagtggagtttcatctagatcagtattcgttatgaaatgagtaagatttaactatacaattttaaaatatgtatgtgtcccgctatttataactatttagaaaatgatttcttattgtaatcaatgtttatgttggccgtataataaagataacacaaacaaatgtttgttgtgtatttggcgcaattcaagcgttattttgttttttacagcaattcattatattgtcatacacaatataacacttttcaactatgacaattctttgtcatctaacatgtcaattgtctcaagccaggatgacatctcatgtcatttattgtcatttgtcatttatttggtgccatgatttccttgtctcttctgtaaagtttttctctatattgtacatgtgacatgtggtgtgtctcctgtagatacaatcagttataggatcattcaattgctcatatagtttcttgtgatttttctggtggtcggttctgttacaaaattggaagaatgaattataaaactcaagccccacgttgggctcccaagtacatcctgcgaatctcctgcacagttaaaattgaagttttttgggtaaagatacaagaatcaaaattatttttttaaacgcccagaaattttgaatttcttggtcatatgtcatttgtacaatctcatatgctcaatacttagtagtattaataacttaaccaaagaataaaacttatttaacaattcagtgacgtattaatgatagcttgagtatgcttgggcctggtttataccaaagtcgagaaatcaatggtgttaagttctggatggctagatggtggtttcttaacctggacttttaaatttttagtttctttaagcaggagtgttatagtctgactgttttgttgctttagaagatatagcagagatgctatgtaatgctagtacaagtattgataattttattatcaatattgttgtaatttgaccggattttctgacgttttggtcgatatcttaatgctactacatgaggctaggaactttttcttaaggaatatatactccgtttacctttaacgaattaaaaggccagaaaaagccattagcatcaacagagctcgcttaaagacatcatatttggagataaaccaagcccgatcgaaaaattttgttgttgtttttgtttattgttaatttttgtttaaactcgtcgtttatgcttctccaaacttccaagaactctttcgaaatgcttataatgccaaaattttacctttaatgtacatacattaagtaggaaataccaagatgattatattgaatataacggagcttttattgtacataaactttctcacctagatcaatttttactataagtgcacagagtgtccgcgaaagctctgttccagctgtacatatgatttaaagattaatgcataggtacgagtatagacattaaagacgttttgtggctgttttttttttgtttaattgagattaactagatgcctcatgttttcttcagagctcgtaattcggagatttgtcaaaaagtggcggtatcaatgtttggtataaacgtttaagaaattcaattagccgctttaaagaaaagcacttgccggtattttaacatcacattaatcattgtaaatgagtcatttgagaacttatactacatttaaatagttacaattattagacgataaatattaagcaagagaaattaaactttttttctgcttttaagaacaaaaacagcacattcattagaggaaccgaattcaaaattttttgcacatcacatttgaaaaattgttggtaaagaaatatattaatttgtcttgactaaattactatcctgttgataccgagaagactcggtatcctgttgttattttcggtttaaattttctagccaaattctgagtccactatagtatgtatattcgcttgtaaaaaatgtagcttgtcaatacaaaaacgcgtcatcaactctcaagtggtgctgaagaggaatctacttgttacaaaatcacgaatgctgtaactgattatacacaaaagcgtaacaaaagtaacaagtaggtactcacaagtaacgacaatcagcacctattttcacgtgttctgtgcatgtacgtgtttacaagctacatttctttccaagtgaatatactatacaatgatgagtacgctaataaccggcaaaataacgcaaaagacggaaaacataatacattgtgaaataaaaagagatgaaactagtagaggtgggaaattatcaacagaaacctataattaaacttataattaacaacattaattataattttacattatattaatagtttcccacctttagacgtgtggcgacacgctttaattacaatttttgctaattttaatttttaaaaacttttctcaaaacgaaataatacgggtcatataaaattcacatttaatatacaaaccagacgctaagaagggcacggttttacgaaacgaaatgtatccctaaccatatgtttttggtgtgttcagtttaacaaactgaatttcccataaattaattaccttatcagaccttatgtcaataactcactttggaaatgcattcgaagacgtttcttaaaactgcagaaatgtttcaacttttaaacgccagatctaaataatttatcgcctttctggccagatggtagaaacacaaacatattagcgtttgtggttttctttttcagccacagcagagtcgatctgcaacctcccgtcggcagtcataccccagcgggcgtcgggataggtcaacaacacaccctttcgagatatacgcaaaacacgtctttttaccgattaaaataaatatattattgttcgttgtttacacttaatttaatcaattccatttactcaattccgtaccacggaacagaagaatagcgcaaataaaatgcaactggataggacacgtggcacgacaaaacaatggaaggtggacaagaaacattttacattggacaccgcgtgagtgcagtcgtagtagaagaagaccacaaaaaagatagctagacaacatcaaagcaaaagctaagagaaacttacacctaagagcacaaaacattgaagagtggagaacatggggaagccttagtctaggattggatgcaaacaggctgaagaagaattaaaaaaacatgcttactaacggaaaataat

SEQ ID NO: 923 - DNA, 3681 bp, Diabrotica virgifera
  SmartBlast Evalue=3E-31; Info=Protein FAM100B n=2 Tax= Formicidae RepID=E2B7V9_9HYME
gtggagtgcttgtatatttcaaaacgagtgtagtctattccggtctttacaagatttttaaaatggatgcccctttaagagaacaagtaatgataaatcaatttgttgtagcagcaggttgtgcacacgatcaagctaaacagatattacaatcagcgcattggcaatttgagacggcactaagtatatttttcaagatgctgctctacctacctgccctccaggagcttcaacacattttggacaagtgataactccatgcaatactccagcgactccgccaaatttccccgacacactactggcattttccaaactgtcggcaggcaacggcaacagtccgtccacgaattcggcaggagccgcccctcttccgccacagtctcgccgctccccgcagcccatttttcaccagcagcgataaaatagtgccagttggcttttgtgcccccattaaatcacatttacgctcagtgtaaaaaactttgtatgtaaattggagactatgataaatgctagtgaaatttgttgagatatatattttggttaagtattttgttgagagaacactgtttttggttttttcttgtggtaaaacagaacaagcagaattttttttgttgacgacggtagaaccgttaagataggttgacgatgtttcaaaataattgatcgacaaacggatggtcaataaagtttgtcttgtacagtttcttgtatattatttagtatgatatttccaatgatatcctctatataacgctcctttcacacactaagaatttgaacgtgcgttctagttctaaccctcgcacgtttgaagttattaatgtgtgaaaggagcttaggaattgttagaaaacgtactttttgcgacgtacttaaaaaacaaataaaattggttcaaaatctattagattacatacattttgatacttttatgctgcaagacactcattcacttattattgccaaataactcatcaaaactattccacgaattaattgtgtcaattaggaaaatccctaaatgcactattgtttaaacttataatcgacgagataataaaaacaatattaagcttacgatattggacgtaatatgagtaagatcaacattagacttaccacgtacctaaagtaactgaaggcatctattgccccaagtaattacagtagactcgctctatatcgttgttctgaagctatttccttgtggcatttttatgattaactatttagtgggaaataagccacaattaaattgaaaaataattttattaacgtttcgaatcccaaatcgggtttcgttgtcaaaatacaaaatactactgtattactgtaatactaatgtacgatgtcgctttgtagcttgaaagaacggtcatttacctatccatcgatattaaatttttttaaatcggttgtcaagtgacagcaaatcatttttaaaatgaaagatgcaatgtggaaatcacataacataatatcattttgcttagttatgttatttaggtacagtccgtctaatttacttaccgttgcaggtcattatttacgttagaggatcaagttgacattgttgcccaactacaaaaaattcttgaattcataaatcaaatacattacacaatttttgcggaagtggattatacagcaaaacaaattaatattcaatgtaaataaataaaaactttagaaatagaaaacaagaattaagttatgtgtaatcctacgttaaagtacataacaaaaacagtaaatataataaaacaaatacttatagtaaaaataaaaacaaatatgaagtgtcatcaccgcaactgtcaataaatgttaccaatttatgccaaaatatcaccttcgttcgattatagttacagtgtattccgaacaaatgtgcttcataaaaacgctttataatccatttatacaaattaaatgaaaaatattatttctacgcgtatataataaaatatgcctagtggctgtaacgacagtgtactcggcaaagtgattctaaaaaagaacacacctaccgcctaaatatttcgtgttggtatcacgtgacgtctcgggctatgacgcggatgacgtgcaacggtaagtaaattagatggagtatatgtgatatccacgttgcaccgctcattttaaaaattaattactcagtgatttgacaaccgattttaaaaactttatatcgctggataggtgaatgacctttctttcaatttacaaaaaaatatactgggtgttctattaaaaaaagtcaacaacgtttttttcaaaagtccgccatttttcttttcgtatttgaaagcgatataaaaaattcagtccattcagacaaaacttttactaaaataaaacatttcagcgaaaaccgcatatttctatcttaagccgtttagaagttataggcagttaaaatgggggaaaatataagtggacacccggtattattttcaaaccttagttgcgctgatacatacataaattggatgatttagcaactaacaacatactgtcggtgtgcgcatgccccagggaatgtaaaaattcatcctcgtgcctaaaggagtacaaaacttcaaaaagaaaaaccgaatatggatgaaagattttttcaagccgcgtcacattcaattattgaatgaactgtatgagcagtacgatctcgcgaacattcaattactgaatgaactgtttgagcaatacgatctcaaactttttattttgtttttgacagcggtaatagttactaagttacattatttttttgctgactgccgctacacgacaagtctcagtgatgttttcactcgacataattgcaatattgcttttgataacactgataaggcgaagtaaacaacatgaattgaaagggaagttgaacgaaaaatccaacaggttttgtacttcatgcgtcagaccgtgcgctatgaaattcctacttttcaacttcaaacaaggcatgcgtagcgtctgccttttgttcattacaccgtgcgctgtgacgcatgcgtttgttgaacacgaagttgcaccagtgtagacatagcttaaagcttgtttatacgatgcctcttttcgtgcgtggttgcatgcatcaatatgctcgagaggcacgttttttactacttgtgtctttatttgttaccccaaaatgcgaaagacttgtcttgtttatttatttttgtaatcagcgtgctatgtttttaaagcacatgccaatttctatactacaaagtacaatgttttctcactgttccactccatggaatgcacagcgaaaaaaaaatttaaattgacttaaataattcttaaatttactcgcaagtaaatattctactagattgtaatatattgcttatttaaattctccatttaatatttactaaatctaaaacacaagtcaaatcggcaatggtaaccatttttaaaatgtgaaatctctattaggtgtgatgagcacctcgctttgcctctgttttgtggcatgcacagatgcatgcctcttgcctctagagatacgtggcaagttgcacgaaaagatgcatcgtgtaaaagcgcctttaggcgattatatttgaacaaattaataattaaataattatctaatggttacaatgcaaatttattgaccattctgctgttttatgttgtagagtttta

SEQ ID NO: 924 - DNA, 2908 bp, Diabrotica virgifera
tagttattacggatttagaaaaaacaaaaaaaccctgagttaaaatcatataaaagtctatttacaataaaattcttattaatagttacatctttatcaacagtgtgacgcaaaattctagtcgcacaaggtttttgtttaaatacaatcagttgtttttaaattttacttgtccgagctcaaagtaagaaagtacataagaaataaattaagttggatataatcgatatattaatcttagtaagaaataatggcgagcgcactttaaaactactttacggcattccaaaatatatttaggcatacttaaaatacataaaattattcgtattcgatctatatacagtccgtctaatttacttaccgttgcacgtcattatttacgttagagatctaagttgacattgttgcccaattacaaaaaattcttgaattcattttaaatcaaatacgtcacacaatttttgcggaagtggattatacagcaaatcaaattaatattcaatgtaaataaataagaactttagaaatagaaaacaagaattaagttataatctcatgttaaagtacataataaaaatagtaaatatattgaaacaaatacttattgggaccgtgcaagttcggcaaagcgacacctggtttctacgctcagcaacattattcgcacttttaattatattggccaattatattagtcctggttactggataattgtcaaggccatagtccaaaaaaataataagaagaaaaaataagattcaggttatgttattaaatcgtaaacaattgtatgtagaaaataaaattagttattaaaatgcagtactgcaagcaaaatacaattaattaaatttgcctttatataattgcatattatatcaatattgtggagcaatatataatgtttcttcttcattgacagtagatatgaaatatacgtcaatttgacaatttcaattgacaatgaattatttaagaaagttacaatatttctccgctattctcgcacgatcgtttctcgtatcccctccaagtacttgcacaccgcgaacagtaaagaatataaacaaatatgatgtgtcatcaccgcaactgtcaaataaatgttaccaatttatgccaaaatatcaccttcgttcgattatagttacagtgtattccgaacaaatgtgcttcataaaaacgctttataatccatttagacaaattaaatgaaacatattattgtgtatttctttaagttaacattaatagaaatctttaaatattatttctacgcatatataataaaatatgcctagtggctgacgcggatgacgtgcaacggtaagtaaattagatggagtatatgtgatatccacgttgcaccgctcattttaaaaattaattactcagtgatttgacaaccgattttaaaaactttatatcgctggataggtgaatgacctttctttcaatttacaaaaaaatatactgggtgttctattaaaaaaagtcaacaacgtttttttcaaaagtccgccatttttcttttcgtatttgaaagcgatataaaaaattcagtccattcagacaaaacttttactaaaataaaacatttcagcgaaaaccgcatatttctatcttaagccgtttagaagttataggcagttaaaatgggggaaaatataagtggacacccggtattattttcaaaccttagttgcgctgatacatacataaattggatgatttagcaactaacaacatactgtcggtgtgcgcatgccccagggaatgtaaaaattcatcctcgtgcctaaaggagtacaaaacttcaaaaagaaaaaccgaatatggatgaaagattttttcaagccgcgtcacattcaattattgaatgaactgtatgagcagtacgatctcgcgaacattcaattactgaatgaactgtttgagcaatacgatctcaaactttttattttgtttttgacagcggtaatagttactaagttacattatttttttgctgactgccgctacacgacaagtctcagtgatgttttcactcgacataattgcaatattgcttttgataacactgataaggcgaagtaaacaacatgaattgaaagggaagttgaacgaaaaatccaacaggttttgtacttcatgcgtcagaccgtgcgctatgaaattcctacttttcaacttcaaacaaggcatgcgtagcgtctgccttttgttcattacaccgtgcgctgtgacgcatgcgtttgttgaacacgaagttgcaccagtgtagacatagcttaaagcttgtttatacgatgcctcttttcgtgcgtggttgcatgcatcaatatgctcgagaggcacgttttttactacttgtgtctttatttgttaccccaaaatgcgaaagacttgtcttgtttatttatttttgtaatcagcgtgctatgtttttaaagcacatgccaatttctatactacaaagtacaatgttttctcactgttccactccatggaatgcacagcgaaaaaaaaatttaaattgacttaaataattcttaaatttactcgcaagtaaatattctactagattgtaatatattgcttatttaaattctccatttaatatttactaaatctaaaacacaagtcaaatcggcaatggtaaccatttttaaaatgtgaaatctctattaggtgtgatgagcacctcgctttgcctctgttttgtggcatgcacagatgcatgcctcttgcctctagagatacgtggcaagttgcacgaaaagatgcatcgtgtaaaagcgcctttaggcgattatatttgaacaaattaataattaaataattatctaatggttacaatgcaaatttattgaccattctgctgttttatgttgtagagtttta

SEQ ID NO: 925 - DNA, 3004 bp, Diabrotica virgifera
tgacgtataaatccggaaaactctaatttctctatgaatcagtggagtttcaatcgagatcagtattcgttatgaaattgtaacgttacaaacgtcacatctttgctgttttatttttgaataattattttattctatcttctttattaattctttaataataatcttctatttgttttaccttttttcccgttaaaaattggttggttgaaatataaattttgaatggtatttcaaatagctggagtaactcatcgcctttttttaaagaagatagaataaataattgtttaaaaatggaatagcaaatatgtgacgtttgtaacgttacatactcctaccacccaccagaaaaattttgaacacaagtgagaaatttttctcaaagaaaacaggaacgttacaaaattagtaagatttaactatacaattttaaaatatgtatgttacaataatctgctttaatgttagaactttttatggatacatcagtcatcaaatttagtggaaacaaaggatctgatatccgccgacaaaaagttatgatatcatttaaacaattattgtacttatgttatcgatgtaaaatattcaaacataaagagtgcattaaacaagttgatgacgtataaatccggcaaactctattctctatgaatcagtggagtttcatctagatcagtattcgttatgaaatgagtaagatttaactatacaattttaaaatatgtatgtgtcccgctatttataactatttagaaaatgatttcttattgtaatcaatgtttatgttggccgtataataaagataacacaaacaaatgtttgttgtgtatttggcgcaattcaagcgttattttgttttttacagcaattcattatattgtcatacacaatataacacttttcaactatgacaattctttgtcatctaacatgtcaattgtctcaagccaggatgacatctcatgtcatttattgtcatttgtcatttatttggtgccatgatttccttgtctcttctgtaaagtttttctctatattgtacatgtgacatgtggtgtgtctcctgtagatacaatcagttataggatcattcaattgctcatatagtttcttgtgatttttctggtggtcggttctgttacaaaattggaagaatgaattataaaactcaagccccacgttgggctcccaagtacatcctgcgaatctcctgcacagttaaaattgaagttttttgggtaaagatacaagaatcaaaattatttttttaaacgcccagaaattttgaatttcttggtcatatgtcatttgtacaatctcatatgctcaatacttagtagtattaataacttaaccaaagaataaaacttatttaacaattcagtgacgtattaatgatagcttgagtatgcttgggcctggtttataccaaagtcgagaaatcaatggtgttaagttctggatggctagatggtggtttcttaacctggacttttaaatttttagtttctttaagcaggagtgttatagtctgactgttttgttgctttagaagatatagcagagatgctatgtaatgctagtacaagtattgataattttattatcaatattgttgtaatttgaccggattttctgacgttttggtcgatatcttaatgctactacatgaggctaggaactttttcttaaggaatatatactccgtttacctttaacgaattaaaaggccagaaaaagccattagcatcaacagagctcgcttaaagacatcatatttggagataaaccaagcccgatcgaaaaattttgttgttgtttttgtttattgttaatttttgtttaaactcgtcgtttatgcttctccaaacttccaagaactctttcgaaatgcttataatgccaaaattttacctttaatgtacatacattaagtaggaaataccaagatgattatattgaatataacggagcttttattgtacataaactttctcacctagatcaatttttactataagtgcacagagtgtccgcgaaagctctgttccagctgtacatatgatttaaagattaatgcataggtacgagtatagacattaaagacgttttgtggctgttttttttttgtttaattgagattaactagatgcctcatgttttcttcagagctcgtaattcggagatttgtcaaaaagtggcggtatcaatgtttggtataaacgtttaagaaattcaattagccgctttaaagaaaagcacttgccggtattttaacatcacattaatcattgtaaatgagtcatttgagaacttatactacatttaaatagttacaattattagacgataaatattaagcaagagaaattaaactttttttctgcttttaagaacaaaaacagcacattcattagaggaaccgaattcaaaattttttgcacatcacatttgaaaaattgttggtaaagaaatatattaatttgtcttgactaaattactatcctgttgataccgagaagactcggtatcctgttgttattttcggtttaaattttctagccaaattctgagtccactatagtatgtatattcgcttgtaaaaaatgtagcttgtcaatacaaaaacgcgtcatcaactctcaagtggtgctgaagaggaatctacttgttacaaaatcacgaatgctgtaactgattatacacaaaagcgtaacaaaagtaacaagtaggtactcacaagtaacgacaatcagcacctattttcacgtgttctgtgcatgtacgtgtttacaagctacatttctttccaagtgaatatactatacaatgataagtgcgctaataaccggcaaaatagcgcaaaggacggaaaacatagtacgttgtgaaataaagggagatgaaactagtagaggtgggaaattatcaacagaaacctataattaaacttataattaacaacattaattataattttgcattatattgatggttt

SEQ ID NO: 926 - DNA, 2434 bp, Diabrotica virgifera
ctatttttttcttgttttaacatctttaaacgcgaaatacgcaatagcttatcgaattgatgccatgttatttttctttattaaggtctttgtttattattgtgtatgtgtattaacaacagaaacatttttggttattctttattttattttatattttgtcatcaagtgttcagtcaatgtatgtagttttcttatgtacacctttatgggtttatacctggtggatgtatatttcaataaataaataaataaataacctaattaataatacagtctgtacaatatagatactgttgtaattcattatctacatcggagatctaagttgacattgttgcccaactgcaaaaaatttttgaattcattttaagtcaaatatatcacataattattgcggaagtagattatacaacaaaacagattaatattcaatgtaaataaataaaaactttagaaatagaaaacaagaattaagttataatcttacgttaaagtaaataataaaacagtaaatataataaaacaaatacttatagtaaaaataaaaacaaatatgaagtgtcatcaccgcaactgtcaataaatgttaccaatttatgccaaaatatcaccttcgttcgattatagttacagtgtattccgaacaaatgtgcttcataaaaacgctttataatccatttatacaaattaaatgaaaaatattatttctacgcgtatataataaaatatgcctagtggctgtaacgacagtgtactcggcaaagtgattctaaaaaagaacacacctaccgcctaaatatttcgtgttggtatcacgtgacgtctcgggctatgacgcggatgacgtgcaacggtaagtaaattagatggagtatatgtgatatccacgttgcaccgctcattttaaaaattaattactcagtgatttgacaaccgattttaaaaactttatatcgctggataggtgaatgacctttctttcaatttacaaaaaaatatactgggtgttctattaaaaaaagtcaacaacgtttttttcaaaagtccgccatttttcttttcgtatttgaaagcgatataaaaaattcagtccattcagacaaaacttttactaaaataaaacatttcagcgaaaaccgcatatttctatcttaagccgtttagaagttataggcagttaaaatgggggaaaatataagtggacacccggtattattttcaaaccttagttgcgctgatacatacataaattggatgatttagcaactaacaacatactgtcggtgtgcgcatgccccagggaatgtaaaaattcatcctcgtgcctaaaggagtacaaaacttcaaaaagaaaaaccgaatatggatgaaagattttttcaagccgcgtcacattcaattattgaatgaactgtatgagcagtacgatctcgcgaacattcaattactgaatgaactgtttgagcaatacgatctcaaactttttattttgtttttgacagcggtaatagttactaagttacattatttttttgctgactgccgctacacgacaagtctcagtgatgttttcactcgacataattgcaatattgcttttgataacactgataaggcgaagtaaacaacatgaattgaaagggaagttgaacgaaaaatccaacaggttttgtacttcatgcgtcagaccgtgcgctatgaaattcctacttttcaacttcaaacaaggcatgcgtagcgtctgccttttgttcattacaccgtgcgctgtgacgcatgcgtttgttgaacacgaagttgcaccagtgtagacatagcttaaagcttgtttatacgatgcctcttttcgtgcgtggttgcatgcatcaatatgctcgagaggcacgttttttactacttgtgtctttatttgttaccccaaaatgcgaaagacttgtcttgtttatttatttttgtaatcagcgtgctatgtttttaaagcacatgccaatttctatactacaaagtacaatgttttctcactgttccactccatggaatgcacagcgaaaaaaaaatttaaattgacttaaataattcttaaatttactcgcaagtaaatattctactagattgtaatatattgcttatttaaattctccatttaatatttactaaatctaaaacacaagtcaaatcggcaatggtaaccatttttaaaatgtgaaatctctattaggtgtgatgagcacctcgctttgcctctgttttgtggcatgcacagatgcatgcctcttgcctctagagatacgtggcaagttgcacgaaaagatgcatcgtgtaaaagcgcctttaggcgattatatttgaacaaattaataattaaataattatctaatggttacaatgcaaatttattgaccattctgctgttttatgttgtagagtttta

SEQ ID NO: 927 - DNA, 1676 bp, Diabrotica virgifera
acgatataaatttttttaaggtcggttgtcaaatgactgagcaattaatttttcaaatgagaaatgcaatatggaaatctcataacataatatcaatttgcttagttatgttatttagatatgtgatatccacgttgcaccgctcattttaaaaattaattactcagtgatttgacaaccgattttaaaaactttatatcgctggataggtgaatgacctttctttcaatttacaaaaaaatatactgggtgttctattaaaaaaagtcaacaacgtttttttcaaaagtccgccatttttcttttcgtatttgaaagcgatataaaaaattcagtccattcagacaaaacttttactaaaataaaacatttcagcgaaaaccgcatatttctatcttaagccgtttagaagttataggcagttaaaatgggggaaaatataagtggacacccggtattattttcaaaccttagttgcgctgatacatacataaattggatgatttagcaactaacaacatactgtcggtgtgcgcatgccccagggaatgtaaaaattcatcctcgtgcctaaaggagtacaaaacttcaaaaagaaaaaccgaatatggatgaaagattttttcaagccgcgtcacattcaattattgaatgaactgtatgagcagtacgatctcgcgaacattcaattactgaatgaactgtttgagcaatacgatctcaaactttttattttgtttttgacagcggtaatagttactaagttacattatttttttgctgactgccgctacacgacaagtctcagtgatgttttcactcgacataattgcaatattgcttttgataacactgataaggcgaagtaaacaacatgaattgaaagggaagttgaacgaaaaatccaacaggttttgtacttcatgcgtcagaccgtgcgctatgaaattcctacttttcaacttcaaacaaggcatgcgtagcgtctgccttttgttcattacaccgtgcgctgtgacgcatgcgtttgttgaacacgaagttgcaccagtgtagacatagcttaaagcttgtttatacgatgcctcttttcgtgcgtggttgcatgcatcaatatgctcgagaggcacgttttttactacttgtgtctttatttgttaccccaaaatgcgaaagacttgtcttgtttatttatttttgtaatcagcgtgctatgtttttaaagcacatgccaatttctatactacaaagtacaatgttttctcactgttccactccatggaatgcacagcgaaaaaaaaatttaaattgacttaaataattcttaaatttactcgcaagtaaatattctactagattgtaatatattgcttatttaaattctccatttaatatttactaaatctaaaacacaagtcaaatcggcaatggtaaccatttttaaaatgtgaaatctctattaggtgtgatgagcacctcgctttgcctctgttttgtggcatgcacagatgcatgcctcttgcctctagagatacgtggcaagttgcacgaaaagatgcatcgtgtaaaagcgcctttaggcgattatatttgaacaaattaataattaaataattatctaatggttacaatgcaaatttattgaccattctgctgttttatgttgtagagtttta

SEQ ID NO: 928 - DNA, 6513 bp, Diabrotica virgifera
  SmartBlast Evalue=5E-79; Info=Pol polyprotein (Fragment) n=1 Tax=Drosophila buzzatii RepID=A1BPH1_DROBU
ggagttgcatcagttgtaatagtttatctattcctgataattcttgctgttctgatgccatgattgtcgtgtctaaaatatcttcttggtctgaatgttctttttgttttttgttgtctttgctttggcttcttgtcacagacatttgttttcaagaagtactgtccccgccaaatatgaaattttactagtatgttaccaagacgactttttctcacccaaatattataaattgtcaataaatatatcaaatgtaaatatcgtaaaaataaaatattaaatcagttatgtaaaatttgtacctaaagagatctaaaattttatgttatcaaatgtaagtatctcactttttaccacaggcatataaattttcaaataccggctttactctttctatccttcaaatttgccactagaaatactttacaatgctttccacgttggacgacagttgatgtgatcttgattattgatatgagataatattcttatatgtcatttaatttaatcaatgtattaatactaatctaattaatttaccagatcacatatcaatatgttttcaatctcagggctttttataaaattaattacttacttacgtggcttctaagtatttcttaatggttcctaatcgggataggaaagaaaagagtaaaataataacacatatgggttacaattgtaatcaaaatattgtttattttatttaaatggcaatcactgcttaatatttgctatatcttattattcttaaacataacatttacacatgggaatcttatttccttttggtttccaattgaaagtttttattaacatttaactattatgatttattagcaacaattctatttaagtttgatgaagcttttctgatattattgattatgtttcttcaattttaaatgtggtatttaatacgaaaaacccatacattcatgtccaaacaaatgagactgacctttttctggtgaactgagaatgtcttcacacaagacccgtttcctgctatccttggctgcaatcaaaacctcgtcctggcttccagtaatgttctcctttgaaactagctcgtatagctctcgttcctgcttctgtcgtgatgctgtgttctacctttttcgaaactgcaatcagctaccgggaactcttggctcaaggaggttcttttactctcaacctggcctacctctcgttccacgatagatactccacactcacggaactacaccggctttctcactctccgtacactaccgtctactactggacttcacttctcgacagctcaaaacattctgatctctatttgtcattcattcccctactttctaaatatcccttccagattcacaaatcaaacttccaccaccaactctcattcgcagtattcctcaaaaccaatttttaatctttctaaatatgcttaatggatttcaaagaaaatagttaattcccattctaaaattactttctactatttacaaatttaatgatctattatctacttccactaagtcttatttagcatcggctaatgatcgaaccttccgcgaacaacgataatgacctattatcgatttcacttgagtcttatttagcataggctaatgatcgaacctcccgcgaacaacgacaatggtacgcgccattcactttgttcattctaagcgcattgtcccgagtttcgtttaatcacttcttaaaattaaatataacaatttgttgtatacaggttgttctaaatttatatgcccgtggttgagaaaattgaaaatattttatattaaattgaattttgtttataattatcaaaatttaattttcatatcaaatagaaatataacaaatccccgccttgtattcgataaaatttatctgcatttttaaataaattttctcgaggcaaaaccaactccctgtatatttccttactttaatctacgtcttatatcctaacttactatctacttcatgtaattctgtcttttattcgtgatatttgtatacatcgtgaatattataaattcctcggatcttttccgagttcctgtgcctcaactcataactatttatcccattttcattattcacgatgtacgggccttcgaaaacaggcatcaactttgcgcaaatgcccccaggaagatttgatactcgtaatgccctcacgagtactttttcacccttttggaaagtcactggtcttctttttctattttgttcctgtctttggatatatttttcgttgcttcgccgtaatcttctctgtacggtttcaatcacctgttgatattcttttggctcttggtcttcccatggccttatcggcagtacacccttcatgatgtattctggggtctcttttgttactgtgctcggaattgtatttagatacctttctatttccgccattttcctgtcccagtggcgatgttgaccatctgttgcaatgcgaagaaatttcgtcacttcctgtatgaatcgttccgaaggattactctgtggatgcctgatgctgacaaaatttgtctctattcctcgttctcgaagttgtcccttgaaacgatcatttcggaaatacgttgcattgtccagtagaatcttttttggtgttcctactatggctataaaattgtcgatttttcttaatatctcctccccctttgtggtgcggcaactatataattttacgtattttgaaaacacatccaccattaccagaatatgtttgttccttttagtggtcataattagatcgcttaacatatctattgctacaatgtctagtttgtttcgggcttcaatatttttggcaacattttcgtttttgaaattccgactcttatatttttgacatacatcgcacttctgggtaatttcctttgcaatgcggtaatcctgtcggctgatgtaattttccctaaaaacgagccaaacttttctgctaccgatatgcccattgtcctcatgtaatttctttattatcttttcggccaatgtctgtgtcactaaatatagttcctttccgtctattctcttaaaatatatgtcattttctacttccgctcttcttttctctctttcctctaggtcttcttggtttgtccttatctcatttaacgaatatatcccttcttcttgtattaatctatttagtcccacctgtagagtaattgtttccttttttcccgtgtcctcatcccgtgttagagcgtcggctattatgttgtcttttccttttatatatcggaactcaaaatcatactcctgtaataatagaatgcctctatgtattctattatttactaatctattcttcatgatatgtactaaagctgcatggtttgtttcgattgtgaattttgctcccaataagtaaaacctcaatttgtttacgcaatatagtacactggcaaactccaattctgtaacactatattttctctcatgtgtttttgtcactcgagatataaaacatatcggcacttcttggtcgttttgtatttgagacagaactcctgcaaatttttgtatggacgcatcagttcggagtataaaaggtaaattgtaaatggggtggtatattttcgttccttttgcgaattctcgttttaatgtttcgaaagcttcctcctgttcttctttccaattccattttattccttttttaagcaactttatcagagggatttccttttggctcaaatcgggaatcagttttttaaaataattaatcgtgccaagaaaacctctcaatgttttcaaattcgttggtcttgggtattcatctatgagcttgactctgtcttcggataatcttactgttttggtgtccaattgaaaacccaaataaatgacttctttttgaaaaaattgacatttttcaatgtttaatttcaatcccgctgtgtccaattcttccagaattatttctatgtgtttcagatgactctgagtatcttgtgaaaaaattaataaatcatcgatataatgaactatgaaatcttcgtggcgattcaaaatggtatgtagagctcggacgagtgcagcacaagcactctgcaatccaaacggcactaccttaaaccggtagacaataccatcaatagaaaaagcggtgtagtttctacacttttcagctaacggtatcaaccaaaaactgtgttttaagtcaattttcgaaaatatgtgtgacccggtgattcttccaaaaatggcctcgatgtttagaggtgattcatattgtgatacagtgtgctggttgatattcctggcatctaaacataatctcaattctccattgcttttctttactatcacaatcgggttaacatacggtgaatcacatctttcgatgatttgatcttccaacattttatttatttcttctttcacctcttgtcgatacttgtatggaatcgggtaagtctttgatcgaaaatttcccaagtttttcacctcaaatgaatgttcgtactttttagccactctgttttcctcattgatcaaattttcgtagtttcttaacatcaaccgcaattctttttctttcccttctccacatatcaattttctgtctttttttctcagattcttcacacatgtttaccgtgcattctgcatcctcgtttgcatatacctcctcttcaaataccactgtttcaatcatattcttttcactttcattttttagctttatttcttcttctcctgagctcatctcttcttttgaggaatcccagttttcttttgcttttgatactctcaatttttcttcttctgggctcaactcttcttttgaggagccacaggtttcattttcttttgtctttttctgactttttctcccttttcttctttgtccttgcttcgttgccaaattcatttccactgtttgttctttacctgattcgtccgtattttgtttctcctgttccttgtcctgttcttcttctttttcttctgttagattcatcgtattatttttaaaatctatcactacatgtttttctgccaattcgtcaactcctactatcatgtcatgtgacatgtttggcattattacacattgtagtgcatacatcttcttacccagtcgtaccattactcgtatgccttcatttatagttgccaatgtccgtttgtttgcgcccactaaatttaccctaggtattttgtaaattaaatttgttaagttaacttcttctattagttttctgttgaccaatgttatttcagatccagtgtctatcataattttaattggtttctcgttgataaatccatccacaaattttaaattaactccatttttcttttcgttgtttcttgccaatttaataaactccttggggttacaaaagattcctgtttgatttttggtttttagtgagcgccgtcgtgaaaagacgccggttgctcatcgttgtttatattttcgtcataatgtctctctccgtcatattcatctgtctgggtattatttacttctcttctattttctcttggtctgtcggatctgtttcggttttctcgatatccctgttcattttgtctaccattatttctgttttcttgatttgagcgtgtggtgtttctattctggtattctcgatttctgtcctcattccattgcctatttctttgttcataatttcctcttccgttgtctctattttcgttttcccttctgggattaaaatctcgtcttgtatagtccctcctattttgatttctatctctgtaatctgtgtttctcggggcctgtaatcttctcgcgaccttcttgattttctttctcttagacgtgattctcttatttgtaggaattggcataaactatctatgtctttgtagttttgcaatgtgatatggtcttccagcgtttcttcgaaatgtcttgcaatcagttcgactaattgttccgatgagtaattatattgtaaatgttttgcattattgtaaatttgcaaagcatatgtcctttctgatacacccatcctatcattgtatttcccattttgcaattccttgttaatttccaattgttggactttccccagaaataattcaaaaatttttgttcaaattgttgccaattgccgaattcttcttctttgctatcgaaccataggcttgcttcatatttgagatggtttctgatagtttcttttgctgtttcgaaatttccgatgtgctgtattttctttttcaggctatttatgaacggcactgggtgtaatcttcttacatccccgccaaaccttatcttcacgtcatctgtgctatgtataaccatttctcttctttctccgacattctgttgcgtcctgttttcggtgacttgtttttctatttctgtgattcttttttccacttcttctctgtctacttgaatagcattttccaacttattttccaaattttctagttcctttttctggccattcgttaactcctttattttatcttgaattttcatttcttgttcttgcatgtgatctttaa

SEQ ID NO: 929 - DNA, 6513 bp, Diabrotica virgifera
  SmartBlast Evalue=5E-79; Info=Pol polyprotein (Fragment) n=1 Tax=Drosophila buzzatii RepID=A1BPH1_DROBU
ggagttgcatcagttgtaatagtttatctattcctgataattcttgctgttctgatgccatgattgtcgtgtctaaaatatcttcttggtctgaatgttctttttgttttttgttgtctttgctttggcttcttgtcacagacatttgttttcaagaagtactgtccccgccaaatatgaaattttactagtatgttaccaagacgactttttctcacccaaatattataaattgtcaataaatatatcaaatgtaaatatcgtaaaaataaaatattaaatcagttatgtaaaatttgtacctaaagagatctaaaattttatgttatcaaatgtaagtatctcactttttaccacaggcatataaattttcaaataccggctttactctttctatccttcaaatttgccactagaaatactttacaatgctttccacgttggacgacagttgatgtgatcttgattattgatatgagataatattcttatatgtcatttaatttaatcaatgtattaatactaatctaattaatttaccagatcacatatcaatatgttttcaatctcagggcgaattataaaattaattacttacttacgtggcttctaagtatttcttaatggttcctaatcgggataggaaagaaaagagtaaaataataacacatatgggttacaattgtaatcaaaatattgtttattttatttaaatggcaatcactgcttaatatttgctatatcttattattcttaaacataacatttacacatgggaatcttatttccttttggtttccaattgaaagtttttattaacatttaactattatgatttattagcaacaattctatttaagtttgatgaagcttttctgatattattgattatgtttcttcaattttaaatgtggtatttaatacgaaaaacccatacattcatgtccaaacaaatgagactgacctttttctggtgaactgagaatgtcttcacacaagacccgtttcctgctatccttggctgcaatcaaaacctcgtcctggcttccagtaatgttctcctttgaaactagctcgtatagctctcgttcctgcttctgtcgtgatgctgtgttctacctttttcgaaactgcaatcagctaccgggaactcttggctcaaggaggttcttttactctcaacctggcctacctctcgttccacgatagatactccacactcacggaactacaccggctttctcactctccgtacactaccgtctactactggacttcacttctcgacagctcaaaacattctgatctctatttgtcattcattcccctactttctaaatatcccttccagattcacaaatcaaacttccaccaccaactctcattcgcagtattcctcaaaaccaatttttaatctttctaaatatgcttaatggatttcaaagaaaatagttaattcccattctaaaattactttctactatttacaaatttaatgatctattatctacttccactaagtcttatttagcatcggctaatgatcgaaccttccgcgaacaacgataatgacctattatcgatttcacttgagtcttatttagcataggctaatgatcgaacctcccgcgaacaacgacaatggtacgcgccattcactttgttcattctaagcgcattgtcccgagtttcgtttaatcacttcttaaaattaaatataacaatttgttgtatacaggttgttctaaatttatatgcccgtggttgagaaaattgaaaatattttatattaaattgaattttgtttataattatcaaaatttaattttcatatcaaatagaaatataacaaatccccgccttgtattcgataaaatttatctgcatttttaaataaattttctcgaggcaaaaccaactccctgtatatttccttactttaatctacgtcttatatcctaacttactatctacttcatgtaattctgtcttttattcgtgatatttgtatacatcgtgaatattataaattcctcggatcttttccgagttcctgtgcctcaactcataactatttatcccattttcattattcacgatgtacgggccttcgaaaacaggcatcaactttgcgcaaatgcccccaggaagatttgatactcgtaatgccctcacgagtactttttcacccttttggaaagtcactggtcttctttttctattttgttcctgtctttggatatatttttcgttgcttcgccgtaatcttctctgtacggtttcaatcacctgttgatattcttttggctcttggtcttcccatggccttatcggcagtacacccttcatgatgtattctggggtctcttttgttactgtgctcggaattgtatttagatacctttctatttccgccattttcctgtcccagtggcgatgttgaccatctgttgcaatgcgaagaaatttcgtcacttcctgtatgaatcgttccgaaggattactctgtggatgcctgatgctgacaaaatttgtctctattcctcgttctcgaagttgtcccttgaaacgatcatttcggaaatacgttgcattgtccagtagaatcttttttggtgttcctactatggctataaaattgtcgatttttcttaatatctcctccccctttgtggtgcggcaactatataattttacgtattttgaaaacacatccaccattaccagaatatgtttgttccttttagtggtcataattagatcgcttaacatatctattgctacaatgtctagtttgtttcgggcttcaatatttttggcaacattttcgtttttgaaattccgactcttatatttttgacatacatcgcacttctgggtaatttcctttgcaatgcggtaatcctgtcggctgatgtaattttccctaaaaacgagccaaacttttctgctaccgatatgcccattgtcctcatgtaatttctttattatcttttcggccaatgtctgtgtcactaaatatagttcctttccgtctattctcttaaaatatatgtcattttctacttccgctcttcttttctctctttcctctaggtcttcttggtttgtccttatctcatttaacgaatatatcccttcttcttgtattaatctatttagtcccacctgtagagtaattgtttccttttttcccgtgtcctcatcccgtgttagagcgtcggctattatgttgtcttttccttttatatatcggaactcaaaatcatactcctgtaataatagaatgcctctatgtattctattatttactaatctattcttcatgatatgtactaaagctgcatggtttgtttcgattgtgaattttgctcccaataagtaaaacctcaatttgtttacgcaatatagtacactggcaaactccaattctgtaacactatattttctctcatgtgtttttgtcactcgagatataaaacatatcggcacttcttggtcgttttgtatttgagacagaactcctgcaaatttttgtatggacgcatcagttcggagtataaaaggtaaattgtaaatggggtggtatattttcgttccttttgcgaattctcgttttaatgtttcgaaagcttcctcctgttcttctttccaattccattttattccttttttaagcaactttatcagagggatttccttttggctcaaatcgggaatcagttttttaaaataattaatcgtgccaagaaaacctctcaatgttttcaaattcgttggtcttgggtattcatctatgagcttgactctgtcttcggataatcttactgttttggtgtccaattgaaaacccaaataaatgacttctttttgaaaaaattgacatttttcaatgtttaatttcaatcccgctgtgtccaattcttccagaattatttctatgtgtttcagatgactctgagtatcttgtgaaaaaattaataaatcatcgatataatgaactatgaaatcttcgtggcgattcaaaatggtatgtagagctcggacgagtgcagcacaagcactctgcaatccaaacggcactaccttaaaccggtagacaataccatcaatagaaaaagcggtgtagtttctacacttttcagctaacggtatcaaccaaaaactgtgttttaagtcaattttcgaaaatatgtgtgacccggtgattcttccaaaaatggcctcgatgtttagaggtgattcatattgtgatacagtgtgctggttgatattcctggcatctaaacataatctcaattctccattgcttttctttactatcacaatcgggttaacatacggtgaatcacatctttcgatgatttgatcttccaacattttatttatttcttctttcacctcttgtcgatacttgtatggaatcgggtaagtctttgatcgaaaatttcccaagtttttcacctcaaatgaatgttcgtactttttagccactctgttttcctcattgatcaaattttcgtagtttcttaacatcaaccgcaattctttttctttcccttctccacatatcaattttctgtctttttttctcagattcttcacacatgtttaccgtgcattctgcatcctcgtttgcatatacctcctcttcaaataccactgtttcaatcatattcttttcactttcattttttagctttatttcttcttctcctgagctcgtctcttcttttgaggaatcccaggtttcctttgtttctgatactctcaaattttcttcttctgggctcaactcttcttttgaggagccacaggtttcattttcttttatctttttctgaccttttctcctttttcttctttgtccttgcttcgctgccaaattcatttccactgtttgttctttacctgattcgtccgtattttgtttctcatgttccttgtcctgttctttttctttttcttctgttagtttcatcgtattatttttaaaatctatcactacatgtttttctgccaattcgtcaactcctactatcatgtcatgtgacatgtttggcattattacacattgtagtgcatacatcttcttacccagtcgtaccattactcgtatgccttcatttatagttgccaatgtccgtttgtttgcgcccactaaatttaccctaggtattttgtaaattaaatttgttaagttaacttcttctattagttttctgttgaccaatgttatttcagatccagtgtctatcataattttaattggtttctcgttgataaatccatccacaaattttaaattaactccatttttcttttcgttgtttcttgccaatttaataaactccttggggttacaaaagattcctgtttgatttttggtttttagtgagcgccgtcgtgaaaagacgccggttgctcatcgttgtttatattttcgtcataatgtctctctccgtcatattcatctgtctgggtattatttacttctcttctattttctcttggtctgtcggatctgtttcggttttctcgatatccctgttcattttgtctaccattatttctgttttcttgatttgagcgtgtggtgtttctattctggtattctcgatttctgtcctcattccattgcctatttctttgttcataatttcctcttccgttgtctctattttcgttttcccttctgggattaaaatctcgtcttgtatagtccctcctattttgatttctatctctgtaatctgtgtttctcggggcctgtaatcttctcgcgaccttcttgattttctttctcttagacgtgattctcttatttgtaggaattggcataaactatctatgtctttgtagttttgcaatgtgatatggtcttccagcgtttcttcgaaatgtcttgcaatcagttcgactaattgttccgatgagtaattatattgtaaatgttttgcattattgtaaatttgcaaagcatatgtcctttctgatacacccatcctatcattgtatttcccattttgcaattccttgttaatttccaattgttggactttccccagaaataattcaaaaatttttgttcaaattgttgccaattgccgaattcttcttctttgctatcgaaccataggcttgcttcatatttgagatggtttctgatagtttcttttgctgtttcgaaatttccgatgtgctgtattttctttttcaggctatttatgaacggcactgggtgtaatcttcttacatccccgccaaaccttatcttcacgtcatctgtgctatgtataaccatttctcttctttctccgacattctgttgcgtcctgttttcggtgacttgtttttctatttctgtgattcttttttccacttcttctctgtctacttgaatagcattttccaacttattttccaaattttctagttcctttttctggccattcgttaactcctttattttatcttgaattttcatttcttgttcttgcatgtgatctttaa

SEQ ID NO: 930 - DNA, 6513 bp, Diabrotica virgifera
  SmartBlast Evalue=5E-79; Info=Pol polyprotein (Fragment) n=1 Tax=Drosophila buzzatii RepID=A1BPH1_DROBU
ggagttgcatcagttgtaatagtttatctattcctgataattcttgctgttctgatgccatgattgtcgtgtctaaaatatcttcttggtctgaatgttctttttgttttttgttgtctttgctttggcttcttgtcacagacatttgttttcaagaagtactgtccccgccaaatatgaaattttactagtatgttaccaagacgactttttctcacccaaatattataaattgtcaataaatatatcaaatgtaaatatcgtaaaaataaaatattaaatcagttatgtaaaatttgtacctaaagagatctaaaattttatgttatcaaatgtaagtatctcactttttaccacaggcatataaattttcaaataccggctttactctttctatccttcaaatttgccactagaaatactttacaatgctttccacgttggacgacagttgatgtgatcttgattattgatatgagataatattcttatatgtcatttaatttaatcaatgtattaatactaatctaattaatttaccagatcacatatcaatatgttttcaatctcagggctttttataaaattaattacttacttacgtggcttctaagtatttcttaatggttcctaatcgggataggaaagaaaagagtaaaataataacacatatgggttacaattgtaatcaaaatattgtttattttatttaaatggcaatcactgcttaatatttgctatatcttattattcttaaacataacatttacacatgggaatcttatttccttttggtttccaattgaaagtttttattaacatttaactattatgatttattagcaacaattctatttaagtttgatgaagcttttctgatattattgattatgtttcttcaattttaaatgtggtatttaatacgaaaaacccatacattcatgtccaaacaaatgagactgacctttttctggtgaactgagaatgtcttcacacaagacccgtttcctgctatccttggctgcaatcaaaacctcgtcctggcttccagtaatgttctcctttgaaactagctcgtatagctctcgttcctgcttctgtcgtgatgctgtgttctacctttttcgaaactgcaatcagctaccgggaactcttggctcaaggaggttcttttactctcaacctggcctacctctcgttccacgatagatactccacactcacggaactacaccggctttctcactctccgtacactaccgtctactactggacttcacttctcgacagctcaaaacattctgatctctatttgtcattcattcccctactttctaaatatcccttccagattcacaaatcaaacttccaccaccaactctcattcgcagtattcctcaaaaccaatttttaatctttctaaatatgcttaatggatttcaaagaaaatagttaattcccattctaaaattactttctactatttacaaatttaatgatctattatctacttccactaagtcttatttagcatcggctaatgatcgaaccttccgcgaacaacgataatgacctattatcgatttcacttgagtcttatttagcataggctaatgatcgaacctcccgcgaacaacgacaatggtacgcgccattcactttgttcattctaagcgcattgtcccgagtttcgtttaatcacttcttaaaattaaatataacaatttgttgtatacaggttgttctaaatttatatgcccgtggttgagaaaattgaaaatattttatattaaattgaattttgtttataattatcaaaatttaattttcatatcaaatagaaatataacaaatccccgccttgtattcgataaaatttatctgcatttttaaataaattttctcgaggcaaaaccaactccctgtatatttccttactttaatctacgtcttatatcctaacttactatctacttcatgtaattctgtcttttattcgtgatatttgtatacatcgtgaatattataaattcctcggatcttttccgagttcctgtgcctcaactcataactatttatcccattttcattattcacgatgtacgggccttcgaaaacaggcatcaactttgcgcaaatgcccccaggaagatttgatactcgtaatgccctcacgagtactttttcacccttttggaaagtcactggtcttctttttctattttgttcctgtctttggatatatttttcgttgcttcgccgtaatcttctctgtacggtttcaatcacctgttgatattcttttggctcttggtcttcccatggccttatcggcagtacacccttcatgatgtattctggggtctcttttgttactgtgctcggaattgtatttagatacctttctatttccgccattttcctgtcccagtggcgatgttgaccatctgttgcaatgcgaagaaatttcgtcacttcctgtatgaatcgttccgaaggattactctgtggatgcctgatgctgacaaaatttgtctctattcctcgttctcgaagttgtcccttgaaacgatcatttcggaaatacgttgcattgtccagtagaatcttttttggtgttcctactatggctataaaattgtcgatttttcttaatatctcctccccctttgtggtgcggcaactatataattttacgtattttgaaaacacatccaccattaccagaatatgtttgttccttttagtggtcataattagatcgcttaacatatctattgctacaatgtctagtttgtttcgggcttcaatatttttggcaacattttcgtttttgaaattccgactcttatatttttgacatacatcgcacttctgggtaatttcctttgcaatgcggtaatcctgtcggctgatgtaattttccctaaaaacgagccaaacttttctgctaccgatatgcccattgtcctcatgtaatttctttattatcttttcggccaatgtctgtgtcactaaatatagttcctttccgtctattctcttaaaatatatgtcattttctacttccgctcttcttttctctctttcctctaggtcttcttggtttgtccttatctcatttaacgaatatatcccttcttcttgtattaatctatttagtcccacctgtagagtaattgtttccttttttcccgtgtcctcatcccgtgttagagcgtcggctattatgttgtcttttccttttatatatcggaactcaaaatcatactcctgtaataatagaatgcctctatgtattctattatttactaatctattcttcatgatatgtactaaagctgcatggtttgtttcgattgtgaattttgctcccaataagtaaaacctcaatttgtttacgcaatatagtacactggcaaactccaattctgtaacactatattttctctcatgtgtttttgtcactcgagatataaaacatatcggcacttcttggtcgttttgtatttgagacagaactcctgcaaatttttgtatggacgcatcagttcggagtataaaaggtaaattgtaaatggggtggtatattttcgttccttttgcgaattctcgttttaatgtttcgaaagcttcctcctgttcttctttccaattccattttattccttttttaagcaactttatcagagggatttccttttggctcaaatcgggaatcagttttttaaaataattaatcgtgccaagaaaacctctcaatgttttcaaattcgttggtcttgggtattcatctatgagcttgactctgtcttcggataatcttactgttttggtgtccaattgaaaacccaaataaatgacttctttttgaaaaaattgacatttttcaatgtttaatttcaatcccgctgtgtccaattcttccagaattatttctatgtgtttcagatgactctgagtatcttgtgaaaaaattaataaatcatcgatataatgaactatgaaatcttcgtggcgattcaaaatggtatgtagagctcggacgagtgcagcacaagcactctgcaatccaaacggcactaccttaaaccggtagacaataccatcaatagaaaaagcggtgtagtttctacacttttcagctaacggtatcaaccaaaaactgtgttttaagtcaattttcgaaaatatgtgtgacccggtgattcttccaaaaatggcctcgatgtttagaggtgattcatattgtgatacagtgtgctggttgatattcctggcatctaaacataatctcaattctccattgcttttctttactatcacaatcgggttaacatacggtgaatcacatctttcgatgatttgatcttccaacattttatttatttcttctttcacctcttgtcgatacttgtatggaatcgggtaagtctttgatcgaaaatttcccaagtttttcacctcaaatgaatgttcgtactttttagccactctgttttcctcattgatcaaattttcgtagtttcttaacatcaaccgcaattctttttctttcccttctccacatatcaattttctgtctttttttctcagattcttcacacatgtttaccgtgcattctgcatcctcgtttgcatatacctcctcttcaaataccactgtttcaatcatattcttttcactttcattttttagctttatttcttcttctcctgagctcgtctcttcttttgaggaatcccaggtttcctttgtttctgatactctcaaattttcttcttctgggctcaactcttcttttgaggagccacaggtttcattttcttttatctttttctgaccttttctcctttttcttctttgtccttgcttcgctgccaaattcatttccactgtttgttctttacctgattcgtccgtattttgtttctcatgttccttgtcctgttctttttctttttcttctgttagtttcatcgtattatttttaaaatctatcactacatgtttttctgccaattcgtcaactcctactatcatgtcatgtgacatgtttggcattattacacattgtagtgcatacatcttcttacccagtcgtaccattactcgtatgccttcatttatagttgccaatgtccgtttgtttgcgcccactaaatttaccctaggtattttgtaaattaaatttgttaagttaacttcttctattagttttctgttgaccaatgttatttcagatccagtgtctatcataattttaattggtttctcgttgataaatccatccacaaattttaaattaactccatttttcttttcgttgtttcttgccaatttaataaactccttggggttacaaaagattcctgtttgatttttggtttttagtgagcgccgtcgtgaaaagacgccggttgctcatcgttgtttatattttcgtcataatgtctctctccgtcatattcatctgtctgggtattatttacttctcttctattttctcttggtctgtcggatctgtttcggttttctcgatatccctgttcattttgtctaccattatttctgttttcttgatttgagcgtgtggtgtttctattctggtattctcgatttctgtcctcattccattgcctatttctttgttcataatttcctcttccgttgtctctattttcgttttcccttctgggattaaaatctcgtcttgtatagtccctcctattttgatttctatctctgtaatctgtgtttctcggggcctgtaatcttctcgcgaccttcttgattttctttctcttagacgtgattctcttatttgtaggaattggcataaactatctatgtctttgtagttttgcaatgtgatatggtcttccagcgtttcttcgaaatgtcttgcaatcagttcgactaattgttccgatgagtaattatattgtaaatgttttgcattattgtaaatttgcaaagcatatgtcctttctgatacacccatcctatcattgtatttcccattttgcaattccttgttaatttccaattgttggactttccccagaaataattcaaaaatttttgttcaaattgttgccaattgccgaattcttcttctttgctatcgaaccataggcttgcttcatatttgagatggtttctgatagtttcttttgctgtttcgaaatttccgatgtgctgtattttctttttcaggctatttatgaacggcactgggtgtaatcttcttacatccccgccaaaccttatcttcacgtcatctgtgctatgtataaccatttctcttctttctccgacattctgttgcgtcctgttttcggtgacttgtttttctatttctgtgattcttttttccacttcttctctgtctacttgaatagcattttccaacttattttccaaattttctagttcctttttctggccattcgttaactcctttattttatcttgaattttcatttcttgttcttgcatgtgatctttaa

SEQ ID NO: 931 - DNA, 6419 bp, Diabrotica virgifera
  SmartBlast Evalue=5E-79; Info=Pol polyprotein (Fragment) n=1 Tax=Drosophila buzzatii RepID=A1BPH1_DROBU
ggagttgcatcagttgtaatagtttatctattcctgataattcttgctgttctgatgccatgattgtcgtgtctaaaatatcttcttggtctgaatgttctttttgttttttgttgtctttgctttggcttcttgtcacagacatttgttttcaagaagtactgtccccgccaaatatgaaattttactagtatgttaccaagacgactttttctcacccaaatattataaattgtcaataaatatatcaaatgtaaatatcgtaaaaataaaatattaaatcagttatgtaaaatttgtacctaaagagatctaaaattttatgttatcaaatgtaagtatctcactttttaccacaggcatataaattttcaaataccggctttactctttctatccttcaaatttgccactagaaatactttacaatgctttccacgttggacgacagttgatgtgatcttgattattgatatgagataatattcttatatgtcatttaatttaatcaatgtattaatactaatctaattaatttaccagatcacatatcaatatgttttcaatctcagggcgaattataaaattaattacttacttacgtggcttctaagtatttcttaatggttcctaatcgggataggaaagaaaagagtaaaataataacacatatgggttacaattgtaatcaaaatattgtttattttatttaaatggcaatcactgcttaatatttgctatatcttattattcttaaacataacatttacacatgggaatcttatttccttttggtttccaattgaaagtttttattaacatttaactattatgatttattagcaacaattctatttaagtttgatgaagcttttctgatattattgattatgtttcttcaattttaaatgtggtatttaatacgaaaaacccatacattcatgtccaaacaaatgagactgacctttttctggtgaactgagaatgtcttcacacaagacccgtttcctgctatccttggctgcaatcaaaacctcgtcctggcttccagtaatgttctcctttgaaactagctcgtatagctctcgttcctgcttctgtcgtgatgctgtgttctacctttttcgaaactgcaatcagctaccgggaactcttggctcaaggaggttcttttactctcaacctggcctacctctcgttccacgatagatactccacactcacggaactacaccggctttctcactctccgtacactaccgtctactactggacttcacttctcgacagctcaaaacattctgatctctatttgtcattcattcccctactttctaaatatcccttccagattcacaaatcaaacttccaccaccaactctcattcgcagtattcctcaaaaccaatttttaatctttctaaatatgcttaatggatttcaaagaaaatagttaattcccattctaaaattactttctactatttacaaatttaatgacctattctctatttccacttagtcttatttagcatcggctaatgatcgatccttccgcgaacaacgataatgacctattatcgatttcacttgagtcttatttaatcacttcttaaaattaaatataacaatttgttgtatacaggttgttctaaatttatatgcccgtggttgagaaaattgaaaatattttatattaaattgaattttgtttataattatcaaaatttaattttcatatcaaatagaaatataacaaatccccgccttgtattcgataaaatttatctgcatttttaaataaattttctcgaggcaaaaccaactccctgtatatttccttactttaatctacgtcttatatcctaacttactatctacttcatgtaattctgtcttttattcgtgatatttgtatacatcgtgaatattataaattcctcggatcttttccgagttcctgtgcctcaactcataactatttatcccattttcattattcacgatgtacgggccttcgaaaacaggcatcaactttgcgcaaatgcccccaggaagatttgatactcgtaatgccctcacgagtactttttcacccttttggaaagtcactggtcttctttttctattttgttcctgtctttggatatatttttcgttgcttcgccgtaatcttctctgtacggtttcaatcacctgttgatattcttttggctcttggtcttcccatggccttatcggcagtacacccttcatgatgtattctggggtctcttttgttactgtgctcggaattgtatttagatacctttctatttccgccattttcctgtcccagtggcgatgttgaccatctgttgcaatgcgaagaaatttcgtcacttcctgtatgaatcgttccgaaggattactctgtggatgcctgatgctgacaaaatttgtctctattcctcgttctcgaagttgtcccttgaaacgatcatttcggaaatacgttgcattgtccagtagaatcttttttggtgttcctactatggctataaaattgtcgatttttcttaatatctcctccccctttgtggtgcggcaactatataattttacgtattttgaaaacacatccaccattaccagaatatgtttgttccttttagtggtcataattagatcgcttaacatatctattgctacaatgtctagtttgtttcgggcttcaatatttttggcaacattttcgtttttgaaattccgactcttatatttttgacatacatcgcacttctgggtaatttcctttgcaatgcggtaatcctgtcggctgatgtaattttccctaaaaacgagccaaacttttctgctaccgatatgcccattgtcctcatgtaatttctttattatcttttcggccaatgtctgtgtcactaaatatagttcctttccgtctattctcttaaaatatatgtcattttctacttccgctcttcttttctctctttcctctaggtcttcttggtttgtccttatctcatttaacgaatatatcccttcttcttgtattaatctatttagtcccacctgtagagtaattgtttccttttttcccgtgtcctcatcccgtgttagagcgtcggctattatgttgtcttttccttttatatatcggaactcaaaatcatactcctgtaataatagaatgcctctatgtattctattatttactaatctattcttcatgatatgtactaaagctgcatggtttgtttcgattgtgaattttgctcccaataagtaaaacctcaatttgtttacgcaatatagtacactggcaaactccaattctgtaacactatattttctctcatgtgtttttgtcactcgagatataaaacatatcggcacttcttggtcgttttgtatttgagacagaactcctgcaaatttttgtatggacgcatcagttcggagtataaaaggtaaattgtaaatggggtggtatattttcgttccttttgcgaattctcgttttaatgtttcgaaagcttcctcctgttcttctttccaattccattttattccttttttaagcaactttatcagagggatttccttttggctcaaatcgggaatcagttttttaaaataattaatcgtgccaagaaaacctctcaatgttttcaaattcgttggtcttgggtattcatctatgagcttgactctgtcttcggataatcttactgttttggtgtccaattgaaaacccaaataaatgacttctttttgaaaaaattgacatttttcaatgtttaatttcaatcccgctgtgtccaattcttccagaattatttctatgtgtttcagatgactctgagtatcttgtgaaaaaattaataaatcatcgatataatgaactatgaaatcttcgtggcgattcaaaatggtatgtagagctcggacgagtgcagcacaagcactctgcaatccaaacggcactaccttaaaccggtagacaataccatcaatagaaaaagcggtgtagtttctacacttttcagctaacggtatcaaccaaaaactgtgttttaagtcaattttcgaaaatatgtgtgacccggtgattcttccaaaaatggcctcgatgtttagaggtgattcatattgtgatacagtgtgctggttgatattcctggcatctaaacataatctcaattctccattgcttttctttactatcacaatcgggttaacatacggtgaatcacatctttcgatgatttgatcttccaacattttatttatttcttctttcacctcttgtcgatacttgtatggaatcgggtaagtctttgatcgaaaatttcccaagtttttcacctcaaatgaatgttcgtactttttagccactctgttttcctcattgatcaaattttcgtagtttcttaacatcaaccgcaattctttttctttcccttctccacatatcaattttctgtctttttttctcagattcttcacacatgtttaccgtgcattctgcatcctcgtttgcatatacctcctcttcaaataccactgtttcaatcatattcttttcactttcattttttagctttatttcttcttctcctgagctcatctcttcttttgaggaatcccagttttcttttgcttttgatactctcaatttttcttcttctgggctcaactcttcttttgaggagccacaggtttcattttcttttgtctttttctgactttttctcccttttcttctttgtccttgcttcgttgccaaattcatttccactgtttgttctttacctgattcgtccgtattttgtttctcctgttccttgtcctgttcttcttctttttcttctgttagattcatcgtattatttttaaaatctatcactacatgtttttctgccaattcgtcaactcctactatcatgtcatgtgacatgtttggcattattacacattgtagtgcatacatcttcttacccagtcgtaccattactcgtatgccttcatttatagttgccaatgtccgtttgtttgcgcccactaaatttaccctaggtattttgtaaattaaatttgttaagttaacttcttctattagttttctgttgaccaatgttatttcagatccagtgtctatcataattttaattggtttctcgttgataaatccatccacaaattttaaattaactccatttttcttttcgttgtttcttgccaatttaataaactccttggggttacaaaagattcctgtttgatttttggtttttagtgagcgccgtcgtgaaaagacgccggttgctcatcgttgtttatattttcgtcataatgtctctctccgtcatattcatctgtctgggtattatttacttctcttctattttctcttggtctgtcggatctgtttcggttttctcgatatccctgttcattttgtctaccattatttctgttttcttgatttgagcgtgtggtgtttctattctggtattctcgatttctgtcctcattccattgcctatttctttgttcataatttcctcttccgttgtctctattttcgttttcccttctgggattaaaatctcgtcttgtatagtccctcctattttgatttctatctctgtaatctgtgtttctcggggcctgtaatcttctcgcgaccttcttgattttctttctcttagacgtgattctcttatttgtaggaattggcataaactatctatgtctttgtagttttgcaatgtgatatggtcttccagcgtttcttcgaaatgtcttgcaatcagttcgactaattgttccgatgagtaattatattgtaaatgttttgcattattgtaaatttgcaaagcatatgtcctttctgatacacccatcctatcattgtatttcccattttgcaattccttgttaatttccaattgttggactttccccagaaataattcaaaaatttttgttcaaattgttgccaattgccgaattcttcttctttgctatcgaaccataggcttgcttcatatttgagatggtttctgatagtttcttttgctgtttcgaaatttccgatgtgctgtattttctttttcaggctatttatgaacggcactgggtgtaatcttcttacatccccgccaaaccttatcttcacgtcatctgtgctatgtataaccatttctcttctttctccgacattctgttgcgtcctgttttcggtgacttgtttttctatttctgtgattcttttttccacttcttctctgtctacttgaatagcattttccaacttattttccaaattttctagttcctttttctggccattcgttaactcctttattttatcttgaattttcatttcttgttcttgcatgtgatctttaa

SEQ ID NO: 932 - DNA, 6419 bp, Diabrotica virgifera
  SmartBlast Evalue=5E-79; Info=Pol polyprotein (Fragment) n=1 Tax=Drosophila buzzatii RepID=A1BPH1_DROBU
ggagttgcatcagttgtaatagtttatctattcctgataattcttgctgttctgatgccatgattgtcgtgtctaaaatatcttcttggtctgaatgttctttttgttttttgttgtctttgctttggcttcttgtcacagacatttgttttcaagaagtactgtccccgccaaatatgaaattttactagtatgttaccaagacgactttttctcacccaaatattataaattgtcaataaatatatcaaatgtaaatatcgtaaaaataaaatattaaatcagttatgtaaaatttgtacctaaagagatctaaaattttatgttatcaaatgtaagtatctcactttttaccacaggcatataaattttcaaataccggctttactctttctatccttcaaatttgccactagaaatactttacaatgctttccacgttggacgacagttgatgtgatcttgattattgatatgagataatattcttatatgtcatttaatttaatcaatgtattaatactaatctaattaatttaccagatcacatatcaatatgttttcaatctcagggctttttataaaattaattacttacttacgtggcttctaagtatttcttaatggttcctaatcgggataggaaagaaaagagtaaaataataacacatatgggttacaattgtaatcaaaatattgtttattttatttaaatggcaatcactgcttaatatttgctatatcttattattcttaaacataacatttacacatgggaatcttatttccttttggtttccaattgaaagtttttattaacatttaactattatgatttattagcaacaattctatttaagtttgatgaagcttttctgatattattgattatgtttcttcaattttaaatgtggtatttaatacgaaaaacccatacattcatgtccaaacaaatgagactgacctttttctggtgaactgagaatgtcttcacacaagacccgtttcctgctatccttggctgcaatcaaaacctcgtcctggcttccagtaatgttctcctttgaaactagctcgtatagctctcgttcctgcttctgtcgtgatgctgtgttctacctttttcgaaactgcaatcagctaccgggaactcttggctcaaggaggttcttttactctcaacctggcctacctctcgttccacgatagatactccacactcacggaactacaccggctttctcactctccgtacactaccgtctactactggacttcacttctcgacagctcaaaacattctgatctctatttgtcattcattcccctactttctaaatatcccttccagattcacaaatcaaacttccaccaccaactctcattcgcagtattcctcaaaaccaatttttaatctttctaaatatgcttaatggatttcaaagaaaatagttaattcccattctaaaattactttctactatttacaaatttaatgacctattctctatttccacttagtcttatttagcatcggctaatgatcgatccttccgcgaacaacgataatgacctattatcgatttcacttgagtcttatttaatcacttcttaaaattaaatataacaatttgttgtatacaggttgttctaaatttatatgcccgtggttgagaaaattgaaaatattttatattaaattgaattttgtttataattatcaaaatttaattttcatatcaaatagaaatataacaaatccccgccttgtattcgataaaatttatctgcatttttaaataaattttctcgaggcaaaaccaactccctgtatatttccttactttaatctacgtcttatatcctaacttactatctacttcatgtaattctgtcttttattcgtgatatttgtatacatcgtgaatattataaattcctcggatcttttccgagttcctgtgcctcaactcataactatttatcccattttcattattcacgatgtacgggccttcgaaaacaggcatcaactttgcgcaaatgcccccaggaagatttgatactcgtaatgccctcacgagtactttttcacccttttggaaagtcactggtcttctttttctattttgttcctgtctttggatatatttttcgttgcttcgccgtaatcttctctgtacggtttcaatcacctgttgatattcttttggctcttggtcttcccatggccttatcggcagtacacccttcatgatgtattctggggtctcttttgttactgtgctcggaattgtatttagatacctttctatttccgccattttcctgtcccagtggcgatgttgaccatctgttgcaatgcgaagaaatttcgtcacttcctgtatgaatcgttccgaaggattactctgtggatgcctgatgctgacaaaatttgtctctattcctcgttctcgaagttgtcccttgaaacgatcatttcggaaatacgttgcattgtccagtagaatcttttttggtgttcctactatggctataaaattgtcgatttttcttaatatctcctccccctttgtggtgcggcaactatataattttacgtattttgaaaacacatccaccattaccagaatatgtttgttccttttagtggtcataattagatcgcttaacatatctattgctacaatgtctagtttgtttcgggcttcaatatttttggcaacattttcgtttttgaaattccgactcttatatttttgacatacatcgcacttctgggtaatttcctttgcaatgcggtaatcctgtcggctgatgtaattttccctaaaaacgagccaaacttttctgctaccgatatgcccattgtcctcatgtaatttctttattatcttttcggccaatgtctgtgtcactaaatatagttcctttccgtctattctcttaaaatatatgtcattttctacttccgctcttcttttctctctttcctctaggtcttcttggtttgtccttatctcatttaacgaatatatcccttcttcttgtattaatctatttagtcccacctgtagagtaattgtttccttttttcccgtgtcctcatcccgtgttagagcgtcggctattatgttgtcttttccttttatatatcggaactcaaaatcatactcctgtaataatagaatgcctctatgtattctattatttactaatctattcttcatgatatgtactaaagctgcatggtttgtttcgattgtgaattttgctcccaataagtaaaacctcaatttgtttacgcaatatagtacactggcaaactccaattctgtaacactatattttctctcatgtgtttttgtcactcgagatataaaacatatcggcacttcttggtcgttttgtatttgagacagaactcctgcaaatttttgtatggacgcatcagttcggagtataaaaggtaaattgtaaatggggtggtatattttcgttccttttgcgaattctcgttttaatgtttcgaaagcttcctcctgttcttctttccaattccattttattccttttttaagcaactttatcagagggatttccttttggctcaaatcgggaatcagttttttaaaataattaatcgtgccaagaaaacctctcaatgttttcaaattcgttggtcttgggtattcatctatgagcttgactctgtcttcggataatcttactgttttggtgtccaattgaaaacccaaataaatgacttctttttgaaaaaattgacatttttcaatgtttaatttcaatcccgctgtgtccaattcttccagaattatttctatgtgtttcagatgactctgagtatcttgtgaaaaaattaataaatcatcgatataatgaactatgaaatcttcgtggcgattcaaaatggtatgtagagctcggacgagtgcagcacaagcactctgcaatccaaacggcactaccttaaaccggtagacaataccatcaatagaaaaagcggtgtagtttctacacttttcagctaacggtatcaaccaaaaactgtgttttaagtcaattttcgaaaatatgtgtgacccggtgattcttccaaaaatggcctcgatgtttagaggtgattcatattgtgatacagtgtgctggttgatattcctggcatctaaacataatctcaattctccattgcttttctttactatcacaatcgggttaacatacggtgaatcacatctttcgatgatttgatcttccaacattttatttatttcttctttcacctcttgtcgatacttgtatggaatcgggtaagtctttgatcgaaaatttcccaagtttttcacctcaaatgaatgttcgtactttttagccactctgttttcctcattgatcaaattttcgtagtttcttaacatcaaccgcaattctttttctttcccttctccacatatcaattttctgtctttttttctcagattcttcacacatgtttaccgtgcattctgcatcctcgtttgcatatacctcctcttcaaataccactgtttcaatcatattcttttcactttcattttttagctttatttcttcttctcctgagctcatctcttcttttgaggaatcccagttttcttttgcttttgatactctcaatttttcttcttctgggctcaactcttcttttgaggagccacaggtttcattttcttttgtctttttctgactttttctcccttttcttctttgtccttgcttcgttgccaaattcatttccactgtttgttctttacctgattcgtccgtattttgtttctcctgttccttgtcctgttcttcttctttttcttctgttagattcatcgtattatttttaaaatctatcactacatgtttttctgccaattcgtcaactcctactatcatgtcatgtgacatgtttggcattattacacattgtagtgcatacatcttcttacccagtcgtaccattactcgtatgccttcatttatagttgccaatgtccgtttgtttgcgcccactaaatttaccctaggtattttgtaaattaaatttgttaagttaacttcttctattagttttctgttgaccaatgttatttcagatccagtgtctatcataattttaattggtttctcgttgataaatccatccacaaattttaaattaactccatttttcttttcgttgtttcttgccaatttaataaactccttggggttacaaaagattcctgtttgatttttggtttttagtgagcgccgtcgtgaaaagacgccggttgctcatcgttgtttatattttcgtcataatgtctctctccgtcatattcatctgtctgggtattatttacttctcttctattttctcttggtctgtcggatctgtttcggttttctcgatatccctgttcattttgtctaccattatttctgttttcttgatttgagcgtgtggtgtttctattctggtattctcgatttctgtcctcattccattgcctatttctttgttcataatttcctcttccgttgtctctattttcgttttcccttctgggattaaaatctcgtcttgtatagtccctcctattttgatttctatctctgtaatctgtgtttctcggggcctgtaatcttctcgcgaccttcttgattttctttctcttagacgtgattctcttatttgtaggaattggcataaactatctatgtctttgtagttttgcaatgtgatatggtcttccagcgtttcttcgaaatgtcttgcaatcagttcgactaattgttccgatgagtaattatattgtaaatgttttgcattattgtaaatttgcaaagcatatgtcctttctgatacacccatcctatcattgtatttcccattttgcaattccttgttaatttccaattgttggactttccccagaaataattcaaaaatttttgttcaaattgttgccaattgccgaattcttcttctttgctatcgaaccataggcttgcttcatatttgagatggtttctgatagtttcttttgctgtttcgaaatttccgatgtgctgtattttctttttcaggctatttatgaacggcactgggtgtaatcttcttacatccccgccaaaccttatcttcacgtcatctgtgctatgtataaccatttctcttctttctccgacattctgttgcgtcctgttttcggtgacttgtttttctatttctgtgattcttttttccacttcttctctgtctacttgaatagcattttccaacttattttccaaattttctagttcctttttctggccattcgttaactcctttattttatcttgaattttcatttcttgttcttgcatgtgatctttaa

SEQ ID NO: 933 - DNA, 6419 bp, Diabrotica virgifera
  SmartBlast Evalue=5E-79; Info=Pol polyprotein (Fragment) n=1 Tax=Drosophila buzzatii RepID=A1BPH1_DROBU
ggagttgcatcagttgtaatagtttatctattcctgataattcttgctgttctgatgccatgattgtcgtgtctaaaatatcttcttggtctgaatgttctttttgttttttgttgtctttgctttggcttcttgtcacagacatttgttttcaagaagtactgtccccgccaaatatgaaattttactagtatgttaccaagacgactttttctcacccaaatattataaattgtcaataaatatatcaaatgtaaatatcgtaaaaataaaatattaaatcagttatgtaaaatttgtacctaaagagatctaaaattttatgttatcaaatgtaagtatctcactttttaccacaggcatataaattttcaaataccggctttactctttctatccttcaaatttgccactagaaatactttacaatgctttccacgttggacgacagttgatgtgatcttgattattgatatgagataatattcttatatgtcatttaatttaatcaatgtattaatactaatctaattaatttaccagatcacatatcaatatgttttcaatctcagggcgaattataaaattaattacttacttacgtggcttctaagtatttcttaatggttcctaatcgggataggaaagaaaagagtaaaataataacacatatgggttacaattgtaatcaaaatattgtttattttatttaaatggcaatcactgcttaatatttgctatatcttattattcttaaacataacatttacacatgggaatcttatttccttttggtttccaattgaaagtttttattaacatttaactattatgatttattagcaacaattctatttaagtttgatgaagcttttctgatattattgattatgtttcttcaattttaaatgtggtatttaatacgaaaaacccatacattcatgtccaaacaaatgagactgacctttttctggtgaactgagaatgtcttcacacaagacccgtttcctgctatccttggctgcaatcaaaacctcgtcctggcttccagtaatgttctcctttgaaactagctcgtatagctctcgttcctgcttctgtcgtgatgctgtgttctacctttttcgaaactgcaatcagctaccgggaactcttggctcaaggaggttcttttactctcaacctggcctacctctcgttccacgatagatactccacactcacggaactacaccggctttctcactctccgtacactaccgtctactactggacttcacttctcgacagctcaaaacattctgatctctatttgtcattcattcccctactttctaaatatcccttccagattcacaaatcaaacttccaccaccaactctcattcgcagtattcctcaaaaccaatttttaatctttctaaatatgcttaatggatttcaaagaaaatagttaattcccattctaaaattactttctactatttacaaatttaatgacctattctctatttccacttagtcttatttagcatcggctaatgatcgatccttccgcgaacaacgataatgacctattatcgatttcacttgagtcttatttaatcacttcttaaaattaaatataacaatttgttgtatacaggttgttctaaatttatatgcccgtggttgagaaaattgaaaatattttatattaaattgaattttgtttataattatcaaaatttaattttcatatcaaatagaaatataacaaatccccgccttgtattcgataaaatttatctgcatttttaaataaattttctcgaggcaaaaccaactccctgtatatttccttactttaatctacgtcttatatcctaacttactatctacttcatgtaattctgtcttttattcgtgatatttgtatacatcgtgaatattataaattcctcggatcttttccgagttcctgtgcctcaactcataactatttatcccattttcattattcacgatgtacgggccttcgaaaacaggcatcaactttgcgcaaatgcccccaggaagatttgatactcgtaatgccctcacgagtactttttcacccttttggaaagtcactggtcttctttttctattttgttcctgtctttggatatatttttcgttgcttcgccgtaatcttctctgtacggtttcaatcacctgttgatattcttttggctcttggtcttcccatggccttatcggcagtacacccttcatgatgtattctggggtctcttttgttactgtgctcggaattgtatttagatacctttctatttccgccattttcctgtcccagtggcgatgttgaccatctgttgcaatgcgaagaaatttcgtcacttcctgtatgaatcgttccgaaggattactctgtggatgcctgatgctgacaaaatttgtctctattcctcgttctcgaagttgtcccttgaaacgatcatttcggaaatacgttgcattgtccagtagaatcttttttggtgttcctactatggctataaaattgtcgatttttcttaatatctcctccccctttgtggtgcggcaactatataattttacgtattttgaaaacacatccaccattaccagaatatgtttgttccttttagtggtcataattagatcgcttaacatatctattgctacaatgtctagtttgtttcgggcttcaatatttttggcaacattttcgtttttgaaattccgactcttatatttttgacatacatcgcacttctgggtaatttcctttgcaatgcggtaatcctgtcggctgatgtaattttccctaaaaacgagccaaacttttctgctaccgatatgcccattgtcctcatgtaatttctttattatcttttcggccaatgtctgtgtcactaaatatagttcctttccgtctattctcttaaaatatatgtcattttctacttccgctcttcttttctctctttcctctaggtcttcttggtttgtccttatctcatttaacgaatatatcccttcttcttgtattaatctatttagtcccacctgtagagtaattgtttccttttttcccgtgtcctcatcccgtgttagagcgtcggctattatgttgtcttttccttttatatatcggaactcaaaatcatactcctgtaataatagaatgcctctatgtattctattatttactaatctattcttcatgatatgtactaaagctgcatggtttgtttcgattgtgaattttgctcccaataagtaaaacctcaatttgtttacgcaatatagtacactggcaaactccaattctgtaacactatattttctctcatgtgtttttgtcactcgagatataaaacatatcggcacttcttggtcgttttgtatttgagacagaactcctgcaaatttttgtatggacgcatcagttcggagtataaaaggtaaattgtaaatggggtggtatattttcgttccttttgcgaattctcgttttaatgtttcgaaagcttcctcctgttcttctttccaattccattttattccttttttaagcaactttatcagagggatttccttttggctcaaatcgggaatcagttttttaaaataattaatcgtgccaagaaaacctctcaatgttttcaaattcgttggtcttgggtattcatctatgagcttgactctgtcttcggataatcttactgttttggtgtccaattgaaaacccaaataaatgacttctttttgaaaaaattgacatttttcaatgtttaatttcaatcccgctgtgtccaattcttccagaattatttctatgtgtttcagatgactctgagtatcttgtgaaaaaattaataaatcatcgatataatgaactatgaaatcttcgtggcgattcaaaatggtatgtagagctcggacgagtgcagcacaagcactctgcaatccaaacggcactaccttaaaccggtagacaataccatcaatagaaaaagcggtgtagtttctacacttttcagctaacggtatcaaccaaaaactgtgttttaagtcaattttcgaaaatatgtgtgacccggtgattcttccaaaaatggcctcgatgtttagaggtgattcatattgtgatacagtgtgctggttgatattcctggcatctaaacataatctcaattctccattgcttttctttactatcacaatcgggttaacatacggtgaatcacatctttcgatgatttgatcttccaacattttatttatttcttctttcacctcttgtcgatacttgtatggaatcgggtaagtctttgatcgaaaatttcccaagtttttcacctcaaatgaatgttcgtactttttagccactctgttttcctcattgatcaaattttcgtagtttcttaacatcaaccgcaattctttttctttcccttctccacatatcaattttctgtctttttttctcagattcttcacacatgtttaccgtgcattctgcatcctcgtttgcatatacctcctcttcaaataccactgtttcaatcatattcttttcactttcattttttagctttatttcttcttctcctgagctcgtctcttcttttgaggaatcccaggtttcctttgtttctgatactctcaaattttcttcttctgggctcaactcttcttttgaggagccacaggtttcattttcttttatctttttctgaccttttctcctttttcttctttgtccttgcttcgctgccaaattcatttccactgtttgttctttacctgattcgtccgtattttgtttctcatgttccttgtcctgttctttttctttttcttctgttagtttcatcgtattatttttaaaatctatcactacatgtttttctgccaattcgtcaactcctactatcatgtcatgtgacatgtttggcattattacacattgtagtgcatacatcttcttacccagtcgtaccattactcgtatgccttcatttatagttgccaatgtccgtttgtttgcgcccactaaatttaccctaggtattttgtaaattaaatttgttaagttaacttcttctattagttttctgttgaccaatgttatttcagatccagtgtctatcataattttaattggtttctcgttgataaatccatccacaaattttaaattaactccatttttcttttcgttgtttcttgccaatttaataaactccttggggttacaaaagattcctgtttgatttttggtttttagtgagcgccgtcgtgaaaagacgccggttgctcatcgttgtttatattttcgtcataatgtctctctccgtcatattcatctgtctgggtattatttacttctcttctattttctcttggtctgtcggatctgtttcggttttctcgatatccctgttcattttgtctaccattatttctgttttcttgatttgagcgtgtggtgtttctattctggtattctcgatttctgtcctcattccattgcctatttctttgttcataatttcctcttccgttgtctctattttcgttttcccttctgggattaaaatctcgtcttgtatagtccctcctattttgatttctatctctgtaatctgtgtttctcggggcctgtaatcttctcgcgaccttcttgattttctttctcttagacgtgattctcttatttgtaggaattggcataaactatctatgtctttgtagttttgcaatgtgatatggtcttccagcgtttcttcgaaatgtcttgcaatcagttcgactaattgttccgatgagtaattatattgtaaatgttttgcattattgtaaatttgcaaagcatatgtcctttctgatacacccatcctatcattgtatttcccattttgcaattccttgttaatttccaattgttggactttccccagaaataattcaaaaatttttgttcaaattgttgccaattgccgaattcttcttctttgctatcgaaccataggcttgcttcatatttgagatggtttctgatagtttcttttgctgtttcgaaatttccgatgtgctgtattttctttttcaggctatttatgaacggcactgggtgtaatcttcttacatccccgccaaaccttatcttcacgtcatctgtgctatgtataaccatttctcttctttctccgacattctgttgcgtcctgttttcggtgacttgtttttctatttctgtgattcttttttccacttcttctctgtctacttgaatagcattttccaacttattttccaaattttctagttcctttttctggccattcgttaactcctttattttatcttgaattttcatttcttgttcttgcatgtgatctttaa

SEQ ID NO: 934 - DNA, 6419 bp, Diabrotica virgifera
  SmartBlast Evalue=5E-79; Info=Pol polyprotein (Fragment) n=1 Tax=Drosophila buzzatii RepID=A1BPH1_DROBU
ggagttgcatcagttgtaatagtttatctattcctgataattcttgctgttctgatgccatgattgtcgtgtctaaaatatcttcttggtctgaatgttctttttgttttttgttgtctttgctttggcttcttgtcacagacatttgttttcaagaagtactgtccccgccaaatatgaaattttactagtatgttaccaagacgactttttctcacccaaatattataaattgtcaataaatatatcaaatgtaaatatcgtaaaaataaaatattaaatcagttatgtaaaatttgtacctaaagagatctaaaattttatgttatcaaatgtaagtatctcactttttaccacaggcatataaattttcaaataccggctttactctttctatccttcaaatttgccactagaaatactttacaatgctttccacgttggacgacagttgatgtgatcttgattattgatatgagataatattcttatatgtcatttaatttaatcaatgtattaatactaatctaattaatttaccagatcacatatcaatatgttttcaatctcagggctttttataaaattaattacttacttacgtggcttctaagtatttcttaatggttcctaatcgggataggaaagaaaagagtaaaataataacacatatgggttacaattgtaatcaaaatattgtttattttatttaaatggcaatcactgcttaatatttgctatatcttattattcttaaacataacatttacacatgggaatcttatttccttttggtttccaattgaaagtttttattaacatttaactattatgatttattagcaacaattctatttaagtttgatgaagcttttctgatattattgattatgtttcttcaattttaaatgtggtatttaatacgaaaaacccatacattcatgtccaaacaaatgagactgacctttttctggtgaactgagaatgtcttcacacaagacccgtttcctgctatccttggctgcaatcaaaacctcgtcctggcttccagtaatgttctcctttgaaactagctcgtatagctctcgttcctgcttctgtcgtgatgctgtgttctacctttttcgaaactgcaatcagctaccgggaactcttggctcaaggaggttcttttactctcaacctggcctacctctcgttccacgatagatactccacactcacggaactacaccggctttctcactctccgtacactaccgtctactactggacttcacttctcgacagctcaaaacattctgatctctatttgtcattcattcccctactttctaaatatcccttccagattcacaaatcaaacttccaccaccaactctcattcgcagtattcctcaaaaccaatttttaatctttctaaatatgcttaatggatttcaaagaaaatagttaattcccattctaaaattactttctactatttacaaatttaatgacctattctctatttccacttagtcttatttagcatcggctaatgatcgatccttccgcgaacaacgataatgacctattatcgatttcacttgagtcttatttaatcacttcttaaaattaaatataacaatttgttgtatacaggttgttctaaatttatatgcccgtggttgagaaaattgaaaatattttatattaaattgaattttgtttataattatcaaaatttaattttcatatcaaatagaaatataacaaatccccgccttgtattcgataaaatttatctgcatttttaaataaattttctcgaggcaaaaccaactccctgtatatttccttactttaatctacgtcttatatcctaacttactatctacttcatgtaattctgtcttttattcgtgatatttgtatacatcgtgaatattataaattcctcggatcttttccgagttcctgtgcctcaactcataactatttatcccattttcattattcacgatgtacgggccttcgaaaacaggcatcaactttgcgcaaatgcccccaggaagatttgatactcgtaatgccctcacgagtactttttcacccttttggaaagtcactggtcttctttttctattttgttcctgtctttggatatatttttcgttgcttcgccgtaatcttctctgtacggtttcaatcacctgttgatattcttttggctcttggtcttcccatggccttatcggcagtacacccttcatgatgtattctggggtctcttttgttactgtgctcggaattgtatttagatacctttctatttccgccattttcctgtcccagtggcgatgttgaccatctgttgcaatgcgaagaaatttcgtcacttcctgtatgaatcgttccgaaggattactctgtggatgcctgatgctgacaaaatttgtctctattcctcgttctcgaagttgtcccttgaaacgatcatttcggaaatacgttgcattgtccagtagaatcttttttggtgttcctactatggctataaaattgtcgatttttcttaatatctcctccccctttgtggtgcggcaactatataattttacgtattttgaaaacacatccaccattaccagaatatgtttgttccttttagtggtcataattagatcgcttaacatatctattgctacaatgtctagtttgtttcgggcttcaatatttttggcaacattttcgtttttgaaattccgactcttatatttttgacatacatcgcacttctgggtaatttcctttgcaatgcggtaatcctgtcggctgatgtaattttccctaaaaacgagccaaacttttctgctaccgatatgcccattgtcctcatgtaatttctttattatcttttcggccaatgtctgtgtcactaaatatagttcctttccgtctattctcttaaaatatatgtcattttctacttccgctcttcttttctctctttcctctaggtcttcttggtttgtccttatctcatttaacgaatatatcccttcttcttgtattaatctatttagtcccacctgtagagtaattgtttccttttttcccgtgtcctcatcccgtgttagagcgtcggctattatgttgtcttttccttttatatatcggaactcaaaatcatactcctgtaataatagaatgcctctatgtattctattatttactaatctattcttcatgatatgtactaaagctgcatggtttgtttcgattgtgaattttgctcccaataagtaaaacctcaatttgtttacgcaatatagtacactggcaaactccaattctgtaacactatattttctctcatgtgtttttgtcactcgagatataaaacatatcggcacttcttggtcgttttgtatttgagacagaactcctgcaaatttttgtatggacgcatcagttcggagtataaaaggtaaattgtaaatggggtggtatattttcgttccttttgcgaattctcgttttaatgtttcgaaagcttcctcctgttcttctttccaattccattttattccttttttaagcaactttatcagagggatttccttttggctcaaatcgggaatcagttttttaaaataattaatcgtgccaagaaaacctctcaatgttttcaaattcgttggtcttgggtattcatctatgagcttgactctgtcttcggataatcttactgttttggtgtccaattgaaaacccaaataaatgacttctttttgaaaaaattgacatttttcaatgtttaatttcaatcccgctgtgtccaattcttccagaattatttctatgtgtttcagatgactctgagtatcttgtgaaaaaattaataaatcatcgatataatgaactatgaaatcttcgtggcgattcaaaatggtatgtagagctcggacgagtgcagcacaagcactctgcaatccaaacggcactaccttaaaccggtagacaataccatcaatagaaaaagcggtgtagtttctacacttttcagctaacggtatcaaccaaaaactgtgttttaagtcaattttcgaaaatatgtgtgacccggtgattcttccaaaaatggcctcgatgtttagaggtgattcatattgtgatacagtgtgctggttgatattcctggcatctaaacataatctcaattctccattgcttttctttactatcacaatcgggttaacatacggtgaatcacatctttcgatgatttgatcttccaacattttatttatttcttctttcacctcttgtcgatacttgtatggaatcgggtaagtctttgatcgaaaatttcccaagtttttcacctcaaatgaatgttcgtactttttagccactctgttttcctcattgatcaaattttcgtagtttcttaacatcaaccgcaattctttttctttcccttctccacatatcaattttctgtctttttttctcagattcttcacacatgtttaccgtgcattctgcatcctcgtttgcatatacctcctcttcaaataccactgtttcaatcatattcttttcactttcattttttagctttatttcttcttctcctgagctcgtctcttcttttgaggaatcccaggtttcctttgtttctgatactctcaaattttcttcttctgggctcaactcttcttttgaggagccacaggtttcattttcttttatctttttctgaccttttctcctttttcttctttgtccttgcttcgctgccaaattcatttccactgtttgttctttacctgattcgtccgtattttgtttctcatgttccttgtcctgttctttttctttttcttctgttagtttcatcgtattatttttaaaatctatcactacatgtttttctgccaattcgtcaactcctactatcatgtcatgtgacatgtttggcattattacacattgtagtgcatacatcttcttacccagtcgtaccattactcgtatgccttcatttatagttgccaatgtccgtttgtttgcgcccactaaatttaccctaggtattttgtaaattaaatttgttaagttaacttcttctattagttttctgttgaccaatgttatttcagatccagtgtctatcataattttaattggtttctcgttgataaatccatccacaaattttaaattaactccatttttcttttcgttgtttcttgccaatttaataaactccttggggttacaaaagattcctgtttgatttttggtttttagtgagcgccgtcgtgaaaagacgccggttgctcatcgttgtttatattttcgtcataatgtctctctccgtcatattcatctgtctgggtattatttacttctcttctattttctcttggtctgtcggatctgtttcggttttctcgatatccctgttcattttgtctaccattatttctgttttcttgatttgagcgtgtggtgtttctattctggtattctcgatttctgtcctcattccattgcctatttctttgttcataatttcctcttccgttgtctctattttcgttttcccttctgggattaaaatctcgtcttgtatagtccctcctattttgatttctatctctgtaatctgtgtttctcggggcctgtaatcttctcgcgaccttcttgattttctttctcttagacgtgattctcttatttgtaggaattggcataaactatctatgtctttgtagttttgcaatgtgatatggtcttccagcgtttcttcgaaatgtcttgcaatcagttcgactaattgttccgatgagtaattatattgtaaatgttttgcattattgtaaatttgcaaagcatatgtcctttctgatacacccatcctatcattgtatttcccattttgcaattccttgttaatttccaattgttggactttccccagaaataattcaaaaatttttgttcaaattgttgccaattgccgaattcttcttctttgctatcgaaccataggcttgcttcatatttgagatggtttctgatagtttcttttgctgtttcgaaatttccgatgtgctgtattttctttttcaggctatttatgaacggcactgggtgtaatcttcttacatccccgccaaaccttatcttcacgtcatctgtgctatgtataaccatttctcttctttctccgacattctgttgcgtcctgttttcggtgacttgtttttctatttctgtgattcttttttccacttcttctctgtctacttgaatagcattttccaacttattttccaaattttctagttcctttttctggccattcgttaactcctttattttatcttgaattttcatttcttgttcttgcatgtgatctttaa

SEQ ID NO: 935 - DNA, 5402 bp, Diabrotica virgifera
  SmartBlast Evalue=5E-79; Info=Pol polyprotein (Fragment) n=1 Tax=Drosophila buzzatii RepID=A1BPH1_DROBU
tcactttgtcatccattcccctactttctaaatatcccttccagattcacaaatcaatcttccaccaccaactctcattcgtaatattcctcaaaaccaatttttaatctttctaaatatgcttaatggatttcaaaagaaaatatttaattcccattctaaaatactttctaactatttacaaattttaatgacctattctctctttcaaatgagtcttatttagcataggctaatgatcgaaaccttccgcgaaaaacgataatgaactatcatctatttcactgagttttatttagcataggctaatgatcgaccttccgagaagaacgataatggtacgcgtcattcactttgtttatctaagcacattgttccgagtttcgtacgcttattctaatcacttcttaaaattacataaacaatttgttgtatacaggttgttctaaatttatatgcccgtggttgagaaaattgaaaatattttatattaaattgaattttgtttataattatcaaaatttaattttcatatcaaatagaaatataacaaatccccgccttgtattcgataaaatttatctgcatttttaaataaattttctcgaggcaaaaccaactccctgtatatttccttactttaatctacgtcttatatcctaacttactatctacttcatgtaattctgtcttttattcgtgatatttgtatacatcgtgaatattataaattcctcggatcttttccgagttcctgtgcctcaactcataactatttatcccattttcattattcacgatgtacgggccttcgaaaacaggcatcaactttgcgcaaatgcccccaggaagatttgatactcgtaatgccctcacgagtactttttcacccttttggaaagtcactggtcttctttttctattttgttcctgtctttggatatatttttcgttgcttcgccgtaatcttctctgtacggtttcaatcacctgttgatattcttttggctcttggtcttcccatggccttatcggcagtacacccttcatgatgtattctggggtctcttttgttactgtgctcggaattgtatttagatacctttctatttccgccattttcctgtcccagtggcgatgttgaccatctgttgcaatgcgaagaaatttcgtcacttcctgtatgaatcgttccgaaggattactctgtggatgcctgatgctgacaaaatttgtctctattcctcgttctcgaagttgtcccttgaaacgatcatttcggaaatacgttgcattgtccagtagaatcttttttggtgttcctactatggctataaaattgtcgatttttcttaatatctcctccccctttgtggtgcggcaactatataattttacgtattttgaaaacacatccaccattaccagaatatgtttgttccttttagtggtcataattagatcgcttaacatatctattgctacaatgtctagtttgtttcgggcttcaatatttttggcaacattttcgtttttgaaattccgactcttatatttttgacatacatcgcacttctgggtaatttcctttgcaatgcggtaatcctgtcggctgatgtaattttccctaaaaacgagccaaacttttctgctaccgatatgcccattgtcctcatgtaatttctttattatcttttcggccaatgtctgtgtcactaaatatagttcctttccgtctattctcttaaaatatatgtcattttctacttccgctcttcttttctctctttcctctaggtcttcttggtttgtccttatctcatttaacgaatatatcccttcttcttgtattaatctatttagtcccacctgtagagtaattgtttccttttttcccgtgtcctcatcccgtgttagagcgtcggctattatgttgtcttttccttttatatatcggaactcaaaatcatactcctgtaataatagaatgcctctatgtattctattatttactaatctattcttcatgatatgtactaaagctgcatggtttgtttcgattgtgaattttgctcccaataagtaaaacctcaatttgtttacgcaatatagtacactggcaaactccaattctgtaacactatattttctctcatgtgtttttgtcactcgagatataaaacatatcggcacttcttggtcgttttgtatttgagacagaactcctgcaaatttttgtatggacgcatcagttcggagtataaaaggtaaattgtaaatggggtggtatattttcgttccttttgcgaattctcgttttaatgtttcgaaagcttcctcctgttcttctttccaattccattttattccttttttaagcaactttatcagagggatttccttttggctcaaatcgggaatcagttttttaaaataattaatcgtgccaagaaaacctctcaatgttttcaaattcgttggtcttgggtattcatctatgagcttgactctgtcttcggataatcttactgttttggtgtccaattgaaaacccaaataaatgacttctttttgaaaaaattgacatttttcaatgtttaatttcaatcccgctgtgtccaattcttccagaattatttctatgtgtttcagatgactctgagtatcttgtgaaaaaattaataaatcatcgatataatgaactatgaaatcttcgtggcgattcaaaatggtatgtagagctcggacgagtgcagcacaagcactctgcaatccaaacggcactaccttaaaccggtagacaataccatcaatagaaaaagcggtgtagtttctacacttttcagctaacggtatcaaccaaaaactgtgttttaagtcaattttcgaaaatatgtgtgacccggtgattcttccaaaaatggcctcgatgtttagaggtgattcatattgtgatacagtgtgctggttgatattcctggcatctaaacataatctcaattctccattgcttttctttactatcacaatcgggttaacatacggtgaatcacatctttcgatgatttgatcttccaacattttatttatttcttctttcacctcttgtcgatacttgtatggaatcgggtaagtctttgatcgaaaatttcccaagtttttcacctcaaatgaatgttcgtactttttagccactctgttttcctcattgatcaaattttcgtagtttcttaacatcaaccgcaattctttttctttcccttctccacatatcaattttctgtctttttttctcagattcttcacacatgtttaccgtgcattctgcatcctcgtttgcatatacctcctcttcaaataccactgtttcaatcatattcttttcactttcattttttagctttatttcttcttctcctgagctcatctcttcttttgaggaatcccagttttcttttgcttttgatactctcaatttttcttcttctgggctcaactcttcttttgaggagccacaggtttcattttcttttgtctttttctgactttttctcccttttcttctttgtccttgcttcgttgccaaattcatttccactgtttgttctttacctgattcgtccgtattttgtttctcctgttccttgtcctgttcttcttctttttcttctgttagattcatcgtattatttttaaaatctatcactacatgtttttctgccaattcgtcaactcctactatcatgtcatgtgacatgtttggcattattacacattgtagtgcatacatcttcttacccagtcgtaccattactcgtatgccttcatttatagttgccaatgtccgtttgtttgcgcccactaaatttaccctaggtattttgtaaattaaatttgttaagttaacttcttctattagttttctgttgaccaatgttatttcagatccagtgtctatcataattttaattggtttctcgttgataaatccatccacaaattttaaattaactccatttttcttttcgttgtttcttgccaatttaataaactccttggggttacaaaagattcctgtttgatttttggtttttagtgagcgccgtcgtgaaaagacgccggttgctcatcgttgtttatattttcgtcataatgtctctctccgtcatattcatctgtctgggtattatttacttctcttctattttctcttggtctgtcggatctgtttcggttttctcgatatccctgttcattttgtctaccattatttctgttttcttgatttgagcgtgtggtgtttctattctggtattctcgatttctgtcctcattccattgcctatttctttgttcataatttcctcttccgttgtctctattttcgttttcccttctgggattaaaatctcgtcttgtatagtccctcctattttgatttctatctctgtaatctgtgtttctcggggcctgtaatcttctcgcgaccttcttgattttctttctcttagacgtgattctcttatttgtaggaattggcataaactatctatgtctttgtagttttgcaatgtgatatggtcttccagcgtttcttcgaaatgtcttgcaatcagttcgactaattgttccgatgagtaattatattgtaaatgttttgcattattgtaaatttgcaaagcatatgtcctttctgatacacccatcctatcattgtatttcccattttgcaattccttgttaatttccaattgttggactttccccagaaataattcaaaaatttttgttcaaattgttgccaattgccgaattcttcttctttgctatcgaaccataggcttgcttcatatttgagatggtttctgatagtttcttttgctgtttcgaaatttccgatgtgctgtattttctttttcaggctatttatgaacggcactgggtgtaatcttcttacatccccgccaaaccttatcttcacgtcatctgtgctatgtataaccatttctcttctttctccgacattctgttgcgtattgatttccgcaatctttctttccacttcttctatgtctgcttgaatagcgttttgcaacttgttttccaaactttccatttcttttttctggcaattcgttatctccttcattttgattttgatttctttaatctctatctcttgttctcccatctcgttcttgatcattgtcaaacatccttttacttccttttcatacttttctatgcgttcctccattttcttgttgttctcttctattgcttgtttcatttttttgttgtgtttgatccattttttgatccaatttttgttgtgtttcctccattttttgttgtgtttcatccattttttgatccactttatctattttctttgatgtttc

SEQ ID NO: 936 - DNA, 5402 bp, Diabrotica virgifera
  SmartBlast Evalue=5E-79; Info=Pol polyprotein (Fragment) n=1 Tax=Drosophila buzzatii RepID=A1BPH1_DROBU
tcactttgtcatccattcccctactttctaaatatcccttccagattcacaaatcaatcttccaccaccaactctcattcgtaatattcctcaaaaccaatttttaatctttctaaatatgcttaatggatttcaaaagaaaatatttaattcccattctaaaatactttctaactatttacaaattttaatgacctattctctctttcaaatgagtcttatttagcataggctaatgatcgaaaccttccgcgaaaaacgataatgaactatcatctatttcactgagttttatttagcataggctaatgatcgaccttccgagaagaacgataatggtacgcgtcattcactttgtttatctaagcacattgttccgagtttcgtacgcttattctaatcacttcttaaaattacataaacaatttgttgtatacaggttgttctaaatttatatgcccgtggttgagaaaattgaaaatattttatattaaattgaattttgtttataattatcaaaatttaattttcatatcaaatagaaatataacaaatccccgccttgtattcgataaaatttatctgcatttttaaataaattttctcgaggcaaaaccaactccctgtatatttccttactttaatctacgtcttatatcctaacttactatctacttcatgtaattctgtcttttattcgtgatatttgtatacatcgtgaatattataaattcctcggatcttttccgagttcctgtgcctcaactcataactatttatcccattttcattattcacgatgtacgggccttcgaaaacaggcatcaactttgcgcaaatgcccccaggaagatttgatactcgtaatgccctcacgagtactttttcacccttttggaaagtcactggtcttctttttctattttgttcctgtctttggatatatttttcgttgcttcgccgtaatcttctctgtacggtttcaatcacctgttgatattcttttggctcttggtcttcccatggccttatcggcagtacacccttcatgatgtattctggggtctcttttgttactgtgctcggaattgtatttagatacctttctatttccgccattttcctgtcccagtggcgatgttgaccatctgttgcaatgcgaagaaatttcgtcacttcctgtatgaatcgttccgaaggattactctgtggatgcctgatgctgacaaaatttgtctctattcctcgttctcgaagttgtcccttgaaacgatcatttcggaaatacgttgcattgtccagtagaatcttttttggtgttcctactatggctataaaattgtcgatttttcttaatatctcctccccctttgtggtgcggcaactatataattttacgtattttgaaaacacatccaccattaccagaatatgtttgttccttttagtggtcataattagatcgcttaacatatctattgctacaatgtctagtttgtttcgggcttcaatatttttggcaacattttcgtttttgaaattccgactcttatatttttgacatacatcgcacttctgggtaatttcctttgcaatgcggtaatcctgtcggctgatgtaattttccctaaaaacgagccaaacttttctgctaccgatatgcccattgtcctcatgtaatttctttattatcttttcggccaatgtctgtgtcactaaatatagttcctttccgtctattctcttaaaatatatgtcattttctacttccgctcttcttttctctctttcctctaggtcttcttggtttgtccttatctcatttaacgaatatatcccttcttcttgtattaatctatttagtcccacctgtagagtaattgtttccttttttcccgtgtcctcatcccgtgttagagcgtcggctattatgttgtcttttccttttatatatcggaactcaaaatcatactcctgtaataatagaatgcctctatgtattctattatttactaatctattcttcatgatatgtactaaagctgcatggtttgtttcgattgtgaattttgctcccaataagtaaaacctcaatttgtttacgcaatatagtacactggcaaactccaattctgtaacactatattttctctcatgtgtttttgtcactcgagatataaaacatatcggcacttcttggtcgttttgtatttgagacagaactcctgcaaatttttgtatggacgcatcagttcggagtataaaaggtaaattgtaaatggggtggtatattttcgttccttttgcgaattctcgttttaatgtttcgaaagcttcctcctgttcttctttccaattccattttattccttttttaagcaactttatcagagggatttccttttggctcaaatcgggaatcagttttttaaaataattaatcgtgccaagaaaacctctcaatgttttcaaattcgttggtcttgggtattcatctatgagcttgactctgtcttcggataatcttactgttttggtgtccaattgaaaacccaaataaatgacttctttttgaaaaaattgacatttttcaatgtttaatttcaatcccgctgtgtccaattcttccagaattatttctatgtgtttcagatgactctgagtatcttgtgaaaaaattaataaatcatcgatataatgaactatgaaatcttcgtggcgattcaaaatggtatgtagagctcggacgagtgcagcacaagcactctgcaatccaaacggcactaccttaaaccggtagacaataccatcaatagaaaaagcggtgtagtttctacacttttcagctaacggtatcaaccaaaaactgtgttttaagtcaattttcgaaaatatgtgtgacccggtgattcttccaaaaatggcctcgatgtttagaggtgattcatattgtgatacagtgtgctggttgatattcctggcatctaaacataatctcaattctccattgcttttctttactatcacaatcgggttaacatacggtgaatcacatctttcgatgatttgatcttccaacattttatttatttcttctttcacctcttgtcgatacttgtatggaatcgggtaagtctttgatcgaaaatttcccaagtttttcacctcaaatgaatgttcgtactttttagccactctgttttcctcattgatcaaattttcgtagtttcttaacatcaaccgcaattctttttctttcccttctccacatatcaattttctgtctttttttctcagattcttcacacatgtttaccgtgcattctgcatcctcgtttgcatatacctcctcttcaaataccactgtttcaatcatattcttttcactttcattttttagctttatttcttcttctcctgagctcgtctcttcttttgaggaatcccaggtttcctttgtttctgatactctcaaattttcttcttctgggctcaactcttcttttgaggagccacaggtttcattttcttttatctttttctgaccttttctcctttttcttctttgtccttgcttcgctgccaaattcatttccactgtttgttctttacctgattcgtccgtattttgtttctcatgttccttgtcctgttctttttctttttcttctgttagtttcatcgtattatttttaaaatctatcactacatgtttttctgccaattcgtcaactcctactatcatgtcatgtgacatgtttggcattattacacattgtagtgcatacatcttcttacccagtcgtaccattactcgtatgccttcatttatagttgccaatgtccgtttgtttgcgcccactaaatttaccctaggtattttgtaaattaaatttgttaagttaacttcttctattagttttctgttgaccaatgttatttcagatccagtgtctatcataattttaattggtttctcgttgataaatccatccacaaattttaaattaactccatttttcttttcgttgtttcttgccaatttaataaactccttggggttacaaaagattcctgtttgatttttggtttttagtgagcgccgtcgtgaaaagacgccggttgctcatcgttgtttatattttcgtcataatgtctctctccgtcatattcatctgtctgggtattatttacttctcttctattttctcttggtctgtcggatctgtttcggttttctcgatatccctgttcattttgtctaccattatttctgttttcttgatttgagcgtgtggtgtttctattctggtattctcgatttctgtcctcattccattgcctatttctttgttcataatttcctcttccgttgtctctattttcgttttcccttctgggattaaaatctcgtcttgtatagtccctcctattttgatttctatctctgtaatctgtgtttctcggggcctgtaatcttctcgcgaccttcttgattttctttctcttagacgtgattctcttatttgtaggaattggcataaactatctatgtctttgtagttttgcaatgtgatatggtcttccagcgtttcttcgaaatgtcttgcaatcagttcgactaattgttccgatgagtaattatattgtaaatgttttgcattattgtaaatttgcaaagcatatgtcctttctgatacacccatcctatcattgtatttcccattttgcaattccttgttaatttccaattgttggactttccccagaaataattcaaaaatttttgttcaaattgttgccaattgccgaattcttcttctttgctatcgaaccataggcttgcttcatatttgagatggtttctgatagtttcttttgctgtttcgaaatttccgatgtgctgtattttctttttcaggctatttatgaacggcactgggtgtaatcttcttacatccccgccaaaccttatcttcacgtcatctgtgctatgtataaccatttctcttctttctccgacattctgttgcgtattgatttccgcaatctttctttccacttcttctatgtctgcttgaatagcgttttgcaacttgttttccaaactttccatttcttttttctggcaattcgttatctccttcattttgattttgatttctttaatctctatctcttgttctcccatctcgttcttgatcattgtcaaacatccttttacttccttttcatacttttctatgcgttcctccattttcttgttgttctcttctattgcttgtttcatttttttgttgtgtttgatccattttttgatccaatttttgttgtgtttcctccattttttgttgtgtttcatccattttttgatccactttatctattttctttgatgtttc

SEQ ID NO: 937 - DNA, 5288 bp, Diabrotica virgifera
  SmartBlast Evalue=4E-79; Info=Pol polyprotein (Fragment) n=1 Tax=Drosophila buzzatii RepID=A1BPH1_DROBU
ttccagattcacaaatcaaaattccaccaccaactctcattcgcagtattcctcaaaaccaatttttaaactttctaaatatgcttaatggatttcaaaagaaaatagttaattcccattctaaaattactttctactaattacaaaatttaatgatctattatctacttccactaagtcttatttagcatcggctaatgatcgaaccttccgcgaacaacgataatgacctattatcgatttcacttgagttttattttaagcgcattgtcccgagtttcgtttaatcacttcttaaaattaaataacaatttgttgtatacaggttgttctaaatttatatgcccgtggttgagaaaattgaaaatattttatattaaattgaattttgtttataattatcaaaatttaattttcatatcaaatagaaatataacaaatccccgccttgtattcgataaaatttatctgcatttttaaataaattttctcgaggcaaaaccaactccctgtatatttccttactttaatctacgtcttatatcctaacttactatctacttcatgtaattctgtcttttattcgtgatatttgtatacatcgtgaatattataaattcctcggatcttttccgagttcctgtgcctcaactcataactatttatcccattttcattattcacgatgtacgggccttcgaaaacaggcatcaactttgcgcaaatgcccccaggaagatttgatactcgtaatgccctcacgagtactttttcacccttttggaaagtcactggtcttctttttctattttgttcctgtctttggatatatttttcgttgcttcgccgtaatcttctctgtacggtttcaatcacctgttgatattcttttggctcttggtcttcccatggccttatcggcagtacacccttcatgatgtattctggggtctcttttgttactgtgctcggaattgtatttagatacctttctatttccgccattttcctgtcccagtggcgatgttgaccatctgttgcaatgcgaagaaatttcgtcacttcctgtatgaatcgttccgaaggattactctgtggatgcctgatgctgacaaaatttgtctctattcctcgttctcgaagttgtcccttgaaacgatcatttcggaaatacgttgcattgtccagtagaatcttttttggtgttcctactatggctataaaattgtcgatttttcttaatatctcctccccctttgtggtgcggcaactatataattttacgtattttgaaaacacatccaccattaccagaatatgtttgttccttttagtggtcataattagatcgcttaacatatctattgctacaatgtctagtttgtttcgggcttcaatatttttggcaacattttcgtttttgaaattccgactcttatatttttgacatacatcgcacttctgggtaatttcctttgcaatgcggtaatcctgtcggctgatgtaattttccctaaaaacgagccaaacttttctgctaccgatatgcccattgtcctcatgtaatttctttattatcttttcggccaatgtctgtgtcactaaatatagttcctttccgtctattctcttaaaatatatgtcattttctacttccgctcttcttttctctctttcctctaggtcttcttggtttgtccttatctcatttaacgaatatatcccttcttcttgtattaatctatttagtcccacctgtagagtaattgtttccttttttcccgtgtcctcatcccgtgttagagcgtcggctattatgttgtcttttccttttatatatcggaactcaaaatcatactcctgtaataatagaatgcctctatgtattctattatttactaatctattcttcatgatatgtactaaagctgcatggtttgtttcgattgtgaattttgctcccaataagtaaaacctcaatttgtttacgcaatatagtacactggcaaactccaattctgtaacactatattttctctcatgtgtttttgtcactcgagatataaaacatatcggcacttcttggtcgttttgtatttgagacagaactcctgcaaatttttgtatggacgcatcagttcggagtataaaaggtaaattgtaaatggggtggtatattttcgttccttttgcgaattctcgttttaatgtttcgaaagcttcctcctgttcttctttccaattccattttattccttttttaagcaactttatcagagggatttccttttggctcaaatcgggaatcagttttttaaaataattaatcgtgccaagaaaacctctcaatgttttcaaattcgttggtcttgggtattcatctatgagcttgactctgtcttcggataatcttactgttttggtgtccaattgaaaacccaaataaatgacttctttttgaaaaaattgacatttttcaatgtttaatttcaatcccgctgtgtccaattcttccagaattatttctatgtgtttcagatgactctgagtatcttgtgaaaaaattaataaatcatcgatataatgaactatgaaatcttcgtggcgattcaaaatggtatgtagagctcggacgagtgcagcacaagcactctgcaatccaaacggcactaccttaaaccggtagacaataccatcaatagaaaaagcggtgtagtttctacacttttcagctaacggtatcaaccaaaaactgtgttttaagtcaattttcgaaaatatgtgtgacccggtgattcttccaaaaatggcctcgatgtttagaggtgattcatattgtgatacagtgtgctggttgatattcctggcatctaaacataatctcaattctccattgcttttctttactatcacaatcgggttaacatacggtgaatcacatctttcgatgatttgatcttccaacattttatttatttcttctttcacctcttgtcgatacttgtatggaatcgggtaagtctttgatcgaaaatttcccaagtttttcacctcaaatgaatgttcgtactttttagccactctgttttcctcattgatcaaattttcgtagtttcttaacatcaaccgcaattctttttctttcccttctccacatatcaattttctgtctttttttctcagattcttcacacatgtttaccgtgcattctgcatcctcgtttgcatatacctcctcttcaaataccactgtttcaatcatattcttttcactttcattttttagctttatttcttcttctcctgagctcatctcttcttttgaggaatcccagttttcttttgcttttgatactctcaatttttcttcttctgggctcaactcttcttttgaggagccacaggtttcattttcttttgtctttttctgactttttctcccttttcttctttgtccttgcttcgttgccaaattcatttccactgtttgttctttacctgattcgtccgtattttgtttctcctgttccttgtcctgttcttcttctttttcttctgttagattcatcgtattatttttaaaatctatcactacatgtttttctgccaattcgtcaactcctactatcatgtcatgtgacatgtttggcattattacacattgtagtgcatacatcttcttacccagtcgtaccattactcgtatgccttcatttatagttgccaatgtccgtttgtttgcgcccactaaatttaccctaggtattttgtaaattaaatttgttaagttaacttcttctattagttttctgttgaccaatgttatttcagatccagtgtctatcataattttaattggtttctcgttgataaatccatccacaaattttaaattaactccatttttcttttcgttgtttcttgccaatttaataaactccttggggttacaaaagattcctgtttgatttttggtttttagtgagcgccgtcgtgaaaagacgccggttgctcatcgttgtttatattttcgtcataatgtctctctccgtcatattcatctgtctgggtattatttacttctcttctattttctcttggtctgtcggatctgtttcggttttctcgatatccctgttcattttgtctaccattatttctgttttcttgatttgagcgtgtggtgtttctattctggtattctcgatttctgtcctcattccattgcctatttctttgttcataatttcctcttccgttgtctctattttcgttttcccttctgggattaaaatctcgtcttgtatagtccctcctattttgatttctatctctgtaatctgtgtttctcggggcctgtaatcttctcgcgaccttcttgattttctttctcttagacgtgattctcttatttgtaggaattggcataaactatctatgtctttgtagttttgcaatgtgatatggtcttccagcgtttcttcgaaatgtcttgcaatcagttcgactaattgttccgatgagtaattatattgtaaatgttttgcattattgtaaatttgcaaagcatatgtcctttctgatacacccatcctatcattgtatttcccattttgcaattccttgttaatttccaattgttggactttccccagaaataattcaaaaatttttgttcaaattgttgccaattgccgaattcttcttctttgctatcgaaccataggcttgcttcatatttgagatggtttctgatagtttcttttgctgtttcgaaatttccgatgtgctgtattttctttttcaggctatttatgaacggcactgggtgtaatcttcttacatccccgccaaaccttatcttcacgtcatctgtgctatgtataaccatttctcttctttctccgacattctgttgcgtattgatttccgcaatctttctttccacttcttctatgtctgcttgaatagcgttttgcaacttgttttccaaactttccatttcttttttctggcaattcgttatctccttcattttgattttgatttctttaatctctatctcttgttctcccatctcgttcttgatcattgtcaaacatccttttacttccttttcatacttttctatgcgttcctccattttcttgttgttctcttctattgcttgtttcatttttttgttgtgtttgatccattttttgatccaatttttgttgtgtttcctccattttttgttgtgtttcatccattttttgatccactttatctattttctttgatgtttc

SEQ ID NO: 938 - DNA, 6701 bp, Diabrotica virgifera
  SmartBlast Evalue=6E-79; Info=Pol polyprotein (Fragment) n=1 Tax=Drosophila buzzatii RepID=A1BPH1_DROBU
ggagttgcatcagttgtaatagtttatctattcctgataattcttgctgttctgatgccatgattgtcgtgtctaaaatatcttcttggtctgaatgttctttttgttttttgttgtctttgctttggcttcttgtcacagacatttgttttcaagaagtactgtccccgccaaatatgaaattttactagtatgttaccaagacgactttttctcacccaaatattataaattgtcaataaatatatcaaatgtaaatatcgtaaaaataaaatattaaatcagttatgtaaaatttgtacctaaagagatctaaaattttatgttatcaaatgtaagtatctcactttttaccacaggcatataaattttcaaataccggctttactctttctatccttcaaatttgccactagaaatactttacaatgctttccacgttggacgacagttgatgtgatcttgattattgatatgagataatattcttatatgtcatttaatttaatcaatgtattaatactaatctaattaatttaccagatcacatatcaatatgttttcaatctcagggcgaattataaaattaattacttacttacgtggcttctaagtatttcttaatggttcctaatcgggataggaaagaaaagagtaaaataataacacatatgggttacaattgtaatcaaaatattgtttattttatttaaatggcaatcactgcttaatatttgctatatcttattattcttaaacataacatttacacatgggaatcttatttccttttggtttccaattgaaagtttttattaacatttaactattatgatttattagcaacaattctatttaagtttgatgaagcttttctgatattattgattatgtttcttcaattttaaatgtggtatttaatacgaaaaacccatacattcatgtccaaacaaatgagactgacctttttctggtgaactgagaatgtcttcacacaagacccgtttcctgctatccttggctgcaatcaaaacctcgtcctggcttccagtaatgttctcctttgaaactagctcgtatagctctcgttcctgcttctgtcgtgatgctgtgttctacctttttcgaaactgcaatcagctaccgggaactcttggctcaaggaggttcttttactctcaacctggcctacctctcgttccacgatagatactccacactcacggaactacaccggctttctcactctccgtacactaccgtctactactggacttcacttctcgacagctcaaaacattctgatctctatttgtcattcattcccctactttctaaatatcccttccagattcacaaatcaaacttccaccaccaactctcattcgcagtattcctcaaaaccaatttttaatctttctaaatatgcttaatggatttcaaagaaaatagttaattcccattctaaaattactttctactatttacaaatttaatgatctattatctacttccactaagtcttatttagcatcggctaatgatcgaaccttccgcgaacaacgataatgacctattatcgatttcacttgagtcttatttagcataggctaatgatcgaacctcccgcgaacaacgacaatggtacgcgccattcactttgttcattctaagcgcattgtcccgagtttcgtttaatcacttcttaaaattaaatataacaatttgttgtatacaggttgttctaaatttatatgcccgtggttgagaaaattgaaaatattttatattaaattgaattttgtttataattatcaaaatttaattttcatatcaaatagaaatataacaaatccccgccttgtattcgataaaatttatctgcatttttaaataaattttctcgaggcaaaaccaactccctgtatatttccttactttaatctacgtcttatatcctaacttactatctacttcatgtaattctgtcttttattcgtgatatttgtatacatcgtgaatattataaattcctcggatcttttccgagttcctgtgcctcaactcataactatttatcccattttcattattcacgatgtacgggccttcgaaaacaggcatcaactttgcgcaaatgcccccaggaagatttgatactcgtaatgccctcacgagtactttttcacccttttggaaagtcactggtcttctttttctattttgttcctgtctttggatatatttttcgttgcttcgccgtaatcttctctgtacggtttcaatcacctgttgatattcttttggctcttggtcttcccatggccttatcggcagtacacccttcatgatgtattctggggtctcttttgttactgtgctcggaattgtatttagatacctttctatttccgccattttcctgtcccagtggcgatgttgaccatctgttgcaatgcgaagaaatttcgtcacttcctgtatgaatcgttccgaaggattactctgtggatgcctgatgctgacaaaatttgtctctattcctcgttctcgaagttgtcccttgaaacgatcatttcggaaatacgttgcattgtccagtagaatcttttttggtgttcctactatggctataaaattgtcgatttttcttaatatctcctccccctttgtggtgcggcaactatataattttacgtattttgaaaacacatccaccattaccagaatatgtttgttccttttagtggtcataattagatcgcttaacatatctattgctacaatgtctagtttgtttcgggcttcaatatttttggcaacattttcgtttttgaaattccgactcttatatttttgacatacatcgcacttctgggtaatttcctttgcaatgcggtaatcctgtcggctgatgtaattttccctaaaaacgagccaaacttttctgctaccgatatgcccattgtcctcatgtaatttctttattatcttttcggccaatgtctgtgtcactaaatatagttcctttccgtctattctcttaaaatatatgtcattttctacttccgctcttcttttctctctttcctctaggtcttcttggtttgtccttatctcatttaacgaatatatcccttcttcttgtattaatctatttagtcccacctgtagagtaattgtttccttttttcccgtgtcctcatcccgtgttagagcgtcggctattatgttgtcttttccttttatatatcggaactcaaaatcatactcctgtaataatagaatgcctctatgtattctattatttactaatctattcttcatgatatgtactaaagctgcatggtttgtttcgattgtgaattttgctcccaataagtaaaacctcaatttgtttacgcaatatagtacactggcaaactccaattctgtaacactatattttctctcatgtgtttttgtcactcgagatataaaacatatcggcacttcttggtcgttttgtatttgagacagaactcctgcaaatttttgtatggacgcatcagttcggagtataaaaggtaaattgtaaatggggtggtatattttcgttccttttgcgaattctcgttttaatgtttcgaaagcttcctcctgttcttctttccaattccattttattccttttttaagcaactttatcagagggatttccttttggctcaaatcgggaatcagttttttaaaataattaatcgtgccaagaaaacctctcaatgttttcaaattcgttggtcttgggtattcatctatgagcttgactctgtcttcggataatcttactgttttggtgtccaattgaaaacccaaataaatgacttctttttgaaaaaattgacatttttcaatgtttaatttcaatcccgctgtgtccaattcttccagaattatttctatgtgtttcagatgactctgagtatcttgtgaaaaaattaataaatcatcgatataatgaactatgaaatcttcgtggcgattcaaaatggtatgtagagctcggacgagtgcagcacaagcactctgcaatccaaacggcactaccttaaaccggtagacaataccatcaatagaaaaagcggtgtagtttctacacttttcagctaacggtatcaaccaaaaactgtgttttaagtcaattttcgaaaatatgtgtgacccggtgattcttccaaaaatggcctcgatgtttagaggtgattcatattgtgatacagtgtgctggttgatattcctggcatctaaacataatctcaattctccattgcttttctttactatcacaatcgggttaacatacggtgaatcacatctttcgatgatttgatcttccaacattttatttatttcttctttcacctcttgtcgatacttgtatggaatcgggtaagtctttgatcgaaaatttcccaagtttttcacctcaaatgaatgttcgtactttttagccactctgttttcctcattgatcaaattttcgtagtttcttaacatcaaccgcaattctttttctttcccttctccacatatcaattttctgtctttttttctcagattcttcacacatgtttaccgtgcattctgcatcctcgtttgcatatacctcctcttcaaataccactgtttcaatcatattcttttcactttcattttttagctttatttcttcttctcctgagctcatctcttcttttgaggaatcccagttttcttttgcttttgatactctcaatttttcttcttctgggctcaactcttcttttgaggagccacaggtttcattttcttttgtctttttctgactttttctcccttttcttctttgtccttgcttcgttgccaaattcatttccactgtttgttctttacctgattcgtccgtattttgtttctcctgttccttgtcctgttcttcttctttttcttctgttagattcatcgtattatttttaaaatctatcactacatgtttttctgccaattcgtcaactcctactatcatgtcatgtgacatgtttggcattattacacattgtagtgcatacatcttcttacccagtcgtaccattactcgtatgccttcatttatagttgccaatgtccgtttgtttgcgcccactaaatttaccctaggtattttgtaaattaaatttgttaagttaacttcttctattagttttctgttgaccaatgttatttcagatccagtgtctatcataattttaattggtttctcgttgataaatccatccacaaattttaaattaactccatttttcttttcgttgtttcttgccaatttaataaactccttggggttacaaaagattcctgtttgatttttggtttttagtgagcgccgtcgtgaaaagacgccggttgctcatcgttgtttatattttcgtcataatgtctctctccgtcatattcatctgtctgggtattatttacttctcttctattttctcttggtctgtcggatctgtttcggttttctcgatatccctgttcattttgtctaccattatttctgttttcttgatttgagcgtgtggtgtttctattctggtattctcgatttctgtcctcattccattgcctatttctttgttcataatttcctcttccgttgtctctattttcgttttcccttctgggattaaaatctcgtcttgtatagtccctcctattttgatttctatctctgtaatctgtgtttctcggggcctgtaatcttctcgcgaccttcttgattttctttctcttagacgtgattctcttatttgtaggaattggcataaactatctatgtctttgtagttttgcaatgtgatatggtcttccagcgtttcttcgaaatgtcttgcaatcagttcgactaattgttccgatgagtaattatattgtaaatgttttgcattattgtaaatttgcaaagcatatgtcctttctgatacacccatcctatcattgtatttcccattttgcaattccttgttaatttccaattgttggactttccccagaaataattcaaaaatttttgttcaaattgttgccaattgccgaattcttcttctttgctatcgaaccataggcttgcttcatatttgagatggtttctgatagtttcttttgctgtttcgaaatttccgatgtgctgtattttctttttcaggctatttatgaacggcactgggtgtaatcttcttacatccccgccaaaccttatcttcacgtcatctgtgctatgtataaccatttctcttctttctccgacattctgttgcgtattgatttccgcaatctttctttccacttcttctatgtctgcttgaatagcgttttgcaacttgttttccaaactttccatttcttttttctggcaattcgttatctccttcattttgattttgatttctttaatctctatctcttgttctcccatctcgttcttgatcattgtcaaacatccttttacttccttttcatacttttctatgcgttcctccattttcttgttgttctcttctattgcttgtttcatttttttgttgtgtttgatccattttttgatccaatttttgttgtgtttcctccattttttgttgtgtttcatccattttttgatccactttatctattttctttgatgtttc

SEQ ID NO: 939 - DNA, 5288 bp, Diabrotica virgifera
  SmartBlast Evalue=4E-79; Info=Pol polyprotein (Fragment) n=1 Tax=Drosophila buzzatii RepID=A1BPH1_DROBU
ttccagattcacaaatcaaaattccaccaccaactctcattcgcagtattcctcaaaaccaatttttaaactttctaaatatgcttaatggatttcaaaagaaaatagttaattcccattctaaaattactttctactaattacaaaatttaatgatctattatctacttccactaagtcttatttagcatcggctaatgatcgaaccttccgcgaacaacgataatgacctattatcgatttcacttgagttttattttaagcgcattgtcccgagtttcgtttaatcacttcttaaaattaaataacaatttgttgtatacaggttgttctaaatttatatgcccgtggttgagaaaattgaaaatattttatattaaattgaattttgtttataattatcaaaatttaattttcatatcaaatagaaatataacaaatccccgccttgtattcgataaaatttatctgcatttttaaataaattttctcgaggcaaaaccaactccctgtatatttccttactttaatctacgtcttatatcctaacttactatctacttcatgtaattctgtcttttattcgtgatatttgtatacatcgtgaatattataaattcctcggatcttttccgagttcctgtgcctcaactcataactatttatcccattttcattattcacgatgtacgggccttcgaaaacaggcatcaactttgcgcaaatgcccccaggaagatttgatactcgtaatgccctcacgagtactttttcacccttttggaaagtcactggtcttctttttctattttgttcctgtctttggatatatttttcgttgcttcgccgtaatcttctctgtacggtttcaatcacctgttgatattcttttggctcttggtcttcccatggccttatcggcagtacacccttcatgatgtattctggggtctcttttgttactgtgctcggaattgtatttagatacctttctatttccgccattttcctgtcccagtggcgatgttgaccatctgttgcaatgcgaagaaatttcgtcacttcctgtatgaatcgttccgaaggattactctgtggatgcctgatgctgacaaaatttgtctctattcctcgttctcgaagttgtcccttgaaacgatcatttcggaaatacgttgcattgtccagtagaatcttttttggtgttcctactatggctataaaattgtcgatttttcttaatatctcctccccctttgtggtgcggcaactatataattttacgtattttgaaaacacatccaccattaccagaatatgtttgttccttttagtggtcataattagatcgcttaacatatctattgctacaatgtctagtttgtttcgggcttcaatatttttggcaacattttcgtttttgaaattccgactcttatatttttgacatacatcgcacttctgggtaatttcctttgcaatgcggtaatcctgtcggctgatgtaattttccctaaaaacgagccaaacttttctgctaccgatatgcccattgtcctcatgtaatttctttattatcttttcggccaatgtctgtgtcactaaatatagttcctttccgtctattctcttaaaatatatgtcattttctacttccgctcttcttttctctctttcctctaggtcttcttggtttgtccttatctcatttaacgaatatatcccttcttcttgtattaatctatttagtcccacctgtagagtaattgtttccttttttcccgtgtcctcatcccgtgttagagcgtcggctattatgttgtcttttccttttatatatcggaactcaaaatcatactcctgtaataatagaatgcctctatgtattctattatttactaatctattcttcatgatatgtactaaagctgcatggtttgtttcgattgtgaattttgctcccaataagtaaaacctcaatttgtttacgcaatatagtacactggcaaactccaattctgtaacactatattttctctcatgtgtttttgtcactcgagatataaaacatatcggcacttcttggtcgttttgtatttgagacagaactcctgcaaatttttgtatggacgcatcagttcggagtataaaaggtaaattgtaaatggggtggtatattttcgttccttttgcgaattctcgttttaatgtttcgaaagcttcctcctgttcttctttccaattccattttattccttttttaagcaactttatcagagggatttccttttggctcaaatcgggaatcagttttttaaaataattaatcgtgccaagaaaacctctcaatgttttcaaattcgttggtcttgggtattcatctatgagcttgactctgtcttcggataatcttactgttttggtgtccaattgaaaacccaaataaatgacttctttttgaaaaaattgacatttttcaatgtttaatttcaatcccgctgtgtccaattcttccagaattatttctatgtgtttcagatgactctgagtatcttgtgaaaaaattaataaatcatcgatataatgaactatgaaatcttcgtggcgattcaaaatggtatgtagagctcggacgagtgcagcacaagcactctgcaatccaaacggcactaccttaaaccggtagacaataccatcaatagaaaaagcggtgtagtttctacacttttcagctaacggtatcaaccaaaaactgtgttttaagtcaattttcgaaaatatgtgtgacccggtgattcttccaaaaatggcctcgatgtttagaggtgattcatattgtgatacagtgtgctggttgatattcctggcatctaaacataatctcaattctccattgcttttctttactatcacaatcgggttaacatacggtgaatcacatctttcgatgatttgatcttccaacattttatttatttcttctttcacctcttgtcgatacttgtatggaatcgggtaagtctttgatcgaaaatttcccaagtttttcacctcaaatgaatgttcgtactttttagccactctgttttcctcattgatcaaattttcgtagtttcttaacatcaaccgcaattctttttctttcccttctccacatatcaattttctgtctttttttctcagattcttcacacatgtttaccgtgcattctgcatcctcgtttgcatatacctcctcttcaaataccactgtttcaatcatattcttttcactttcattttttagctttatttcttcttctcctgagctcgtctcttcttttgaggaatcccaggtttcctttgtttctgatactctcaaattttcttcttctgggctcaactcttcttttgaggagccacaggtttcattttcttttatctttttctgaccttttctcctttttcttctttgtccttgcttcgctgccaaattcatttccactgtttgttctttacctgattcgtccgtattttgtttctcatgttccttgtcctgttctttttctttttcttctgttagtttcatcgtattatttttaaaatctatcactacatgtttttctgccaattcgtcaactcctactatcatgtcatgtgacatgtttggcattattacacattgtagtgcatacatcttcttacccagtcgtaccattactcgtatgccttcatttatagttgccaatgtccgtttgtttgcgcccactaaatttaccctaggtattttgtaaattaaatttgttaagttaacttcttctattagttttctgttgaccaatgttatttcagatccagtgtctatcataattttaattggtttctcgttgataaatccatccacaaattttaaattaactccatttttcttttcgttgtttcttgccaatttaataaactccttggggttacaaaagattcctgtttgatttttggtttttagtgagcgccgtcgtgaaaagacgccggttgctcatcgttgtttatattttcgtcataatgtctctctccgtcatattcatctgtctgggtattatttacttctcttctattttctcttggtctgtcggatctgtttcggttttctcgatatccctgttcattttgtctaccattatttctgttttcttgatttgagcgtgtggtgtttctattctggtattctcgatttctgtcctcattccattgcctatttctttgttcataatttcctcttccgttgtctctattttcgttttcccttctgggattaaaatctcgtcttgtatagtccctcctattttgatttctatctctgtaatctgtgtttctcggggcctgtaatcttctcgcgaccttcttgattttctttctcttagacgtgattctcttatttgtaggaattggcataaactatctatgtctttgtagttttgcaatgtgatatggtcttccagcgtttcttcgaaatgtcttgcaatcagttcgactaattgttccgatgagtaattatattgtaaatgttttgcattattgtaaatttgcaaagcatatgtcctttctgatacacccatcctatcattgtatttcccattttgcaattccttgttaatttccaattgttggactttccccagaaataattcaaaaatttttgttcaaattgttgccaattgccgaattcttcttctttgctatcgaaccataggcttgcttcatatttgagatggtttctgatagtttcttttgctgtttcgaaatttccgatgtgctgtattttctttttcaggctatttatgaacggcactgggtgtaatcttcttacatccccgccaaaccttatcttcacgtcatctgtgctatgtataaccatttctcttctttctccgacattctgttgcgtattgatttccgcaatctttctttccacttcttctatgtctgcttgaatagcgttttgcaacttgttttccaaactttccatttcttttttctggcaattcgttatctccttcattttgattttgatttctttaatctctatctcttgttctcccatctcgttcttgatcattgtcaaacatccttttacttccttttcatacttttctatgcgttcctccattttcttgttgttctcttctattgcttgtttcatttttttgttgtgtttgatccattttttgatccaatttttgttgtgtttcctccattttttgttgtgtttcatccattttttgatccactttatctattttctttgatgtttc

SEQ ID NO: 940 - DNA, 5214 bp, Diabrotica virgifera
  SmartBlast Evalue=4E-79; Info=Pol polyprotein (Fragment) n=1 Tax=Drosophila buzzatii RepID=A1BPH1_DROBU
tcactttgtcatccattcccctactttctaaatatcccttccagattcacaaatcaatcttccaccaccaactctcattcgtaatattcctcaaaaccaatttttaatctttctaaatatgcttaatggatttcaaaagaaaatatttaattcccattctaaaatactttctaactatttacaaattttaatgacctattctctctttcaaatgagtcttatttagcataggctaatgatcgaaaccttccgcgaaaaacgataatgaactatcatctatttcactgagttttatttagcataggctaatgatcgaccttccgagaagaacgataatggtacgcgtcattcactttgtttatctaagcacattgttccgagtttcgtacgcttattctaatcacttcttaaaattacataaacaatttgttgtatacaggttgttctaaatttatatgcccgtggttgagaaaattgaaaatattttatattaaattgaattttgtttataattatcaaaatttaattttcatatcaaatagaaatataacaaatccccgccttgtattcgataaaatttatctgcatttttaaataaattttctcgaggcaaaaccaactccctgtatatttccttactttaatctacgtcttatatcctaacttactatctacttcatgtaattctgtcttttattcgtgatatttgtatacatcgtgaatattataaattcctcggatcttttccgagttcctgtgcctcaactcataactatttatcccattttcattattcacgatgtacgggccttcgaaaacaggcatcaactttgcgcaaatgcccccaggaagatttgatactcgtaatgccctcacgagtactttttcacccttttggaaagtcactggtcttctttttctattttgttcctgtctttggatatatttttcgttgcttcgccgtaatcttctctgtacggtttcaatcacctgttgatattcttttggctcttggtcttcccatggccttatcggcagtacacccttcatgatgtattctggggtctcttttgttactgtgctcggaattgtatttagatacctttctatttccgccattttcctgtcccagtggcgatgttgaccatctgttgcaatgcgaagaaatttcgtcacttcctgtatgaatcgttccgaaggattactctgtggatgcctgatgctgacaaaatttgtctctattcctcgttctcgaagttgtcccttgaaacgatcatttcggaaatacgttgcattgtccagtagaatcttttttggtgttcctactatggctataaaattgtcgatttttcttaatatctcctccccctttgtggtgcggcaactatataattttacgtattttgaaaacacatccaccattaccagaatatgtttgttccttttagtggtcataattagatcgcttaacatatctattgctacaatgtctagtttgtttcgggcttcaatatttttggcaacattttcgtttttgaaattccgactcttatatttttgacatacatcgcacttctgggtaatttcctttgcaatgcggtaatcctgtcggctgatgtaattttccctaaaaacgagccaaacttttctgctaccgatatgcccattgtcctcatgtaatttctttattatcttttcggccaatgtctgtgtcactaaatatagttcctttccgtctattctcttaaaatatatgtcattttctacttccgctcttcttttctctctttcctctaggtcttcttggtttgtccttatctcatttaacgaatatatcccttcttcttgtattaatctatttagtcccacctgtagagtaattgtttccttttttcccgtgtcctcatcccgtgttagagcgtcggctattatgttgtcttttccttttatatatcggaactcaaaatcatactcctgtaataatagaatgcctctatgtattctattatttactaatctattcttcatgatatgtactaaagctgcatggtttgtttcgattgtgaattttgctcccaataagtaaaacctcaatttgtttacgcaatatagtacactggcaaactccaattctgtaacactatattttctctcatgtgtttttgtcactcgagatataaaacatatcggcacttcttggtcgttttgtatttgagacagaactcctgcaaatttttgtatggacgcatcagttcggagtataaaaggtaaattgtaaatggggtggtatattttcgttccttttgcgaattctcgttttaatgtttcgaaagcttcctcctgttcttctttccaattccattttattccttttttaagcaactttatcagagggatttccttttggctcaaatcgggaatcagttttttaaaataattaatcgtgccaagaaaacctctcaatgttttcaaattcgttggtcttgggtattcatctatgagcttgactctgtcttcggataatcttactgttttggtgtccaattgaaaacccaaataaatgacttctttttgaaaaaattgacatttttcaatgtttaatttcaatcccgctgtgtccaattcttccagaattatttctatgtgtttcagatgactctgagtatcttgtgaaaaaattaataaatcatcgatataatgaactatgaaatcttcgtggcgattcaaaatggtatgtagagctcggacgagtgcagcacaagcactctgcaatccaaacggcactaccttaaaccggtagacaataccatcaatagaaaaagcggtgtagtttctacacttttcagctaacggtatcaaccaaaaactgtgttttaagtcaattttcgaaaatatgtgtgacccggtgattcttccaaaaatggcctcgatgtttagaggtgattcatattgtgatacagtgtgctggttgatattcctggcatctaaacataatctcaattctccattgcttttctttactatcacaatcgggttaacatacggtgaatcacatctttcgatgatttgatcttccaacattttatttatttcttctttcacctcttgtcgatacttgtatggaatcgggtaagtctttgatcgaaaatttcccaagtttttcacctcaaatgaatgttcgtactttttagccactctgttttcctcattgatcaaattttcgtagtttcttaacatcaaccgcaattctttttctttcccttctccacatatcaattttctgtctttttttctcagattcttcacacatgtttaccgtgcattctgcatcctcgtttgcatatacctcctcttcaaataccactgtttcaatcatattcttttcactttcattttttagctttatttcttcttctcctgagctcatctcttcttttgaggaatcccagttttcttttgcttttgatactctcaatttttcttcttctgggctcaactcttcttttgaggagccacaggtttcattttcttttgtctttttctgactttttctcccttttcttctttgtccttgcttcgttgccaaattcatttccactgtttgttctttacctgattcgtccgtattttgtttctcctgttccttgtcctgttcttcttctttttcttctgttagattcatcgtattatttttaaaatctatcactacatgtttttctgccaattcgtcaactcctactatcatgtcatgtgacatgtttggcattattacacattgtagtgcatacatcttcttacccagtcgtaccattactcgtatgccttcatttatagttgccaatgtccgtttgtttgcgcccactaaatttaccctaggtattttgtaaattaaatttgttaagttaacttcttctattagttttctgttgaccaatgttatttcagatccagtgtctatcataattttaattggtttctcgttgataaatccatccacaaattttaaattaactccatttttcttttcgttgtttcttgccaatttaataaactccttggggttacaaaagattcctgtttgatttttggtttttagtgagcgccgtcgtgaaaagacgccggttgctcatcgttgtttatattttcgtcataatgtctctctccgtcatattcatctgtctgggtattatttacttctcttctattttctcttggtctgtcggatctgtttcggttttctcgatatccctgttcattttgtctaccattatttctgttttcttgatttgagcgtgtggtgtttctattctggtattctcgatttctgtcctcattccattgcctatttctttgttcataatttcctcttccgttgtctctattttcgttttcccttctgggattaaaatctcgtcttgtatagtccctcctattttgatttctatctctgtaatctgtgtttctcggggcctgtaatcttctcgcgaccttcttgattttctttctcttagacgtgattctcttatttgtaggaattggcataaactatctatgtctttgtagttttgcaatgtgatatggtcttccagcgtttcttcgaaatgtcttgcaatcagttcgactaattgttccgatgagtaattatattgtaaatgttttgcattattgtaaatttgcaaagcatatgtcctttctgatacacccatcctatcattgtatttcccattttgcaattccttgttaatttccaattgttggactttccccagaaataattcaaaaatttttgttcaaattgttgccaattgccgaattcttcttctttgctatcgaaccataggcttgcttcatatttgagatggtttctgatagtttcttttgctgtttcgaaatttccgatgtgctgtattttctttttcaggctatttatgaacggcactgggtgtaatcttcttacatccccgccaaaccttatcttcacgtcatctgtgctatgtataaccatttctcttctttctccgacattctgttgcgtcctgttttcggtgacttgtttttctatttctgtgattcttttttccacttcttctctgtctacttgaatagcattttccaacttattttccaaattttctagttcctttttctggccattcgttaactcctttattttatcttgaattttcatttcttgttcttgcatgtgatctttaa

SEQ ID NO: 941 - DNA, 5214 bp, Diabrotica virgifera
  SmartBlast Evalue=4E-79; Info=Pol polyprotein (Fragment) n=1 Tax=Drosophila buzzatii RepID=A1BPH1_DROBU
tcactttgtcatccattcccctactttctaaatatcccttccagattcacaaatcaatcttccaccaccaactctcattcgtaatattcctcaaaaccaatttttaatctttctaaatatgcttaatggatttcaaaagaaaatatttaattcccattctaaaatactttctaactatttacaaattttaatgacctattctctctttcaaatgagtcttatttagcataggctaatgatcgaaaccttccgcgaaaaacgataatgaactatcatctatttcactgagttttatttagcataggctaatgatcgaccttccgagaagaacgataatggtacgcgtcattcactttgtttatctaagcacattgttccgagtttcgtacgcttattctaatcacttcttaaaattacataaacaatttgttgtatacaggttgttctaaatttatatgcccgtggttgagaaaattgaaaatattttatattaaattgaattttgtttataattatcaaaatttaattttcatatcaaatagaaatataacaaatccccgccttgtattcgataaaatttatctgcatttttaaataaattttctcgaggcaaaaccaactccctgtatatttccttactttaatctacgtcttatatcctaacttactatctacttcatgtaattctgtcttttattcgtgatatttgtatacatcgtgaatattataaattcctcggatcttttccgagttcctgtgcctcaactcataactatttatcccattttcattattcacgatgtacgggccttcgaaaacaggcatcaactttgcgcaaatgcccccaggaagatttgatactcgtaatgccctcacgagtactttttcacccttttggaaagtcactggtcttctttttctattttgttcctgtctttggatatatttttcgttgcttcgccgtaatcttctctgtacggtttcaatcacctgttgatattcttttggctcttggtcttcccatggccttatcggcagtacacccttcatgatgtattctggggtctcttttgttactgtgctcggaattgtatttagatacctttctatttccgccattttcctgtcccagtggcgatgttgaccatctgttgcaatgcgaagaaatttcgtcacttcctgtatgaatcgttccgaaggattactctgtggatgcctgatgctgacaaaatttgtctctattcctcgttctcgaagttgtcccttgaaacgatcatttcggaaatacgttgcattgtccagtagaatcttttttggtgttcctactatggctataaaattgtcgatttttcttaatatctcctccccctttgtggtgcggcaactatataattttacgtattttgaaaacacatccaccattaccagaatatgtttgttccttttagtggtcataattagatcgcttaacatatctattgctacaatgtctagtttgtttcgggcttcaatatttttggcaacattttcgtttttgaaattccgactcttatatttttgacatacatcgcacttctgggtaatttcctttgcaatgcggtaatcctgtcggctgatgtaattttccctaaaaacgagccaaacttttctgctaccgatatgcccattgtcctcatgtaatttctttattatcttttcggccaatgtctgtgtcactaaatatagttcctttccgtctattctcttaaaatatatgtcattttctacttccgctcttcttttctctctttcctctaggtcttcttggtttgtccttatctcatttaacgaatatatcccttcttcttgtattaatctatttagtcccacctgtagagtaattgtttccttttttcccgtgtcctcatcccgtgttagagcgtcggctattatgttgtcttttccttttatatatcggaactcaaaatcatactcctgtaataatagaatgcctctatgtattctattatttactaatctattcttcatgatatgtactaaagctgcatggtttgtttcgattgtgaattttgctcccaataagtaaaacctcaatttgtttacgcaatatagtacactggcaaactccaattctgtaacactatattttctctcatgtgtttttgtcactcgagatataaaacatatcggcacttcttggtcgttttgtatttgagacagaactcctgcaaatttttgtatggacgcatcagttcggagtataaaaggtaaattgtaaatggggtggtatattttcgttccttttgcgaattctcgttttaatgtttcgaaagcttcctcctgttcttctttccaattccattttattccttttttaagcaactttatcagagggatttccttttggctcaaatcgggaatcagttttttaaaataattaatcgtgccaagaaaacctctcaatgttttcaaattcgttggtcttgggtattcatctatgagcttgactctgtcttcggataatcttactgttttggtgtccaattgaaaacccaaataaatgacttctttttgaaaaaattgacatttttcaatgtttaatttcaatcccgctgtgtccaattcttccagaattatttctatgtgtttcagatgactctgagtatcttgtgaaaaaattaataaatcatcgatataatgaactatgaaatcttcgtggcgattcaaaatggtatgtagagctcggacgagtgcagcacaagcactctgcaatccaaacggcactaccttaaaccggtagacaataccatcaatagaaaaagcggtgtagtttctacacttttcagctaacggtatcaaccaaaaactgtgttttaagtcaattttcgaaaatatgtgtgacccggtgattcttccaaaaatggcctcgatgtttagaggtgattcatattgtgatacagtgtgctggttgatattcctggcatctaaacataatctcaattctccattgcttttctttactatcacaatcgggttaacatacggtgaatcacatctttcgatgatttgatcttccaacattttatttatttcttctttcacctcttgtcgatacttgtatggaatcgggtaagtctttgatcgaaaatttcccaagtttttcacctcaaatgaatgttcgtactttttagccactctgttttcctcattgatcaaattttcgtagtttcttaacatcaaccgcaattctttttctttcccttctccacatatcaattttctgtctttttttctcagattcttcacacatgtttaccgtgcattctgcatcctcgtttgcatatacctcctcttcaaataccactgtttcaatcatattcttttcactttcattttttagctttatttcttcttctcctgagctcgtctcttcttttgaggaatcccaggtttcctttgtttctgatactctcaaattttcttcttctgggctcaactcttcttttgaggagccacaggtttcattttcttttatctttttctgaccttttctcctttttcttctttgtccttgcttcgctgccaaattcatttccactgtttgttctttacctgattcgtccgtattttgtttctcatgttccttgtcctgttctttttctttttcttctgttagtttcatcgtattatttttaaaatctatcactacatgtttttctgccaattcgtcaactcctactatcatgtcatgtgacatgtttggcattattacacattgtagtgcatacatcttcttacccagtcgtaccattactcgtatgccttcatttatagttgccaatgtccgtttgtttgcgcccactaaatttaccctaggtattttgtaaattaaatttgttaagttaacttcttctattagttttctgttgaccaatgttatttcagatccagtgtctatcataattttaattggtttctcgttgataaatccatccacaaattttaaattaactccatttttcttttcgttgtttcttgccaatttaataaactccttggggttacaaaagattcctgtttgatttttggtttttagtgagcgccgtcgtgaaaagacgccggttgctcatcgttgtttatattttcgtcataatgtctctctccgtcatattcatctgtctgggtattatttacttctcttctattttctcttggtctgtcggatctgtttcggttttctcgatatccctgttcattttgtctaccattatttctgttttcttgatttgagcgtgtggtgtttctattctggtattctcgatttctgtcctcattccattgcctatttctttgttcataatttcctcttccgttgtctctattttcgttttcccttctgggattaaaatctcgtcttgtatagtccctcctattttgatttctatctctgtaatctgtgtttctcggggcctgtaatcttctcgcgaccttcttgattttctttctcttagacgtgattctcttatttgtaggaattggcataaactatctatgtctttgtagttttgcaatgtgatatggtcttccagcgtttcttcgaaatgtcttgcaatcagttcgactaattgttccgatgagtaattatattgtaaatgttttgcattattgtaaatttgcaaagcatatgtcctttctgatacacccatcctatcattgtatttcccattttgcaattccttgttaatttccaattgttggactttccccagaaataattcaaaaatttttgttcaaattgttgccaattgccgaattcttcttctttgctatcgaaccataggcttgcttcatatttgagatggtttctgatagtttcttttgctgtttcgaaatttccgatgtgctgtattttctttttcaggctatttatgaacggcactgggtgtaatcttcttacatccccgccaaaccttatcttcacgtcatctgtgctatgtataaccatttctcttctttctccgacattctgttgcgtcctgttttcggtgacttgtttttctatttctgtgattcttttttccacttcttctctgtctacttgaatagcattttccaacttattttccaaattttctagttcctttttctggccattcgttaactcctttattttatcttgaattttcatttcttgttcttgcatgtgatctttaa

SEQ ID NO: 942 - DNA, 5100 bp, Diabrotica virgifera
  SmartBlast Evalue=4E-79; Info=Pol polyprotein (Fragment) n=1 Tax=Drosophila buzzatii RepID=A1BPH1_DROBU
ttccagattcacaaatcaaaattccaccaccaactctcattcgcagtattcctcaaaaccaatttttaaactttctaaatatgcttaatggatttcaaaagaaaatagttaattcccattctaaaattactttctactaattacaaaatttaatgatctattatctacttccactaagtcttatttagcatcggctaatgatcgaaccttccgcgaacaacgataatgacctattatcgatttcacttgagttttattttaagcgcattgtcccgagtttcgtttaatcacttcttaaaattaaataacaatttgttgtatacaggttgttctaaatttatatgcccgtggttgagaaaattgaaaatattttatattaaattgaattttgtttataattatcaaaatttaattttcatatcaaatagaaatataacaaatccccgccttgtattcgataaaatttatctgcatttttaaataaattttctcgaggcaaaaccaactccctgtatatttccttactttaatctacgtcttatatcctaacttactatctacttcatgtaattctgtcttttattcgtgatatttgtatacatcgtgaatattataaattcctcggatcttttccgagttcctgtgcctcaactcataactatttatcccattttcattattcacgatgtacgggccttcgaaaacaggcatcaactttgcgcaaatgcccccaggaagatttgatactcgtaatgccctcacgagtactttttcacccttttggaaagtcactggtcttctttttctattttgttcctgtctttggatatatttttcgttgcttcgccgtaatcttctctgtacggtttcaatcacctgttgatattcttttggctcttggtcttcccatggccttatcggcagtacacccttcatgatgtattctggggtctcttttgttactgtgctcggaattgtatttagatacctttctatttccgccattttcctgtcccagtggcgatgttgaccatctgttgcaatgcgaagaaatttcgtcacttcctgtatgaatcgttccgaaggattactctgtggatgcctgatgctgacaaaatttgtctctattcctcgttctcgaagttgtcccttgaaacgatcatttcggaaatacgttgcattgtccagtagaatcttttttggtgttcctactatggctataaaattgtcgatttttcttaatatctcctccccctttgtggtgcggcaactatataattttacgtattttgaaaacacatccaccattaccagaatatgtttgttccttttagtggtcataattagatcgcttaacatatctattgctacaatgtctagtttgtttcgggcttcaatatttttggcaacattttcgtttttgaaattccgactcttatatttttgacatacatcgcacttctgggtaatttcctttgcaatgcggtaatcctgtcggctgatgtaattttccctaaaaacgagccaaacttttctgctaccgatatgcccattgtcctcatgtaatttctttattatcttttcggccaatgtctgtgtcactaaatatagttcctttccgtctattctcttaaaatatatgtcattttctacttccgctcttcttttctctctttcctctaggtcttcttggtttgtccttatctcatttaacgaatatatcccttcttcttgtattaatctatttagtcccacctgtagagtaattgtttccttttttcccgtgtcctcatcccgtgttagagcgtcggctattatgttgtcttttccttttatatatcggaactcaaaatcatactcctgtaataatagaatgcctctatgtattctattatttactaatctattcttcatgatatgtactaaagctgcatggtttgtttcgattgtgaattttgctcccaataagtaaaacctcaatttgtttacgcaatatagtacactggcaaactccaattctgtaacactatattttctctcatgtgtttttgtcactcgagatataaaacatatcggcacttcttggtcgttttgtatttgagacagaactcctgcaaatttttgtatggacgcatcagttcggagtataaaaggtaaattgtaaatggggtggtatattttcgttccttttgcgaattctcgttttaatgtttcgaaagcttcctcctgttcttctttccaattccattttattccttttttaagcaactttatcagagggatttccttttggctcaaatcgggaatcagttttttaaaataattaatcgtgccaagaaaacctctcaatgttttcaaattcgttggtcttgggtattcatctatgagcttgactctgtcttcggataatcttactgttttggtgtccaattgaaaacccaaataaatgacttctttttgaaaaaattgacatttttcaatgtttaatttcaatcccgctgtgtccaattcttccagaattatttctatgtgtttcagatgactctgagtatcttgtgaaaaaattaataaatcatcgatataatgaactatgaaatcttcgtggcgattcaaaatggtatgtagagctcggacgagtgcagcacaagcactctgcaatccaaacggcactaccttaaaccggtagacaataccatcaatagaaaaagcggtgtagtttctacacttttcagctaacggtatcaaccaaaaactgtgttttaagtcaattttcgaaaatatgtgtgacccggtgattcttccaaaaatggcctcgatgtttagaggtgattcatattgtgatacagtgtgctggttgatattcctggcatctaaacataatctcaattctccattgcttttctttactatcacaatcgggttaacatacggtgaatcacatctttcgatgatttgatcttccaacattttatttatttcttctttcacctcttgtcgatacttgtatggaatcgggtaagtctttgatcgaaaatttcccaagtttttcacctcaaatgaatgttcgtactttttagccactctgttttcctcattgatcaaattttcgtagtttcttaacatcaaccgcaattctttttctttcccttctccacatatcaattttctgtctttttttctcagattcttcacacatgtttaccgtgcattctgcatcctcgtttgcatatacctcctcttcaaataccactgtttcaatcatattcttttcactttcattttttagctttatttcttcttctcctgagctcatctcttcttttgaggaatcccagttttcttttgcttttgatactctcaatttttcttcttctgggctcaactcttcttttgaggagccacaggtttcattttcttttgtctttttctgactttttctcccttttcttctttgtccttgcttcgttgccaaattcatttccactgtttgttctttacctgattcgtccgtattttgtttctcctgttccttgtcctgttcttcttctttttcttctgttagattcatcgtattatttttaaaatctatcactacatgtttttctgccaattcgtcaactcctactatcatgtcatgtgacatgtttggcattattacacattgtagtgcatacatcttcttacccagtcgtaccattactcgtatgccttcatttatagttgccaatgtccgtttgtttgcgcccactaaatttaccctaggtattttgtaaattaaatttgttaagttaacttcttctattagttttctgttgaccaatgttatttcagatccagtgtctatcataattttaattggtttctcgttgataaatccatccacaaattttaaattaactccatttttcttttcgttgtttcttgccaatttaataaactccttggggttacaaaagattcctgtttgatttttggtttttagtgagcgccgtcgtgaaaagacgccggttgctcatcgttgtttatattttcgtcataatgtctctctccgtcatattcatctgtctgggtattatttacttctcttctattttctcttggtctgtcggatctgtttcggttttctcgatatccctgttcattttgtctaccattatttctgttttcttgatttgagcgtgtggtgtttctattctggtattctcgatttctgtcctcattccattgcctatttctttgttcataatttcctcttccgttgtctctattttcgttttcccttctgggattaaaatctcgtcttgtatagtccctcctattttgatttctatctctgtaatctgtgtttctcggggcctgtaatcttctcgcgaccttcttgattttctttctcttagacgtgattctcttatttgtaggaattggcataaactatctatgtctttgtagttttgcaatgtgatatggtcttccagcgtttcttcgaaatgtcttgcaatcagttcgactaattgttccgatgagtaattatattgtaaatgttttgcattattgtaaatttgcaaagcatatgtcctttctgatacacccatcctatcattgtatttcccattttgcaattccttgttaatttccaattgttggactttccccagaaataattcaaaaatttttgttcaaattgttgccaattgccgaattcttcttctttgctatcgaaccataggcttgcttcatatttgagatggtttctgatagtttcttttgctgtttcgaaatttccgatgtgctgtattttctttttcaggctatttatgaacggcactgggtgtaatcttcttacatccccgccaaaccttatcttcacgtcatctgtgctatgtataaccatttctcttctttctccgacattctgttgcgtcctgttttcggtgacttgtttttctatttctgtgattcttttttccacttcttctctgtctacttgaatagcattttccaacttattttccaaattttctagttcctttttctggccattcgttaactcctttattttatcttgaattttcatttcttgttcttgcatgtgatctttaa

SEQ ID NO: 943 - DNA, 5100 bp, Diabrotica virgifera
  SmartBlast Evalue=4E-79; Info=Pol polyprotein (Fragment) n=1 Tax=Drosophila buzzatii RepID=A1BPH1_DROBU
ttccagattcacaaatcaaaattccaccaccaactctcattcgcagtattcctcaaaaccaatttttaaactttctaaatatgcttaatggatttcaaaagaaaatagttaattcccattctaaaattactttctactaattacaaaatttaatgatctattatctacttccactaagtcttatttagcatcggctaatgatcgaaccttccgcgaacaacgataatgacctattatcgatttcacttgagttttattttaagcgcattgtcccgagtttcgtttaatcacttcttaaaattaaataacaatttgttgtatacaggttgttctaaatttatatgcccgtggttgagaaaattgaaaatattttatattaaattgaattttgtttataattatcaaaatttaattttcatatcaaatagaaatataacaaatccccgccttgtattcgataaaatttatctgcatttttaaataaattttctcgaggcaaaaccaactccctgtatatttccttactttaatctacgtcttatatcctaacttactatctacttcatgtaattctgtcttttattcgtgatatttgtatacatcgtgaatattataaattcctcggatcttttccgagttcctgtgcctcaactcataactatttatcccattttcattattcacgatgtacgggccttcgaaaacaggcatcaactttgcgcaaatgcccccaggaagatttgatactcgtaatgccctcacgagtactttttcacccttttggaaagtcactggtcttctttttctattttgttcctgtctttggatatatttttcgttgcttcgccgtaatcttctctgtacggtttcaatcacctgttgatattcttttggctcttggtcttcccatggccttatcggcagtacacccttcatgatgtattctggggtctcttttgttactgtgctcggaattgtatttagatacctttctatttccgccattttcctgtcccagtggcgatgttgaccatctgttgcaatgcgaagaaatttcgtcacttcctgtatgaatcgttccgaaggattactctgtggatgcctgatgctgacaaaatttgtctctattcctcgttctcgaagttgtcccttgaaacgatcatttcggaaatacgttgcattgtccagtagaatcttttttggtgttcctactatggctataaaattgtcgatttttcttaatatctcctccccctttgtggtgcggcaactatataattttacgtattttgaaaacacatccaccattaccagaatatgtttgttccttttagtggtcataattagatcgcttaacatatctattgctacaatgtctagtttgtttcgggcttcaatatttttggcaacattttcgtttttgaaattccgactcttatatttttgacatacatcgcacttctgggtaatttcctttgcaatgcggtaatcctgtcggctgatgtaattttccctaaaaacgagccaaacttttctgctaccgatatgcccattgtcctcatgtaatttctttattatcttttcggccaatgtctgtgtcactaaatatagttcctttccgtctattctcttaaaatatatgtcattttctacttccgctcttcttttctctctttcctctaggtcttcttggtttgtccttatctcatttaacgaatatatcccttcttcttgtattaatctatttagtcccacctgtagagtaattgtttccttttttcccgtgtcctcatcccgtgttagagcgtcggctattatgttgtcttttccttttatatatcggaactcaaaatcatactcctgtaataatagaatgcctctatgtattctattatttactaatctattcttcatgatatgtactaaagctgcatggtttgtttcgattgtgaattttgctcccaataagtaaaacctcaatttgtttacgcaatatagtacactggcaaactccaattctgtaacactatattttctctcatgtgtttttgtcactcgagatataaaacatatcggcacttcttggtcgttttgtatttgagacagaactcctgcaaatttttgtatggacgcatcagttcggagtataaaaggtaaattgtaaatggggtggtatattttcgttccttttgcgaattctcgttttaatgtttcgaaagcttcctcctgttcttctttccaattccattttattccttttttaagcaactttatcagagggatttccttttggctcaaatcgggaatcagttttttaaaataattaatcgtgccaagaaaacctctcaatgttttcaaattcgttggtcttgggtattcatctatgagcttgactctgtcttcggataatcttactgttttggtgtccaattgaaaacccaaataaatgacttctttttgaaaaaattgacatttttcaatgtttaatttcaatcccgctgtgtccaattcttccagaattatttctatgtgtttcagatgactctgagtatcttgtgaaaaaattaataaatcatcgatataatgaactatgaaatcttcgtggcgattcaaaatggtatgtagagctcggacgagtgcagcacaagcactctgcaatccaaacggcactaccttaaaccggtagacaataccatcaatagaaaaagcggtgtagtttctacacttttcagctaacggtatcaaccaaaaactgtgttttaagtcaattttcgaaaatatgtgtgacccggtgattcttccaaaaatggcctcgatgtttagaggtgattcatattgtgatacagtgtgctggttgatattcctggcatctaaacataatctcaattctccattgcttttctttactatcacaatcgggttaacatacggtgaatcacatctttcgatgatttgatcttccaacattttatttatttcttctttcacctcttgtcgatacttgtatggaatcgggtaagtctttgatcgaaaatttcccaagtttttcacctcaaatgaatgttcgtactttttagccactctgttttcctcattgatcaaattttcgtagtttcttaacatcaaccgcaattctttttctttcccttctccacatatcaattttctgtctttttttctcagattcttcacacatgtttaccgtgcattctgcatcctcgtttgcatatacctcctcttcaaataccactgtttcaatcatattcttttcactttcattttttagctttatttcttcttctcctgagctcgtctcttcttttgaggaatcccaggtttcctttgtttctgatactctcaaattttcttcttctgggctcaactcttcttttgaggagccacaggtttcattttcttttatctttttctgaccttttctcctttttcttctttgtccttgcttcgctgccaaattcatttccactgtttgttctttacctgattcgtccgtattttgtttctcatgttccttgtcctgttctttttctttttcttctgttagtttcatcgtattatttttaaaatctatcactacatgtttttctgccaattcgtcaactcctactatcatgtcatgtgacatgtttggcattattacacattgtagtgcatacatcttcttacccagtcgtaccattactcgtatgccttcatttatagttgccaatgtccgtttgtttgcgcccactaaatttaccctaggtattttgtaaattaaatttgttaagttaacttcttctattagttttctgttgaccaatgttatttcagatccagtgtctatcataattttaattggtttctcgttgataaatccatccacaaattttaaattaactccatttttcttttcgttgtttcttgccaatttaataaactccttggggttacaaaagattcctgtttgatttttggtttttagtgagcgccgtcgtgaaaagacgccggttgctcatcgttgtttatattttcgtcataatgtctctctccgtcatattcatctgtctgggtattatttacttctcttctattttctcttggtctgtcggatctgtttcggttttctcgatatccctgttcattttgtctaccattatttctgttttcttgatttgagcgtgtggtgtttctattctggtattctcgatttctgtcctcattccattgcctatttctttgttcataatttcctcttccgttgtctctattttcgttttcccttctgggattaaaatctcgtcttgtatagtccctcctattttgatttctatctctgtaatctgtgtttctcggggcctgtaatcttctcgcgaccttcttgattttctttctcttagacgtgattctcttatttgtaggaattggcataaactatctatgtctttgtagttttgcaatgtgatatggtcttccagcgtttcttcgaaatgtcttgcaatcagttcgactaattgttccgatgagtaattatattgtaaatgttttgcattattgtaaatttgcaaagcatatgtcctttctgatacacccatcctatcattgtatttcccattttgcaattccttgttaatttccaattgttggactttccccagaaataattcaaaaatttttgttcaaattgttgccaattgccgaattcttcttctttgctatcgaaccataggcttgcttcatatttgagatggtttctgatagtttcttttgctgtttcgaaatttccgatgtgctgtattttctttttcaggctatttatgaacggcactgggtgtaatcttcttacatccccgccaaaccttatcttcacgtcatctgtgctatgtataaccatttctcttctttctccgacattctgttgcgtcctgttttcggtgacttgtttttctatttctgtgattcttttttccacttcttctctgtctacttgaatagcattttccaacttattttccaaattttctagttcctttttctggccattcgttaactcctttattttatcttgaattttcatttcttgttcttgcatgtgatctttaa

SEQ ID NO: 944 - DNA, 4205 bp, Diabrotica virgifera
ggagttgcatcagttgtaatagtttatctattcctgataattcttgctgttctgatgccatgattgtcgtgtctaaaatatcttcttggtctgaatgttctttttgttttttgttgtctttgctttggcttcttgtcacagacatttgttttcaagaagtactgtccccgccaaatatgaaattttactagtatgttaccaagacgactttttctcacccaaatattataaattgtcaataaatatatcaaatgtaaatatcgtaaaaataaaatattaaatcagttatgtaaaatttgtacctaaagagatctaaaattttatgttatcaaatgtaagtatctcactttttaccacaggcatataaattttcaaataccggctttactctttctatccttcaaatttgccactagaaatactttacaatgctttccacgttggacgacagttgatgtgatcttgattattgatatgagataatattcttatatgtcatttaatttaatcaatgtattaatactaatctaattaatttaccagatcacatatcaatatgttttcaatctcagggcgaattataaaattaattacttacttacgtggcttctaagtatttcttaatggttcctaatcgggataggaaagaaaagagtaaaataataacacatatgggttacaattgtaatcaaaatattgtttattttatttaaatggcaatcactgcttaatatttgctatatcttattattcttaaacataacatttacacatgggaatcttatttccttttggtttccaattgaaagtttttattaacatttaactattatgatttattagcaacaattctatttaagtttgatgaagcttttctgatattattgattatgtttcttcaattttaaatgtggtatttaatacgaaaaacccatacattcatgtccaaacaaatgagactgacctttttctggtgaactgagaatgtcttcacacaagacccgtttcctgctatccttggctgcaatcaaaacctcgtcctggcttccagtaatgttctcctttgaaactagctcgtatagctctcgttcctgcttctgtcgtgatgctgtgttctacctttttcgaaactgcaatcagctaccgggaactcttggctcaaggaggttcttttactctcaacctggcctacctctcgttccacgatagatactccacactcacggaactacaccggctttctcactctccgtacactaccgtctactactggacttcacttctcgacagctcaaaacattctgatctctatttgtcattcattcccctactttctaaatatcccttccagattcacaaatcaaacttccaccaccaactctcattcgcagtattcctcaaaaccaatttttaatctttctaaatatgcttaatggatttcaaagaaaatagttaattcccattctaaaattactttctactatttacaaatttaatgatctattatctacttccactaagtcttatttagcatcggctaatgatcgaaccttccgcgaacaacgataatgacctattatcgatttcacttgagtcttatttagcataggctaatgatcgaacctcccgcgaacaacgacaatggtacgcgccattcactttgttcattctaagcgcattgtcccgagtttcgtttaatcacttcttaaaattaaatataacaatttgttgtatacaggttgttctaaatttatatgcccgtggttgagaaaattgaaaatattttatattaaattgaattttgtttataattatcaaaatttaattttcatatcaaatagaaatataacaaatccccgccttgtattcgataaaatttatctgcatttttaaataaattttctcgaggcaaaaccaactccctgtatatttccttactttaatctacgtcttataccccttcttcttgtattactctaattagtcccacctgtagagtaattgtttccttattttcagtgtcctcatcctgtgttagagtgtcggctattatgttgtctttccctttttcccatatcaatcttctgtctttttcctcagatttttcacatacttttaccgtgtattctgcatcctcgttttcatatgcctcctcttcaaatgccactgtttcgatcatatctttttcgctttcatttgttagctttatttcttcttctcctgagctcatctcttcttttgaggaatcccagttttcttttgcttttgatactctcaatttttcttcttctgggctcaactcttcttttgaggagccacaggtttcattttcttttgtctttttctgactttttctcccttttcttctttgtccttgcttcgttgccaaattcatttccactgtttgttctttacctgattcgtccgtattttgtttctcctgttccttgtcctgttcttcttctttttcttctgttagattcatcgtattatttttaaaatctatcactacatgtttttctgccaattcgtcaactcctactatcatgtcatgtgacatgtttggcattattacacattgtagtgcatacatcttcttacccagtcgtaccattactcgtatgccttcatttatagttgccaatgtccgtttgtttgcgcccactaaatttaccctaggtattttgtaaattaaatttgttaagttaacttcttctattagttttctgttgaccaatgttatttcagatccagtgtctatcataattttaattggtttctcgttgataaatccatccacaaattttaaattaactccatttttcttttcgttgtttcttgccaatttaataaactccttggggttacaaaagattcctgtttgatttttggtttttagtgagcgccgtcgtgaaaagacgccggttgctcatcgttgtttatattttcgtcataatgtctctctccgtcatattcatctgtctgggtattatttacttctcttctattttctcttggtctgtcggatctgtttcggttttctcgatatccctgttcattttgtctaccattatttctgttttcttgatttgagcgtgtggtgtttctattctggtattctcgatttctgtcctcattccattgcctatttctttgttcataatttcctcttccgttgtctctattttcgttttcccttctgggattaaaatctcgtcttgtatagtccctcctattttgatttctatctctgtaatctgtgtttctcggggcctgtaatcttctcgcgaccttcttgattttctttctcttagacgtgattctcttatttgtaggaattggcataaactatctatgtctttgtagttttgcaatgtgatatggtcttccagcgtttcttcgaaatgtcttgcaatcagttcgactaattgttccgatgagtaattatattgtaaatgttttgcattattgtaaatttgcaaagcatatgtcctttctgatacacccatcctatcattgtatttcccattttgcaattccttgttaatttccaattgttggactttccccagaaataattcaaaaatttttgttcaaattgttgccaattgccgaattcttcttctttgctatcgaaccataggcttgcttcatatttgagatggtttctgatagtttcttttgctgtttcgaaatttccgatgtgctgtattttctttttcaggctatttatgaacggcactgggtgtaatcttcttacatccccgccaaaccttatcttcacgtcatctgtgctatgtataaccatttctcttctttctccgacattctgttgcgtattgatttccgcaatctttctttccacttcttctatgtctgcttgaatagcgttttgcaacttgttttccaaactttccatttcttttttctggcaattcgttatctccttcattttgattttgatttctttaatctctatctcttgttctcccatctcgttcttgatcattgtcaaacatccttttacttccttttcatacttttctatgcgttcctccattttcttgttgttctcttctattgcttgtttcatttttttgttgtgtttgatccattttttgatccaatttttgttgtgtttcctccattttttgttgtgtttcatccattttttgatccactttatctattttctttgatgtttc

SEQ ID NO: 945 - DNA, 4205 bp, Diabrotica virgifera
ggagttgcatcagttgtaatagtttatctattcctgataattcttgctgttctgatgccatgattgtcgtgtctaaaatatcttcttggtctgaatgttctttttgttttttgttgtctttgctttggcttcttgtcacagacatttgttttcaagaagtactgtccccgccaaatatgaaattttactagtatgttaccaagacgactttttctcacccaaatattataaattgtcaataaatatatcaaatgtaaatatcgtaaaaataaaatattaaatcagttatgtaaaatttgtacctaaagagatctaaaattttatgttatcaaatgtaagtatctcactttttaccacaggcatataaattttcaaataccggctttactctttctatccttcaaatttgccactagaaatactttacaatgctttccacgttggacgacagttgatgtgatcttgattattgatatgagataatattcttatatgtcatttaatttaatcaatgtattaatactaatctaattaatttaccagatcacatatcaatatgttttcaatctcagggctttttataaaattaattacttacttacgtggcttctaagtatttcttaatggttcctaatcgggataggaaagaaaagagtaaaataataacacatatgggttacaattgtaatcaaaatattgtttattttatttaaatggcaatcactgcttaatatttgctatatcttattattcttaaacataacatttacacatgggaatcttatttccttttggtttccaattgaaagtttttattaacatttaactattatgatttattagcaacaattctatttaagtttgatgaagcttttctgatattattgattatgtttcttcaattttaaatgtggtatttaatacgaaaaacccatacattcatgtccaaacaaatgagactgacctttttctggtgaactgagaatgtcttcacacaagacccgtttcctgctatccttggctgcaatcaaaacctcgtcctggcttccagtaatgttctcctttgaaactagctcgtatagctctcgttcctgcttctgtcgtgatgctgtgttctacctttttcgaaactgcaatcagctaccgggaactcttggctcaaggaggttcttttactctcaacctggcctacctctcgttccacgatagatactccacactcacggaactacaccggctttctcactctccgtacactaccgtctactactggacttcacttctcgacagctcaaaacattctgatctctatttgtcattcattcccctactttctaaatatcccttccagattcacaaatcaaacttccaccaccaactctcattcgcagtattcctcaaaaccaatttttaatctttctaaatatgcttaatggatttcaaagaaaatagttaattcccattctaaaattactttctactatttacaaatttaatgatctattatctacttccactaagtcttatttagcatcggctaatgatcgaaccttccgcgaacaacgataatgacctattatcgatttcacttgagtcttatttagcataggctaatgatcgaacctcccgcgaacaacgacaatggtacgcgccattcactttgttcattctaagcgcattgtcccgagtttcgtttaatcacttcttaaaattaaatataacaatttgttgtatacaggttgttctaaatttatatgcccgtggttgagaaaattgaaaatattttatattaaattgaattttgtttataattatcaaaatttaattttcatatcaaatagaaatataacaaatccccgccttgtattcgataaaatttatctgcatttttaaataaattttctcgaggcaaaaccaactccctgtatatttccttactttaatctacgtcttataccccttcttcttgtattactctaattagtcccacctgtagagtaattgtttccttattttcagtgtcctcatcctgtgttagagtgtcggctattatgttgtctttccctttttcccatatcaatcttctgtctttttcctcagatttttcacatacttttaccgtgtattctgcatcctcgttttcatatgcctcctcttcaaatgccactgtttcgatcatatctttttcgctttcatttgttagctttatttcttcttctcctgagctcatctcttcttttgaggaatcccagttttcttttgcttttgatactctcaatttttcttcttctgggctcaactcttcttttgaggagccacaggtttcattttcttttgtctttttctgactttttctcccttttcttctttgtccttgcttcgttgccaaattcatttccactgtttgttctttacctgattcgtccgtattttgtttctcctgttccttgtcctgttcttcttctttttcttctgttagattcatcgtattatttttaaaatctatcactacatgtttttctgccaattcgtcaactcctactatcatgtcatgtgacatgtttggcattattacacattgtagtgcatacatcttcttacccagtcgtaccattactcgtatgccttcatttatagttgccaatgtccgtttgtttgcgcccactaaatttaccctaggtattttgtaaattaaatttgttaagttaacttcttctattagttttctgttgaccaatgttatttcagatccagtgtctatcataattttaattggtttctcgttgataaatccatccacaaattttaaattaactccatttttcttttcgttgtttcttgccaatttaataaactccttggggttacaaaagattcctgtttgatttttggtttttagtgagcgccgtcgtgaaaagacgccggttgctcatcgttgtttatattttcgtcataatgtctctctccgtcatattcatctgtctgggtattatttacttctcttctattttctcttggtctgtcggatctgtttcggttttctcgatatccctgttcattttgtctaccattatttctgttttcttgatttgagcgtgtggtgtttctattctggtattctcgatttctgtcctcattccattgcctatttctttgttcataatttcctcttccgttgtctctattttcgttttcccttctgggattaaaatctcgtcttgtatagtccctcctattttgatttctatctctgtaatctgtgtttctcggggcctgtaatcttctcgcgaccttcttgattttctttctcttagacgtgattctcttatttgtaggaattggcataaactatctatgtctttgtagttttgcaatgtgatatggtcttccagcgtttcttcgaaatgtcttgcaatcagttcgactaattgttccgatgagtaattatattgtaaatgttttgcattattgtaaatttgcaaagcatatgtcctttctgatacacccatcctatcattgtatttcccattttgcaattccttgttaatttccaattgttggactttccccagaaataattcaaaaatttttgttcaaattgttgccaattgccgaattcttcttctttgctatcgaaccataggcttgcttcatatttgagatggtttctgatagtttcttttgctgtttcgaaatttccgatgtgctgtattttctttttcaggctatttatgaacggcactgggtgtaatcttcttacatccccgccaaaccttatcttcacgtcatctgtgctatgtataaccatttctcttctttctccgacattctgttgcgtattgatttccgcaatctttctttccacttcttctatgtctgcttgaatagcgttttgcaacttgttttccaaactttccatttcttttttctggcaattcgttatctccttcattttgattttgatttctttaatctctatctcttgttctcccatctcgttcttgatcattgtcaaacatccttttacttccttttcatacttttctatgcgttcctccattttcttgttgttctcttctattgcttgtttcatttttttgttgtgtttgatccattttttgatccaatttttgttgtgtttcctccattttttgttgtgtttcatccattttttgatccactttatctattttctttgatgtttc

SEQ ID NO: 946 - DNA, 4205 bp, Diabrotica virgifera
ggagttgcatcagttgtaatagtttatctattcctgataattcttgctgttctgatgccatgattgtcgtgtctaaaatatcttcttggtctgaatgttctttttgttttttgttgtctttgctttggcttcttgtcacagacatttgttttcaagaagtactgtccccgccaaatatgaaattttactagtatgttaccaagacgactttttctcacccaaatattataaattgtcaataaatatatcaaatgtaaatatcgtaaaaataaaatattaaatcagttatgtaaaatttgtacctaaagagatctaaaattttatgttatcaaatgtaagtatctcactttttaccacaggcatataaattttcaaataccggctttactctttctatccttcaaatttgccactagaaatactttacaatgctttccacgttggacgacagttgatgtgatcttgattattgatatgagataatattcttatatgtcatttaatttaatcaatgtattaatactaatctaattaatttaccagatcacatatcaatatgttttcaatctcagggcgaattataaaattaattacttacttacgtggcttctaagtatttcttaatggttcctaatcgggataggaaagaaaagagtaaaataataacacatatgggttacaattgtaatcaaaatattgtttattttatttaaatggcaatcactgcttaatatttgctatatcttattattcttaaacataacatttacacatgggaatcttatttccttttggtttccaattgaaagtttttattaacatttaactattatgatttattagcaacaattctatttaagtttgatgaagcttttctgatattattgattatgtttcttcaattttaaatgtggtatttaatacgaaaaacccatacattcatgtccaaacaaatgagactgacctttttctggtgaactgagaatgtcttcacacaagacccgtttcctgctatccttggctgcaatcaaaacctcgtcctggcttccagtaatgttctcctttgaaactagctcgtatagctctcgttcctgcttctgtcgtgatgctgtgttctacctttttcgaaactgcaatcagctaccgggaactcttggctcaaggaggttcttttactctcaacctggcctacctctcgttccacgatagatactccacactcacggaactacaccggctttctcactctccgtacactaccgtctactactggacttcacttctcgacagctcaaaacattctgatctctatttgtcattcattcccctactttctaaatatcccttccagattcacaaatcaaacttccaccaccaactctcattcgcagtattcctcaaaaccaatttttaatctttctaaatatgcttaatggatttcaaagaaaatagttaattcccattctaaaattactttctactatttacaaatttaatgatctattatctacttccactaagtcttatttagcatcggctaatgatcgaaccttccgcgaacaacgataatgacctattatcgatttcacttgagtcttatttagcataggctaatgatcgaacctcccgcgaacaacgacaatggtacgcgccattcactttgttcattctaagcgcattgtcccgagtttcgtttaatcacttcttaaaattaaatataacaatttgttgtatacaggttgttctaaatttatatgcccgtggttgagaaaattgaaaatattttatattaaattgaattttgtttataattatcaaaatttaattttcatatcaaatagaaatataacaaatccccgccttgtattcgataaaatttatctgcatttttaaataaattttctcgaggcaaaaccaactccctgtatatttccttactttaatctacgtcttataccccttcttcttgtattactctaattagtcccacctgtagagtaattgtttccttattttcagtgtcctcatcctgtgttagagtgtcggctattatgttgtctttccctttttcccatatcaatcttctgtctttttcctcagatttttcacatacttttaccgtgtattctgcatcctcgttttcatatgcctcctcttcaaatgccactgtttcgatcatatctttttcgctttcatttgttagctttatttcttcttctcctgagctcgtctcttcttttgaggaatcccaggtttcctttgtttctgatactctcaaattttcttcttctgggctcaactcttcttttgaggagccacaggtttcattttcttttatctttttctgaccttttctcctttttcttctttgtccttgcttcgctgccaaattcatttccactgtttgttctttacctgattcgtccgtattttgtttctcatgttccttgtcctgttctttttctttttcttctgttagtttcatcgtattatttttaaaatctatcactacatgtttttctgccaattcgtcaactcctactatcatgtcatgtgacatgtttggcattattacacattgtagtgcatacatcttcttacccagtcgtaccattactcgtatgccttcatttatagttgccaatgtccgtttgtttgcgcccactaaatttaccctaggtattttgtaaattaaatttgttaagttaacttcttctattagttttctgttgaccaatgttatttcagatccagtgtctatcataattttaattggtttctcgttgataaatccatccacaaattttaaattaactccatttttcttttcgttgtttcttgccaatttaataaactccttggggttacaaaagattcctgtttgatttttggtttttagtgagcgccgtcgtgaaaagacgccggttgctcatcgttgtttatattttcgtcataatgtctctctccgtcatattcatctgtctgggtattatttacttctcttctattttctcttggtctgtcggatctgtttcggttttctcgatatccctgttcattttgtctaccattatttctgttttcttgatttgagcgtgtggtgtttctattctggtattctcgatttctgtcctcattccattgcctatttctttgttcataatttcctcttccgttgtctctattttcgttttcccttctgggattaaaatctcgtcttgtatagtccctcctattttgatttctatctctgtaatctgtgtttctcggggcctgtaatcttctcgcgaccttcttgattttctttctcttagacgtgattctcttatttgtaggaattggcataaactatctatgtctttgtagttttgcaatgtgatatggtcttccagcgtttcttcgaaatgtcttgcaatcagttcgactaattgttccgatgagtaattatattgtaaatgttttgcattattgtaaatttgcaaagcatatgtcctttctgatacacccatcctatcattgtatttcccattttgcaattccttgttaatttccaattgttggactttccccagaaataattcaaaaatttttgttcaaattgttgccaattgccgaattcttcttctttgctatcgaaccataggcttgcttcatatttgagatggtttctgatagtttcttttgctgtttcgaaatttccgatgtgctgtattttctttttcaggctatttatgaacggcactgggtgtaatcttcttacatccccgccaaaccttatcttcacgtcatctgtgctatgtataaccatttctcttctttctccgacattctgttgcgtattgatttccgcaatctttctttccacttcttctatgtctgcttgaatagcgttttgcaacttgttttccaaactttccatttcttttttctggcaattcgttatctccttcattttgattttgatttctttaatctctatctcttgttctcccatctcgttcttgatcattgtcaaacatccttttacttccttttcatacttttctatgcgttcctccattttcttgttgttctcttctattgcttgtttcatttttttgttgtgtttgatccattttttgatccaatttttgttgtgtttcctccattttttgttgtgtttcatccattttttgatccactttatctattttctttgatgtttc

SEQ ID NO: 947 - DNA, 4205 bp, Diabrotica virgifera
ggagttgcatcagttgtaatagtttatctattcctgataattcttgctgttctgatgccatgattgtcgtgtctaaaatatcttcttggtctgaatgttctttttgttttttgttgtctttgctttggcttcttgtcacagacatttgttttcaagaagtactgtccccgccaaatatgaaattttactagtatgttaccaagacgactttttctcacccaaatattataaattgtcaataaatatatcaaatgtaaatatcgtaaaaataaaatattaaatcagttatgtaaaatttgtacctaaagagatctaaaattttatgttatcaaatgtaagtatctcactttttaccacaggcatataaattttcaaataccggctttactctttctatccttcaaatttgccactagaaatactttacaatgctttccacgttggacgacagttgatgtgatcttgattattgatatgagataatattcttatatgtcatttaatttaatcaatgtattaatactaatctaattaatttaccagatcacatatcaatatgttttcaatctcagggctttttataaaattaattacttacttacgtggcttctaagtatttcttaatggttcctaatcgggataggaaagaaaagagtaaaataataacacatatgggttacaattgtaatcaaaatattgtttattttatttaaatggcaatcactgcttaatatttgctatatcttattattcttaaacataacatttacacatgggaatcttatttccttttggtttccaattgaaagtttttattaacatttaactattatgatttattagcaacaattctatttaagtttgatgaagcttttctgatattattgattatgtttcttcaattttaaatgtggtatttaatacgaaaaacccatacattcatgtccaaacaaatgagactgacctttttctggtgaactgagaatgtcttcacacaagacccgtttcctgctatccttggctgcaatcaaaacctcgtcctggcttccagtaatgttctcctttgaaactagctcgtatagctctcgttcctgcttctgtcgtgatgctgtgttctacctttttcgaaactgcaatcagctaccgggaactcttggctcaaggaggttcttttactctcaacctggcctacctctcgttccacgatagatactccacactcacggaactacaccggctttctcactctccgtacactaccgtctactactggacttcacttctcgacagctcaaaacattctgatctctatttgtcattcattcccctactttctaaatatcccttccagattcacaaatcaaacttccaccaccaactctcattcgcagtattcctcaaaaccaatttttaatctttctaaatatgcttaatggatttcaaagaaaatagttaattcccattctaaaattactttctactatttacaaatttaatgatctattatctacttccactaagtcttatttagcatcggctaatgatcgaaccttccgcgaacaacgataatgacctattatcgatttcacttgagtcttatttagcataggctaatgatcgaacctcccgcgaacaacgacaatggtacgcgccattcactttgttcattctaagcgcattgtcccgagtttcgtttaatcacttcttaaaattaaatataacaatttgttgtatacaggttgttctaaatttatatgcccgtggttgagaaaattgaaaatattttatattaaattgaattttgtttataattatcaaaatttaattttcatatcaaatagaaatataacaaatccccgccttgtattcgataaaatttatctgcatttttaaataaattttctcgaggcaaaaccaactccctgtatatttccttactttaatctacgtcttataccccttcttcttgtattactctaattagtcccacctgtagagtaattgtttccttattttcagtgtcctcatcctgtgttagagtgtcggctattatgttgtctttccctttttcccatatcaatcttctgtctttttcctcagatttttcacatacttttaccgtgtattctgcatcctcgttttcatatgcctcctcttcaaatgccactgtttcgatcatatctttttcgctttcatttgttagctttatttcttcttctcctgagctcgtctcttcttttgaggaatcccaggtttcctttgtttctgatactctcaaattttcttcttctgggctcaactcttcttttgaggagccacaggtttcattttcttttatctttttctgaccttttctcctttttcttctttgtccttgcttcgctgccaaattcatttccactgtttgttctttacctgattcgtccgtattttgtttctcatgttccttgtcctgttctttttctttttcttctgttagtttcatcgtattatttttaaaatctatcactacatgtttttctgccaattcgtcaactcctactatcatgtcatgtgacatgtttggcattattacacattgtagtgcatacatcttcttacccagtcgtaccattactcgtatgccttcatttatagttgccaatgtccgtttgtttgcgcccactaaatttaccctaggtattttgtaaattaaatttgttaagttaacttcttctattagttttctgttgaccaatgttatttcagatccagtgtctatcataattttaattggtttctcgttgataaatccatccacaaattttaaattaactccatttttcttttcgttgtttcttgccaatttaataaactccttggggttacaaaagattcctgtttgatttttggtttttagtgagcgccgtcgtgaaaagacgccggttgctcatcgttgtttatattttcgtcataatgtctctctccgtcatattcatctgtctgggtattatttacttctcttctattttctcttggtctgtcggatctgtttcggttttctcgatatccctgttcattttgtctaccattatttctgttttcttgatttgagcgtgtggtgtttctattctggtattctcgatttctgtcctcattccattgcctatttctttgttcataatttcctcttccgttgtctctattttcgttttcccttctgggattaaaatctcgtcttgtatagtccctcctattttgatttctatctctgtaatctgtgtttctcggggcctgtaatcttctcgcgaccttcttgattttctttctcttagacgtgattctcttatttgtaggaattggcataaactatctatgtctttgtagttttgcaatgtgatatggtcttccagcgtttcttcgaaatgtcttgcaatcagttcgactaattgttccgatgagtaattatattgtaaatgttttgcattattgtaaatttgcaaagcatatgtcctttctgatacacccatcctatcattgtatttcccattttgcaattccttgttaatttccaattgttggactttccccagaaataattcaaaaatttttgttcaaattgttgccaattgccgaattcttcttctttgctatcgaaccataggcttgcttcatatttgagatggtttctgatagtttcttttgctgtttcgaaatttccgatgtgctgtattttctttttcaggctatttatgaacggcactgggtgtaatcttcttacatccccgccaaaccttatcttcacgtcatctgtgctatgtataaccatttctcttctttctccgacattctgttgcgtattgatttccgcaatctttctttccacttcttctatgtctgcttgaatagcgttttgcaacttgttttccaaactttccatttcttttttctggcaattcgttatctccttcattttgattttgatttctttaatctctatctcttgttctcccatctcgttcttgatcattgtcaaacatccttttacttccttttcatacttttctatgcgttcctccattttcttgttgttctcttctattgcttgtttcatttttttgttgtgtttgatccattttttgatccaatttttgttgtgtttcctccattttttgttgtgtttcatccattttttgatccactttatctattttctttgatgtttc

SEQ ID NO: 948 - DNA, 4111 bp, Diabrotica virgifera
ggagttgcatcagttgtaatagtttatctattcctgataattcttgctgttctgatgccatgattgtcgtgtctaaaatatcttcttggtctgaatgttctttttgttttttgttgtctttgctttggcttcttgtcacagacatttgttttcaagaagtactgtccccgccaaatatgaaattttactagtatgttaccaagacgactttttctcacccaaatattataaattgtcaataaatatatcaaatgtaaatatcgtaaaaataaaatattaaatcagttatgtaaaatttgtacctaaagagatctaaaattttatgttatcaaatgtaagtatctcactttttaccacaggcatataaattttcaaataccggctttactctttctatccttcaaatttgccactagaaatactttacaatgctttccacgttggacgacagttgatgtgatcttgattattgatatgagataatattcttatatgtcatttaatttaatcaatgtattaatactaatctaattaatttaccagatcacatatcaatatgttttcaatctcagggcgaattataaaattaattacttacttacgtggcttctaagtatttcttaatggttcctaatcgggataggaaagaaaagagtaaaataataacacatatgggttacaattgtaatcaaaatattgtttattttatttaaatggcaatcactgcttaatatttgctatatcttattattcttaaacataacatttacacatgggaatcttatttccttttggtttccaattgaaagtttttattaacatttaactattatgatttattagcaacaattctatttaagtttgatgaagcttttctgatattattgattatgtttcttcaattttaaatgtggtatttaatacgaaaaacccatacattcatgtccaaacaaatgagactgacctttttctggtgaactgagaatgtcttcacacaagacccgtttcctgctatccttggctgcaatcaaaacctcgtcctggcttccagtaatgttctcctttgaaactagctcgtatagctctcgttcctgcttctgtcgtgatgctgtgttctacctttttcgaaactgcaatcagctaccgggaactcttggctcaaggaggttcttttactctcaacctggcctacctctcgttccacgatagatactccacactcacggaactacaccggctttctcactctccgtacactaccgtctactactggacttcacttctcgacagctcaaaacattctgatctctatttgtcattcattcccctactttctaaatatcccttccagattcacaaatcaaacttccaccaccaactctcattcgcagtattcctcaaaaccaatttttaatctttctaaatatgcttaatggatttcaaagaaaatagttaattcccattctaaaattactttctactatttacaaatttaatgacctattctctatttccacttagtcttatttagcatcggctaatgatcgatccttccgcgaacaacgataatgacctattatcgatttcacttgagtcttatttaatcacttcttaaaattaaatataacaatttgttgtatacaggttgttctaaatttatatgcccgtggttgagaaaattgaaaatattttatattaaattgaattttgtttataattatcaaaatttaattttcatatcaaatagaaatataacaaatccccgccttgtattcgataaaatttatctgcatttttaaataaattttctcgaggcaaaaccaactccctgtatatttccttactttaatctacgtcttataccccttcttcttgtattactctaattagtcccacctgtagagtaattgtttccttattttcagtgtcctcatcctgtgttagagtgtcggctattatgttgtctttccctttttcccatatcaatcttctgtctttttcctcagatttttcacatacttttaccgtgtattctgcatcctcgttttcatatgcctcctcttcaaatgccactgtttcgatcatatctttttcgctttcatttgttagctttatttcttcttctcctgagctcatctcttcttttgaggaatcccagttttcttttgcttttgatactctcaatttttcttcttctgggctcaactcttcttttgaggagccacaggtttcattttcttttgtctttttctgactttttctcccttttcttctttgtccttgcttcgttgccaaattcatttccactgtttgttctttacctgattcgtccgtattttgtttctcctgttccttgtcctgttcttcttctttttcttctgttagattcatcgtattatttttaaaatctatcactacatgtttttctgccaattcgtcaactcctactatcatgtcatgtgacatgtttggcattattacacattgtagtgcatacatcttcttacccagtcgtaccattactcgtatgccttcatttatagttgccaatgtccgtttgtttgcgcccactaaatttaccctaggtattttgtaaattaaatttgttaagttaacttcttctattagttttctgttgaccaatgttatttcagatccagtgtctatcataattttaattggtttctcgttgataaatccatccacaaattttaaattaactccatttttcttttcgttgtttcttgccaatttaataaactccttggggttacaaaagattcctgtttgatttttggtttttagtgagcgccgtcgtgaaaagacgccggttgctcatcgttgtttatattttcgtcataatgtctctctccgtcatattcatctgtctgggtattatttacttctcttctattttctcttggtctgtcggatctgtttcggttttctcgatatccctgttcattttgtctaccattatttctgttttcttgatttgagcgtgtggtgtttctattctggtattctcgatttctgtcctcattccattgcctatttctttgttcataatttcctcttccgttgtctctattttcgttttcccttctgggattaaaatctcgtcttgtatagtccctcctattttgatttctatctctgtaatctgtgtttctcggggcctgtaatcttctcgcgaccttcttgattttctttctcttagacgtgattctcttatttgtaggaattggcataaactatctatgtctttgtagttttgcaatgtgatatggtcttccagcgtttcttcgaaatgtcttgcaatcagttcgactaattgttccgatgagtaattatattgtaaatgttttgcattattgtaaatttgcaaagcatatgtcctttctgatacacccatcctatcattgtatttcccattttgcaattccttgttaatttccaattgttggactttccccagaaataattcaaaaatttttgttcaaattgttgccaattgccgaattcttcttctttgctatcgaaccataggcttgcttcatatttgagatggtttctgatagtttcttttgctgtttcgaaatttccgatgtgctgtattttctttttcaggctatttatgaacggcactgggtgtaatcttcttacatccccgccaaaccttatcttcacgtcatctgtgctatgtataaccatttctcttctttctccgacattctgttgcgtattgatttccgcaatctttctttccacttcttctatgtctgcttgaatagcgttttgcaacttgttttccaaactttccatttcttttttctggcaattcgttatctccttcattttgattttgatttctttaatctctatctcttgttctcccatctcgttcttgatcattgtcaaacatccttttacttccttttcatacttttctatgcgttcctccattttcttgttgttctcttctattgcttgtttcatttttttgttgtgtttgatccattttttgatccaatttttgttgtgtttcctccattttttgttgtgtttcatccattttttgatccactttatctattttctttgatgtttc

SEQ ID NO: 949 - DNA, 6701 bp, Diabrotica virgifera
  SmartBlast Evalue=6E-79; Info=Pol polyprotein (Fragment) n=1 Tax=Drosophila buzzatii RepID=A1BPH1_DROBU
ggagttgcatcagttgtaatagtttatctattcctgataattcttgctgttctgatgccatgattgtcgtgtctaaaatatcttcttggtctgaatgttctttttgttttttgttgtctttgctttggcttcttgtcacagacatttgttttcaagaagtactgtccccgccaaatatgaaattttactagtatgttaccaagacgactttttctcacccaaatattataaattgtcaataaatatatcaaatgtaaatatcgtaaaaataaaatattaaatcagttatgtaaaatttgtacctaaagagatctaaaattttatgttatcaaatgtaagtatctcactttttaccacaggcatataaattttcaaataccggctttactctttctatccttcaaatttgccactagaaatactttacaatgctttccacgttggacgacagttgatgtgatcttgattattgatatgagataatattcttatatgtcatttaatttaatcaatgtattaatactaatctaattaatttaccagatcacatatcaatatgttttcaatctcagggctttttataaaattaattacttacttacgtggcttctaagtatttcttaatggttcctaatcgggataggaaagaaaagagtaaaataataacacatatgggttacaattgtaatcaaaatattgtttattttatttaaatggcaatcactgcttaatatttgctatatcttattattcttaaacataacatttacacatgggaatcttatttccttttggtttccaattgaaagtttttattaacatttaactattatgatttattagcaacaattctatttaagtttgatgaagcttttctgatattattgattatgtttcttcaattttaaatgtggtatttaatacgaaaaacccatacattcatgtccaaacaaatgagactgacctttttctggtgaactgagaatgtcttcacacaagacccgtttcctgctatccttggctgcaatcaaaacctcgtcctggcttccagtaatgttctcctttgaaactagctcgtatagctctcgttcctgcttctgtcgtgatgctgtgttctacctttttcgaaactgcaatcagctaccgggaactcttggctcaaggaggttcttttactctcaacctggcctacctctcgttccacgatagatactccacactcacggaactacaccggctttctcactctccgtacactaccgtctactactggacttcacttctcgacagctcaaaacattctgatctctatttgtcattcattcccctactttctaaatatcccttccagattcacaaatcaaacttccaccaccaactctcattcgcagtattcctcaaaaccaatttttaatctttctaaatatgcttaatggatttcaaagaaaatagttaattcccattctaaaattactttctactatttacaaatttaatgatctattatctacttccactaagtcttatttagcatcggctaatgatcgaaccttccgcgaacaacgataatgacctattatcgatttcacttgagtcttatttagcataggctaatgatcgaacctcccgcgaacaacgacaatggtacgcgccattcactttgttcattctaagcgcattgtcccgagtttcgtttaatcacttcttaaaattaaatataacaatttgttgtatacaggttgttctaaatttatatgcccgtggttgagaaaattgaaaatattttatattaaattgaattttgtttataattatcaaaatttaattttcatatcaaatagaaatataacaaatccccgccttgtattcgataaaatttatctgcatttttaaataaattttctcgaggcaaaaccaactccctgtatatttccttactttaatctacgtcttatatcctaacttactatctacttcatgtaattctgtcttttattcgtgatatttgtatacatcgtgaatattataaattcctcggatcttttccgagttcctgtgcctcaactcataactatttatcccattttcattattcacgatgtacgggccttcgaaaacaggcatcaactttgcgcaaatgcccccaggaagatttgatactcgtaatgccctcacgagtactttttcacccttttggaaagtcactggtcttctttttctattttgttcctgtctttggatatatttttcgttgcttcgccgtaatcttctctgtacggtttcaatcacctgttgatattcttttggctcttggtcttcccatggccttatcggcagtacacccttcatgatgtattctggggtctcttttgttactgtgctcggaattgtatttagatacctttctatttccgccattttcctgtcccagtggcgatgttgaccatctgttgcaatgcgaagaaatttcgtcacttcctgtatgaatcgttccgaaggattactctgtggatgcctgatgctgacaaaatttgtctctattcctcgttctcgaagttgtcccttgaaacgatcatttcggaaatacgttgcattgtccagtagaatcttttttggtgttcctactatggctataaaattgtcgatttttcttaatatctcctccccctttgtggtgcggcaactatataattttacgtattttgaaaacacatccaccattaccagaatatgtttgttccttttagtggtcataattagatcgcttaacatatctattgctacaatgtctagtttgtttcgggcttcaatatttttggcaacattttcgtttttgaaattccgactcttatatttttgacatacatcgcacttctgggtaatttcctttgcaatgcggtaatcctgtcggctgatgtaattttccctaaaaacgagccaaacttttctgctaccgatatgcccattgtcctcatgtaatttctttattatcttttcggccaatgtctgtgtcactaaatatagttcctttccgtctattctcttaaaatatatgtcattttctacttccgctcttcttttctctctttcctctaggtcttcttggtttgtccttatctcatttaacgaatatatcccttcttcttgtattaatctatttagtcccacctgtagagtaattgtttccttttttcccgtgtcctcatcccgtgttagagcgtcggctattatgttgtcttttccttttatatatcggaactcaaaatcatactcctgtaataatagaatgcctctatgtattctattatttactaatctattcttcatgatatgtactaaagctgcatggtttgtttcgattgtgaattttgctcccaataagtaaaacctcaatttgtttacgcaatatagtacactggcaaactccaattctgtaacactatattttctctcatgtgtttttgtcactcgagatataaaacatatcggcacttcttggtcgttttgtatttgagacagaactcctgcaaatttttgtatggacgcatcagttcggagtataaaaggtaaattgtaaatggggtggtatattttcgttccttttgcgaattctcgttttaatgtttcgaaagcttcctcctgttcttctttccaattccattttattccttttttaagcaactttatcagagggatttccttttggctcaaatcgggaatcagttttttaaaataattaatcgtgccaagaaaacctctcaatgttttcaaattcgttggtcttgggtattcatctatgagcttgactctgtcttcggataatcttactgttttggtgtccaattgaaaacccaaataaatgacttctttttgaaaaaattgacatttttcaatgtttaatttcaatcccgctgtgtccaattcttccagaattatttctatgtgtttcagatgactctgagtatcttgtgaaaaaattaataaatcatcgatataatgaactatgaaatcttcgtggcgattcaaaatggtatgtagagctcggacgagtgcagcacaagcactctgcaatccaaacggcactaccttaaaccggtagacaataccatcaatagaaaaagcggtgtagtttctacacttttcagctaacggtatcaaccaaaaactgtgttttaagtcaattttcgaaaatatgtgtgacccggtgattcttccaaaaatggcctcgatgtttagaggtgattcatattgtgatacagtgtgctggttgatattcctggcatctaaacataatctcaattctccattgcttttctttactatcacaatcgggttaacatacggtgaatcacatctttcgatgatttgatcttccaacattttatttatttcttctttcacctcttgtcgatacttgtatggaatcgggtaagtctttgatcgaaaatttcccaagtttttcacctcaaatgaatgttcgtactttttagccactctgttttcctcattgatcaaattttcgtagtttcttaacatcaaccgcaattctttttctttcccttctccacatatcaattttctgtctttttttctcagattcttcacacatgtttaccgtgcattctgcatcctcgtttgcatatacctcctcttcaaataccactgtttcaatcatattcttttcactttcattttttagctttatttcttcttctcctgagctcatctcttcttttgaggaatcccagttttcttttgcttttgatactctcaatttttcttcttctgggctcaactcttcttttgaggagccacaggtttcattttcttttgtctttttctgactttttctcccttttcttctttgtccttgcttcgttgccaaattcatttccactgtttgttctttacctgattcgtccgtattttgtttctcctgttccttgtcctgttcttcttctttttcttctgttagattcatcgtattatttttaaaatctatcactacatgtttttctgccaattcgtcaactcctactatcatgtcatgtgacatgtttggcattattacacattgtagtgcatacatcttcttacccagtcgtaccattactcgtatgccttcatttatagttgccaatgtccgtttgtttgcgcccactaaatttaccctaggtattttgtaaattaaatttgttaagttaacttcttctattagttttctgttgaccaatgttatttcagatccagtgtctatcataattttaattggtttctcgttgataaatccatccacaaattttaaattaactccatttttcttttcgttgtttcttgccaatttaataaactccttggggttacaaaagattcctgtttgatttttggtttttagtgagcgccgtcgtgaaaagacgccggttgctcatcgttgtttatattttcgtcataatgtctctctccgtcatattcatctgtctgggtattatttacttctcttctattttctcttggtctgtcggatctgtttcggttttctcgatatccctgttcattttgtctaccattatttctgttttcttgatttgagcgtgtggtgtttctattctggtattctcgatttctgtcctcattccattgcctatttctttgttcataatttcctcttccgttgtctctattttcgttttcccttctgggattaaaatctcgtcttgtatagtccctcctattttgatttctatctctgtaatctgtgtttctcggggcctgtaatcttctcgcgaccttcttgattttctttctcttagacgtgattctcttatttgtaggaattggcataaactatctatgtctttgtagttttgcaatgtgatatggtcttccagcgtttcttcgaaatgtcttgcaatcagttcgactaattgttccgatgagtaattatattgtaaatgttttgcattattgtaaatttgcaaagcatatgtcctttctgatacacccatcctatcattgtatttcccattttgcaattccttgttaatttccaattgttggactttccccagaaataattcaaaaatttttgttcaaattgttgccaattgccgaattcttcttctttgctatcgaaccataggcttgcttcatatttgagatggtttctgatagtttcttttgctgtttcgaaatttccgatgtgctgtattttctttttcaggctatttatgaacggcactgggtgtaatcttcttacatccccgccaaaccttatcttcacgtcatctgtgctatgtataaccatttctcttctttctccgacattctgttgcgtattgatttccgcaatctttctttccacttcttctatgtctgcttgaatagcgttttgcaacttgttttccaaactttccatttcttttttctggcaattcgttatctccttcattttgattttgatttctttaatctctatctcttgttctcccatctcgttcttgatcattgtcaaacatccttttacttccttttcatacttttctatgcgttcctccattttcttgttgttctcttctattgcttgtttcatttttttgttgtgtttgatccattttttgatccaatttttgttgtgtttcctccattttttgttgtgtttcatccattttttgatccactttatctattttctttgatgtttc

SEQ ID NO: 950 - DNA, 4111 bp, Diabrotica virgifera
ggagttgcatcagttgtaatagtttatctattcctgataattcttgctgttctgatgccatgattgtcgtgtctaaaatatcttcttggtctgaatgttctttttgttttttgttgtctttgctttggcttcttgtcacagacatttgttttcaagaagtactgtccccgccaaatatgaaattttactagtatgttaccaagacgactttttctcacccaaatattataaattgtcaataaatatatcaaatgtaaatatcgtaaaaataaaatattaaatcagttatgtaaaatttgtacctaaagagatctaaaattttatgttatcaaatgtaagtatctcactttttaccacaggcatataaattttcaaataccggctttactctttctatccttcaaatttgccactagaaatactttacaatgctttccacgttggacgacagttgatgtgatcttgattattgatatgagataatattcttatatgtcatttaatttaatcaatgtattaatactaatctaattaatttaccagatcacatatcaatatgttttcaatctcagggctttttataaaattaattacttacttacgtggcttctaagtatttcttaatggttcctaatcgggataggaaagaaaagagtaaaataataacacatatgggttacaattgtaatcaaaatattgtttattttatttaaatggcaatcactgcttaatatttgctatatcttattattcttaaacataacatttacacatgggaatcttatttccttttggtttccaattgaaagtttttattaacatttaactattatgatttattagcaacaattctatttaagtttgatgaagcttttctgatattattgattatgtttcttcaattttaaatgtggtatttaatacgaaaaacccatacattcatgtccaaacaaatgagactgacctttttctggtgaactgagaatgtcttcacacaagacccgtttcctgctatccttggctgcaatcaaaacctcgtcctggcttccagtaatgttctcctttgaaactagctcgtatagctctcgttcctgcttctgtcgtgatgctgtgttctacctttttcgaaactgcaatcagctaccgggaactcttggctcaaggaggttcttttactctcaacctggcctacctctcgttccacgatagatactccacactcacggaactacaccggctttctcactctccgtacactaccgtctactactggacttcacttctcgacagctcaaaacattctgatctctatttgtcattcattcccctactttctaaatatcccttccagattcacaaatcaaacttccaccaccaactctcattcgcagtattcctcaaaaccaatttttaatctttctaaatatgcttaatggatttcaaagaaaatagttaattcccattctaaaattactttctactatttacaaatttaatgacctattctctatttccacttagtcttatttagcatcggctaatgatcgatccttccgcgaacaacgataatgacctattatcgatttcacttgagtcttatttaatcacttcttaaaattaaatataacaatttgttgtatacaggttgttctaaatttatatgcccgtggttgagaaaattgaaaatattttatattaaattgaattttgtttataattatcaaaatttaattttcatatcaaatagaaatataacaaatccccgccttgtattcgataaaatttatctgcatttttaaataaattttctcgaggcaaaaccaactccctgtatatttccttactttaatctacgtcttataccccttcttcttgtattactctaattagtcccacctgtagagtaattgtttccttattttcagtgtcctcatcctgtgttagagtgtcggctattatgttgtctttccctttttcccatatcaatcttctgtctttttcctcagatttttcacatacttttaccgtgtattctgcatcctcgttttcatatgcctcctcttcaaatgccactgtttcgatcatatctttttcgctttcatttgttagctttatttcttcttctcctgagctcatctcttcttttgaggaatcccagttttcttttgcttttgatactctcaatttttcttcttctgggctcaactcttcttttgaggagccacaggtttcattttcttttgtctttttctgactttttctcccttttcttctttgtccttgcttcgttgccaaattcatttccactgtttgttctttacctgattcgtccgtattttgtttctcctgttccttgtcctgttcttcttctttttcttctgttagattcatcgtattatttttaaaatctatcactacatgtttttctgccaattcgtcaactcctactatcatgtcatgtgacatgtttggcattattacacattgtagtgcatacatcttcttacccagtcgtaccattactcgtatgccttcatttatagttgccaatgtccgtttgtttgcgcccactaaatttaccctaggtattttgtaaattaaatttgttaagttaacttcttctattagttttctgttgaccaatgttatttcagatccagtgtctatcataattttaattggtttctcgttgataaatccatccacaaattttaaattaactccatttttcttttcgttgtttcttgccaatttaataaactccttggggttacaaaagattcctgtttgatttttggtttttagtgagcgccgtcgtgaaaagacgccggttgctcatcgttgtttatattttcgtcataatgtctctctccgtcatattcatctgtctgggtattatttacttctcttctattttctcttggtctgtcggatctgtttcggttttctcgatatccctgttcattttgtctaccattatttctgttttcttgatttgagcgtgtggtgtttctattctggtattctcgatttctgtcctcattccattgcctatttctttgttcataatttcctcttccgttgtctctattttcgttttcccttctgggattaaaatctcgtcttgtatagtccctcctattttgatttctatctctgtaatctgtgtttctcggggcctgtaatcttctcgcgaccttcttgattttctttctcttagacgtgattctcttatttgtaggaattggcataaactatctatgtctttgtagttttgcaatgtgatatggtcttccagcgtttcttcgaaatgtcttgcaatcagttcgactaattgttccgatgagtaattatattgtaaatgttttgcattattgtaaatttgcaaagcatatgtcctttctgatacacccatcctatcattgtatttcccattttgcaattccttgttaatttccaattgttggactttccccagaaataattcaaaaatttttgttcaaattgttgccaattgccgaattcttcttctttgctatcgaaccataggcttgcttcatatttgagatggtttctgatagtttcttttgctgtttcgaaatttccgatgtgctgtattttctttttcaggctatttatgaacggcactgggtgtaatcttcttacatccccgccaaaccttatcttcacgtcatctgtgctatgtataaccatttctcttctttctccgacattctgttgcgtattgatttccgcaatctttctttccacttcttctatgtctgcttgaatagcgttttgcaacttgttttccaaactttccatttcttttttctggcaattcgttatctccttcattttgattttgatttctttaatctctatctcttgttctcccatctcgttcttgatcattgtcaaacatccttttacttccttttcatacttttctatgcgttcctccattttcttgttgttctcttctattgcttgtttcatttttttgttgtgtttgatccattttttgatccaatttttgttgtgtttcctccattttttgttgtgtttcatccattttttgatccactttatctattttctttgatgtttc

SEQ ID NO: 951 - DNA, 4111 bp, Diabrotica virgifera
ggagttgcatcagttgtaatagtttatctattcctgataattcttgctgttctgatgccatgattgtcgtgtctaaaatatcttcttggtctgaatgttctttttgttttttgttgtctttgctttggcttcttgtcacagacatttgttttcaagaagtactgtccccgccaaatatgaaattttactagtatgttaccaagacgactttttctcacccaaatattataaattgtcaataaatatatcaaatgtaaatatcgtaaaaataaaatattaaatcagttatgtaaaatttgtacctaaagagatctaaaattttatgttatcaaatgtaagtatctcactttttaccacaggcatataaattttcaaataccggctttactctttctatccttcaaatttgccactagaaatactttacaatgctttccacgttggacgacagttgatgtgatcttgattattgatatgagataatattcttatatgtcatttaatttaatcaatgtattaatactaatctaattaatttaccagatcacatatcaatatgttttcaatctcagggcgaattataaaattaattacttacttacgtggcttctaagtatttcttaatggttcctaatcgggataggaaagaaaagagtaaaataataacacatatgggttacaattgtaatcaaaatattgtttattttatttaaatggcaatcactgcttaatatttgctatatcttattattcttaaacataacatttacacatgggaatcttatttccttttggtttccaattgaaagtttttattaacatttaactattatgatttattagcaacaattctatttaagtttgatgaagcttttctgatattattgattatgtttcttcaattttaaatgtggtatttaatacgaaaaacccatacattcatgtccaaacaaatgagactgacctttttctggtgaactgagaatgtcttcacacaagacccgtttcctgctatccttggctgcaatcaaaacctcgtcctggcttccagtaatgttctcctttgaaactagctcgtatagctctcgttcctgcttctgtcgtgatgctgtgttctacctttttcgaaactgcaatcagctaccgggaactcttggctcaaggaggttcttttactctcaacctggcctacctctcgttccacgatagatactccacactcacggaactacaccggctttctcactctccgtacactaccgtctactactggacttcacttctcgacagctcaaaacattctgatctctatttgtcattcattcccctactttctaaatatcccttccagattcacaaatcaaacttccaccaccaactctcattcgcagtattcctcaaaaccaatttttaatctttctaaatatgcttaatggatttcaaagaaaatagttaattcccattctaaaattactttctactatttacaaatttaatgacctattctctatttccacttagtcttatttagcatcggctaatgatcgatccttccgcgaacaacgataatgacctattatcgatttcacttgagtcttatttaatcacttcttaaaattaaatataacaatttgttgtatacaggttgttctaaatttatatgcccgtggttgagaaaattgaaaatattttatattaaattgaattttgtttataattatcaaaatttaattttcatatcaaatagaaatataacaaatccccgccttgtattcgataaaatttatctgcatttttaaataaattttctcgaggcaaaaccaactccctgtatatttccttactttaatctacgtcttataccccttcttcttgtattactctaattagtcccacctgtagagtaattgtttccttattttcagtgtcctcatcctgtgttagagtgtcggctattatgttgtctttccctttttcccatatcaatcttctgtctttttcctcagatttttcacatacttttaccgtgtattctgcatcctcgttttcatatgcctcctcttcaaatgccactgtttcgatcatatctttttcgctttcatttgttagctttatttcttcttctcctgagctcgtctcttcttttgaggaatcccaggtttcctttgtttctgatactctcaaattttcttcttctgggctcaactcttcttttgaggagccacaggtttcattttcttttatctttttctgaccttttctcctttttcttctttgtccttgcttcgctgccaaattcatttccactgtttgttctttacctgattcgtccgtattttgtttctcatgttccttgtcctgttctttttctttttcttctgttagtttcatcgtattatttttaaaatctatcactacatgtttttctgccaattcgtcaactcctactatcatgtcatgtgacatgtttggcattattacacattgtagtgcatacatcttcttacccagtcgtaccattactcgtatgccttcatttatagttgccaatgtccgtttgtttgcgcccactaaatttaccctaggtattttgtaaattaaatttgttaagttaacttcttctattagttttctgttgaccaatgttatttcagatccagtgtctatcataattttaattggtttctcgttgataaatccatccacaaattttaaattaactccatttttcttttcgttgtttcttgccaatttaataaactccttggggttacaaaagattcctgtttgatttttggtttttagtgagcgccgtcgtgaaaagacgccggttgctcatcgttgtttatattttcgtcataatgtctctctccgtcatattcatctgtctgggtattatttacttctcttctattttctcttggtctgtcggatctgtttcggttttctcgatatccctgttcattttgtctaccattatttctgttttcttgatttgagcgtgtggtgtttctattctggtattctcgatttctgtcctcattccattgcctatttctttgttcataatttcctcttccgttgtctctattttcgttttcccttctgggattaaaatctcgtcttgtatagtccctcctattttgatttctatctctgtaatctgtgtttctcggggcctgtaatcttctcgcgaccttcttgattttctttctcttagacgtgattctcttatttgtaggaattggcataaactatctatgtctttgtagttttgcaatgtgatatggtcttccagcgtttcttcgaaatgtcttgcaatcagttcgactaattgttccgatgagtaattatattgtaaatgttttgcattattgtaaatttgcaaagcatatgtcctttctgatacacccatcctatcattgtatttcccattttgcaattccttgttaatttccaattgttggactttccccagaaataattcaaaaatttttgttcaaattgttgccaattgccgaattcttcttctttgctatcgaaccataggcttgcttcatatttgagatggtttctgatagtttcttttgctgtttcgaaatttccgatgtgctgtattttctttttcaggctatttatgaacggcactgggtgtaatcttcttacatccccgccaaaccttatcttcacgtcatctgtgctatgtataaccatttctcttctttctccgacattctgttgcgtattgatttccgcaatctttctttccacttcttctatgtctgcttgaatagcgttttgcaacttgttttccaaactttccatttcttttttctggcaattcgttatctccttcattttgattttgatttctttaatctctatctcttgttctcccatctcgttcttgatcattgtcaaacatccttttacttccttttcatacttttctatgcgttcctccattttcttgttgttctcttctattgcttgtttcatttttttgttgtgtttgatccattttttgatccaatttttgttgtgtttcctccattttttgttgtgtttcatccattttttgatccactttatctattttctttgatgtttc

SEQ ID NO: 952 - DNA, 4111 bp, Diabrotica virgifera
ggagttgcatcagttgtaatagtttatctattcctgataattcttgctgttctgatgccatgattgtcgtgtctaaaatatcttcttggtctgaatgttctttttgttttttgttgtctttgctttggcttcttgtcacagacatttgttttcaagaagtactgtccccgccaaatatgaaattttactagtatgttaccaagacgactttttctcacccaaatattataaattgtcaataaatatatcaaatgtaaatatcgtaaaaataaaatattaaatcagttatgtaaaatttgtacctaaagagatctaaaattttatgttatcaaatgtaagtatctcactttttaccacaggcatataaattttcaaataccggctttactctttctatccttcaaatttgccactagaaatactttacaatgctttccacgttggacgacagttgatgtgatcttgattattgatatgagataatattcttatatgtcatttaatttaatcaatgtattaatactaatctaattaatttaccagatcacatatcaatatgttttcaatctcagggctttttataaaattaattacttacttacgtggcttctaagtatttcttaatggttcctaatcgggataggaaagaaaagagtaaaataataacacatatgggttacaattgtaatcaaaatattgtttattttatttaaatggcaatcactgcttaatatttgctatatcttattattcttaaacataacatttacacatgggaatcttatttccttttggtttccaattgaaagtttttattaacatttaactattatgatttattagcaacaattctatttaagtttgatgaagcttttctgatattattgattatgtttcttcaattttaaatgtggtatttaatacgaaaaacccatacattcatgtccaaacaaatgagactgacctttttctggtgaactgagaatgtcttcacacaagacccgtttcctgctatccttggctgcaatcaaaacctcgtcctggcttccagtaatgttctcctttgaaactagctcgtatagctctcgttcctgcttctgtcgtgatgctgtgttctacctttttcgaaactgcaatcagctaccgggaactcttggctcaaggaggttcttttactctcaacctggcctacctctcgttccacgatagatactccacactcacggaactacaccggctttctcactctccgtacactaccgtctactactggacttcacttctcgacagctcaaaacattctgatctctatttgtcattcattcccctactttctaaatatcccttccagattcacaaatcaaacttccaccaccaactctcattcgcagtattcctcaaaaccaatttttaatctttctaaatatgcttaatggatttcaaagaaaatagttaattcccattctaaaattactttctactatttacaaatttaatgacctattctctatttccacttagtcttatttagcatcggctaatgatcgatccttccgcgaacaacgataatgacctattatcgatttcacttgagtcttatttaatcacttcttaaaattaaatataacaatttgttgtatacaggttgttctaaatttatatgcccgtggttgagaaaattgaaaatattttatattaaattgaattttgtttataattatcaaaatttaattttcatatcaaatagaaatataacaaatccccgccttgtattcgataaaatttatctgcatttttaaataaattttctcgaggcaaaaccaactccctgtatatttccttactttaatctacgtcttataccccttcttcttgtattactctaattagtcccacctgtagagtaattgtttccttattttcagtgtcctcatcctgtgttagagtgtcggctattatgttgtctttccctttttcccatatcaatcttctgtctttttcctcagatttttcacatacttttaccgtgtattctgcatcctcgttttcatatgcctcctcttcaaatgccactgtttcgatcatatctttttcgctttcatttgttagctttatttcttcttctcctgagctcgtctcttcttttgaggaatcccaggtttcctttgtttctgatactctcaaattttcttcttctgggctcaactcttcttttgaggagccacaggtttcattttcttttatctttttctgaccttttctcctttttcttctttgtccttgcttcgctgccaaattcatttccactgtttgttctttacctgattcgtccgtattttgtttctcatgttccttgtcctgttctttttctttttcttctgttagtttcatcgtattatttttaaaatctatcactacatgtttttctgccaattcgtcaactcctactatcatgtcatgtgacatgtttggcattattacacattgtagtgcatacatcttcttacccagtcgtaccattactcgtatgccttcatttatagttgccaatgtccgtttgtttgcgcccactaaatttaccctaggtattttgtaaattaaatttgttaagttaacttcttctattagttttctgttgaccaatgttatttcagatccagtgtctatcataattttaattggtttctcgttgataaatccatccacaaattttaaattaactccatttttcttttcgttgtttcttgccaatttaataaactccttggggttacaaaagattcctgtttgatttttggtttttagtgagcgccgtcgtgaaaagacgccggttgctcatcgttgtttatattttcgtcataatgtctctctccgtcatattcatctgtctgggtattatttacttctcttctattttctcttggtctgtcggatctgtttcggttttctcgatatccctgttcattttgtctaccattatttctgttttcttgatttgagcgtgtggtgtttctattctggtattctcgatttctgtcctcattccattgcctatttctttgttcataatttcctcttccgttgtctctattttcgttttcccttctgggattaaaatctcgtcttgtatagtccctcctattttgatttctatctctgtaatctgtgtttctcggggcctgtaatcttctcgcgaccttcttgattttctttctcttagacgtgattctcttatttgtaggaattggcataaactatctatgtctttgtagttttgcaatgtgatatggtcttccagcgtttcttcgaaatgtcttgcaatcagttcgactaattgttccgatgagtaattatattgtaaatgttttgcattattgtaaatttgcaaagcatatgtcctttctgatacacccatcctatcattgtatttcccattttgcaattccttgttaatttccaattgttggactttccccagaaataattcaaaaatttttgttcaaattgttgccaattgccgaattcttcttctttgctatcgaaccataggcttgcttcatatttgagatggtttctgatagtttcttttgctgtttcgaaatttccgatgtgctgtattttctttttcaggctatttatgaacggcactgggtgtaatcttcttacatccccgccaaaccttatcttcacgtcatctgtgctatgtataaccatttctcttctttctccgacattctgttgcgtattgatttccgcaatctttctttccacttcttctatgtctgcttgaatagcgttttgcaacttgttttccaaactttccatttcttttttctggcaattcgttatctccttcattttgattttgatttctttaatctctatctcttgttctcccatctcgttcttgatcattgtcaaacatccttttacttccttttcatacttttctatgcgttcctccattttcttgttgttctcttctattgcttgtttcatttttttgttgtgtttgatccattttttgatccaatttttgttgtgtttcctccattttttgttgtgtttcatccattttttgatccactttatctattttctttgatgtttc

SEQ ID NO: 953 - DNA, 4017 bp, Diabrotica virgifera
ggagttgcatcagttgtaatagtttatctattcctgataattcttgctgttctgatgccatgattgtcgtgtctaaaatatcttcttggtctgaatgttctttttgttttttgttgtctttgctttggcttcttgtcacagacatttgttttcaagaagtactgtccccgccaaatatgaaattttactagtatgttaccaagacgactttttctcacccaaatattataaattgtcaataaatatatcaaatgtaaatatcgtaaaaataaaatattaaatcagttatgtaaaatttgtacctaaagagatctaaaattttatgttatcaaatgtaagtatctcactttttaccacaggcatataaattttcaaataccggctttactctttctatccttcaaatttgccactagaaatactttacaatgctttccacgttggacgacagttgatgtgatcttgattattgatatgagataatattcttatatgtcatttaatttaatcaatgtattaatactaatctaattaatttaccagatcacatatcaatatgttttcaatctcagggcgaattataaaattaattacttacttacgtggcttctaagtatttcttaatggttcctaatcgggataggaaagaaaagagtaaaataataacacatatgggttacaattgtaatcaaaatattgtttattttatttaaatggcaatcactgcttaatatttgctatatcttattattcttaaacataacatttacacatgggaatcttatttccttttggtttccaattgaaagtttttattaacatttaactattatgatttattagcaacaattctatttaagtttgatgaagcttttctgatattattgattatgtttcttcaattttaaatgtggtatttaatacgaaaaacccatacattcatgtccaaacaaatgagactgacctttttctggtgaactgagaatgtcttcacacaagacccgtttcctgctatccttggctgcaatcaaaacctcgtcctggcttccagtaatgttctcctttgaaactagctcgtatagctctcgttcctgcttctgtcgtgatgctgtgttctacctttttcgaaactgcaatcagctaccgggaactcttggctcaaggaggttcttttactctcaacctggcctacctctcgttccacgatagatactccacactcacggaactacaccggctttctcactctccgtacactaccgtctactactggacttcacttctcgacagctcaaaacattctgatctctatttgtcattcattcccctactttctaaatatcccttccagattcacaaatcaaacttccaccaccaactctcattcgcagtattcctcaaaaccaatttttaatctttctaaatatgcttaatggatttcaaagaaaatagttaattcccattctaaaattactttctactatttacaaatttaatgatctattatctacttccactaagtcttatttagcatcggctaatgatcgaaccttccgcgaacaacgataatgacctattatcgatttcacttgagtcttatttagcataggctaatgatcgaacctcccgcgaacaacgacaatggtacgcgccattcactttgttcattctaagcgcattgtcccgagtttcgtttaatcacttcttaaaattaaatataacaatttgttgtatacaggttgttctaaatttatatgcccgtggttgagaaaattgaaaatattttatattaaattgaattttgtttataattatcaaaatttaattttcatatcaaatagaaatataacaaatccccgccttgtattcgataaaatttatctgcatttttaaataaattttctcgaggcaaaaccaactccctgtatatttccttactttaatctacgtcttataccccttcttcttgtattactctaattagtcccacctgtagagtaattgtttccttattttcagtgtcctcatcctgtgttagagtgtcggctattatgttgtctttccctttttcccatatcaatcttctgtctttttcctcagatttttcacatacttttaccgtgtattctgcatcctcgttttcatatgcctcctcttcaaatgccactgtttcgatcatatctttttcgctttcatttgttagctttatttcttcttctcctgagctcatctcttcttttgaggaatcccagttttcttttgcttttgatactctcaatttttcttcttctgggctcaactcttcttttgaggagccacaggtttcattttcttttgtctttttctgactttttctcccttttcttctttgtccttgcttcgttgccaaattcatttccactgtttgttctttacctgattcgtccgtattttgtttctcctgttccttgtcctgttcttcttctttttcttctgttagattcatcgtattatttttaaaatctatcactacatgtttttctgccaattcgtcaactcctactatcatgtcatgtgacatgtttggcattattacacattgtagtgcatacatcttcttacccagtcgtaccattactcgtatgccttcatttatagttgccaatgtccgtttgtttgcgcccactaaatttaccctaggtattttgtaaattaaatttgttaagttaacttcttctattagttttctgttgaccaatgttatttcagatccagtgtctatcataattttaattggtttctcgttgataaatccatccacaaattttaaattaactccatttttcttttcgttgtttcttgccaatttaataaactccttggggttacaaaagattcctgtttgatttttggtttttagtgagcgccgtcgtgaaaagacgccggttgctcatcgttgtttatattttcgtcataatgtctctctccgtcatattcatctgtctgggtattatttacttctcttctattttctcttggtctgtcggatctgtttcggttttctcgatatccctgttcattttgtctaccattatttctgttttcttgatttgagcgtgtggtgtttctattctggtattctcgatttctgtcctcattccattgcctatttctttgttcataatttcctcttccgttgtctctattttcgttttcccttctgggattaaaatctcgtcttgtatagtccctcctattttgatttctatctctgtaatctgtgtttctcggggcctgtaatcttctcgcgaccttcttgattttctttctcttagacgtgattctcttatttgtaggaattggcataaactatctatgtctttgtagttttgcaatgtgatatggtcttccagcgtttcttcgaaatgtcttgcaatcagttcgactaattgttccgatgagtaattatattgtaaatgttttgcattattgtaaatttgcaaagcatatgtcctttctgatacacccatcctatcattgtatttcccattttgcaattccttgttaatttccaattgttggactttccccagaaataattcaaaaatttttgttcaaattgttgccaattgccgaattcttcttctttgctatcgaaccataggcttgcttcatatttgagatggtttctgatagtttcttttgctgtttcgaaatttccgatgtgctgtattttctttttcaggctatttatgaacggcactgggtgtaatcttcttacatccccgccaaaccttatcttcacgtcatctgtgctatgtataaccatttctcttctttctccgacattctgttgcgtcctgttttcggtgacttgtttttctatttctgtgattcttttttccacttcttctctgtctacttgaatagcattttccaacttattttccaaattttctagttcctttttctggccattcgttaactcctttattttatcttgaattttcatttcttgttcttgcatgtgatctttaa

SEQ ID NO: 954 - DNA, 4017 bp, Diabrotica virgifera
ggagttgcatcagttgtaatagtttatctattcctgataattcttgctgttctgatgccatgattgtcgtgtctaaaatatcttcttggtctgaatgttctttttgttttttgttgtctttgctttggcttcttgtcacagacatttgttttcaagaagtactgtccccgccaaatatgaaattttactagtatgttaccaagacgactttttctcacccaaatattataaattgtcaataaatatatcaaatgtaaatatcgtaaaaataaaatattaaatcagttatgtaaaatttgtacctaaagagatctaaaattttatgttatcaaatgtaagtatctcactttttaccacaggcatataaattttcaaataccggctttactctttctatccttcaaatttgccactagaaatactttacaatgctttccacgttggacgacagttgatgtgatcttgattattgatatgagataatattcttatatgtcatttaatttaatcaatgtattaatactaatctaattaatttaccagatcacatatcaatatgttttcaatctcagggctttttataaaattaattacttacttacgtggcttctaagtatttcttaatggttcctaatcgggataggaaagaaaagagtaaaataataacacatatgggttacaattgtaatcaaaatattgtttattttatttaaatggcaatcactgcttaatatttgctatatcttattattcttaaacataacatttacacatgggaatcttatttccttttggtttccaattgaaagtttttattaacatttaactattatgatttattagcaacaattctatttaagtttgatgaagcttttctgatattattgattatgtttcttcaattttaaatgtggtatttaatacgaaaaacccatacattcatgtccaaacaaatgagactgacctttttctggtgaactgagaatgtcttcacacaagacccgtttcctgctatccttggctgcaatcaaaacctcgtcctggcttccagtaatgttctcctttgaaactagctcgtatagctctcgttcctgcttctgtcgtgatgctgtgttctacctttttcgaaactgcaatcagctaccgggaactcttggctcaaggaggttcttttactctcaacctggcctacctctcgttccacgatagatactccacactcacggaactacaccggctttctcactctccgtacactaccgtctactactggacttcacttctcgacagctcaaaacattctgatctctatttgtcattcattcccctactttctaaatatcccttccagattcacaaatcaaacttccaccaccaactctcattcgcagtattcctcaaaaccaatttttaatctttctaaatatgcttaatggatttcaaagaaaatagttaattcccattctaaaattactttctactatttacaaatttaatgatctattatctacttccactaagtcttatttagcatcggctaatgatcgaaccttccgcgaacaacgataatgacctattatcgatttcacttgagtcttatttagcataggctaatgatcgaacctcccgcgaacaacgacaatggtacgcgccattcactttgttcattctaagcgcattgtcccgagtttcgtttaatcacttcttaaaattaaatataacaatttgttgtatacaggttgttctaaatttatatgcccgtggttgagaaaattgaaaatattttatattaaattgaattttgtttataattatcaaaatttaattttcatatcaaatagaaatataacaaatccccgccttgtattcgataaaatttatctgcatttttaaataaattttctcgaggcaaaaccaactccctgtatatttccttactttaatctacgtcttataccccttcttcttgtattactctaattagtcccacctgtagagtaattgtttccttattttcagtgtcctcatcctgtgttagagtgtcggctattatgttgtctttccctttttcccatatcaatcttctgtctttttcctcagatttttcacatacttttaccgtgtattctgcatcctcgttttcatatgcctcctcttcaaatgccactgtttcgatcatatctttttcgctttcatttgttagctttatttcttcttctcctgagctcatctcttcttttgaggaatcccagttttcttttgcttttgatactctcaatttttcttcttctgggctcaactcttcttttgaggagccacaggtttcattttcttttgtctttttctgactttttctcccttttcttctttgtccttgcttcgttgccaaattcatttccactgtttgttctttacctgattcgtccgtattttgtttctcctgttccttgtcctgttcttcttctttttcttctgttagattcatcgtattatttttaaaatctatcactacatgtttttctgccaattcgtcaactcctactatcatgtcatgtgacatgtttggcattattacacattgtagtgcatacatcttcttacccagtcgtaccattactcgtatgccttcatttatagttgccaatgtccgtttgtttgcgcccactaaatttaccctaggtattttgtaaattaaatttgttaagttaacttcttctattagttttctgttgaccaatgttatttcagatccagtgtctatcataattttaattggtttctcgttgataaatccatccacaaattttaaattaactccatttttcttttcgttgtttcttgccaatttaataaactccttggggttacaaaagattcctgtttgatttttggtttttagtgagcgccgtcgtgaaaagacgccggttgctcatcgttgtttatattttcgtcataatgtctctctccgtcatattcatctgtctgggtattatttacttctcttctattttctcttggtctgtcggatctgtttcggttttctcgatatccctgttcattttgtctaccattatttctgttttcttgatttgagcgtgtggtgtttctattctggtattctcgatttctgtcctcattccattgcctatttctttgttcataatttcctcttccgttgtctctattttcgttttcccttctgggattaaaatctcgtcttgtatagtccctcctattttgatttctatctctgtaatctgtgtttctcggggcctgtaatcttctcgcgaccttcttgattttctttctcttagacgtgattctcttatttgtaggaattggcataaactatctatgtctttgtagttttgcaatgtgatatggtcttccagcgtttcttcgaaatgtcttgcaatcagttcgactaattgttccgatgagtaattatattgtaaatgttttgcattattgtaaatttgcaaagcatatgtcctttctgatacacccatcctatcattgtatttcccattttgcaattccttgttaatttccaattgttggactttccccagaaataattcaaaaatttttgttcaaattgttgccaattgccgaattcttcttctttgctatcgaaccataggcttgcttcatatttgagatggtttctgatagtttcttttgctgtttcgaaatttccgatgtgctgtattttctttttcaggctatttatgaacggcactgggtgtaatcttcttacatccccgccaaaccttatcttcacgtcatctgtgctatgtataaccatttctcttctttctccgacattctgttgcgtcctgttttcggtgacttgtttttctatttctgtgattcttttttccacttcttctctgtctacttgaatagcattttccaacttattttccaaattttctagttcctttttctggccattcgttaactcctttattttatcttgaattttcatttcttgttcttgcatgtgatctttaa

SEQ ID NO: 955 - DNA, 4017 bp, Diabrotica virgifera
ggagttgcatcagttgtaatagtttatctattcctgataattcttgctgttctgatgccatgattgtcgtgtctaaaatatcttcttggtctgaatgttctttttgttttttgttgtctttgctttggcttcttgtcacagacatttgttttcaagaagtactgtccccgccaaatatgaaattttactagtatgttaccaagacgactttttctcacccaaatattataaattgtcaataaatatatcaaatgtaaatatcgtaaaaataaaatattaaatcagttatgtaaaatttgtacctaaagagatctaaaattttatgttatcaaatgtaagtatctcactttttaccacaggcatataaattttcaaataccggctttactctttctatccttcaaatttgccactagaaatactttacaatgctttccacgttggacgacagttgatgtgatcttgattattgatatgagataatattcttatatgtcatttaatttaatcaatgtattaatactaatctaattaatttaccagatcacatatcaatatgttttcaatctcagggcgaattataaaattaattacttacttacgtggcttctaagtatttcttaatggttcctaatcgggataggaaagaaaagagtaaaataataacacatatgggttacaattgtaatcaaaatattgtttattttatttaaatggcaatcactgcttaatatttgctatatcttattattcttaaacataacatttacacatgggaatcttatttccttttggtttccaattgaaagtttttattaacatttaactattatgatttattagcaacaattctatttaagtttgatgaagcttttctgatattattgattatgtttcttcaattttaaatgtggtatttaatacgaaaaacccatacattcatgtccaaacaaatgagactgacctttttctggtgaactgagaatgtcttcacacaagacccgtttcctgctatccttggctgcaatcaaaacctcgtcctggcttccagtaatgttctcctttgaaactagctcgtatagctctcgttcctgcttctgtcgtgatgctgtgttctacctttttcgaaactgcaatcagctaccgggaactcttggctcaaggaggttcttttactctcaacctggcctacctctcgttccacgatagatactccacactcacggaactacaccggctttctcactctccgtacactaccgtctactactggacttcacttctcgacagctcaaaacattctgatctctatttgtcattcattcccctactttctaaatatcccttccagattcacaaatcaaacttccaccaccaactctcattcgcagtattcctcaaaaccaatttttaatctttctaaatatgcttaatggatttcaaagaaaatagttaattcccattctaaaattactttctactatttacaaatttaatgatctattatctacttccactaagtcttatttagcatcggctaatgatcgaaccttccgcgaacaacgataatgacctattatcgatttcacttgagtcttatttagcataggctaatgatcgaacctcccgcgaacaacgacaatggtacgcgccattcactttgttcattctaagcgcattgtcccgagtttcgtttaatcacttcttaaaattaaatataacaatttgttgtatacaggttgttctaaatttatatgcccgtggttgagaaaattgaaaatattttatattaaattgaattttgtttataattatcaaaatttaattttcatatcaaatagaaatataacaaatccccgccttgtattcgataaaatttatctgcatttttaaataaattttctcgaggcaaaaccaactccctgtatatttccttactttaatctacgtcttataccccttcttcttgtattactctaattagtcccacctgtagagtaattgtttccttattttcagtgtcctcatcctgtgttagagtgtcggctattatgttgtctttccctttttcccatatcaatcttctgtctttttcctcagatttttcacatacttttaccgtgtattctgcatcctcgttttcatatgcctcctcttcaaatgccactgtttcgatcatatctttttcgctttcatttgttagctttatttcttcttctcctgagctcgtctcttcttttgaggaatcccaggtttcctttgtttctgatactctcaaattttcttcttctgggctcaactcttcttttgaggagccacaggtttcattttcttttatctttttctgaccttttctcctttttcttctttgtccttgcttcgctgccaaattcatttccactgtttgttctttacctgattcgtccgtattttgtttctcatgttccttgtcctgttctttttctttttcttctgttagtttcatcgtattatttttaaaatctatcactacatgtttttctgccaattcgtcaactcctactatcatgtcatgtgacatgtttggcattattacacattgtagtgcatacatcttcttacccagtcgtaccattactcgtatgccttcatttatagttgccaatgtccgtttgtttgcgcccactaaatttaccctaggtattttgtaaattaaatttgttaagttaacttcttctattagttttctgttgaccaatgttatttcagatccagtgtctatcataattttaattggtttctcgttgataaatccatccacaaattttaaattaactccatttttcttttcgttgtttcttgccaatttaataaactccttggggttacaaaagattcctgtttgatttttggtttttagtgagcgccgtcgtgaaaagacgccggttgctcatcgttgtttatattttcgtcataatgtctctctccgtcatattcatctgtctgggtattatttacttctcttctattttctcttggtctgtcggatctgtttcggttttctcgatatccctgttcattttgtctaccattatttctgttttcttgatttgagcgtgtggtgtttctattctggtattctcgatttctgtcctcattccattgcctatttctttgttcataatttcctcttccgttgtctctattttcgttttcccttctgggattaaaatctcgtcttgtatagtccctcctattttgatttctatctctgtaatctgtgtttctcggggcctgtaatcttctcgcgaccttcttgattttctttctcttagacgtgattctcttatttgtaggaattggcataaactatctatgtctttgtagttttgcaatgtgatatggtcttccagcgtttcttcgaaatgtcttgcaatcagttcgactaattgttccgatgagtaattatattgtaaatgttttgcattattgtaaatttgcaaagcatatgtcctttctgatacacccatcctatcattgtatttcccattttgcaattccttgttaatttccaattgttggactttccccagaaataattcaaaaatttttgttcaaattgttgccaattgccgaattcttcttctttgctatcgaaccataggcttgcttcatatttgagatggtttctgatagtttcttttgctgtttcgaaatttccgatgtgctgtattttctttttcaggctatttatgaacggcactgggtgtaatcttcttacatccccgccaaaccttatcttcacgtcatctgtgctatgtataaccatttctcttctttctccgacattctgttgcgtcctgttttcggtgacttgtttttctatttctgtgattcttttttccacttcttctctgtctacttgaatagcattttccaacttattttccaaattttctagttcctttttctggccattcgttaactcctttattttatcttgaattttcatttcttgttcttgcatgtgatctttaa

SEQ ID NO: 956 - DNA, 4017 bp, Diabrotica virgifera
ggagttgcatcagttgtaatagtttatctattcctgataattcttgctgttctgatgccatgattgtcgtgtctaaaatatcttcttggtctgaatgttctttttgttttttgttgtctttgctttggcttcttgtcacagacatttgttttcaagaagtactgtccccgccaaatatgaaattttactagtatgttaccaagacgactttttctcacccaaatattataaattgtcaataaatatatcaaatgtaaatatcgtaaaaataaaatattaaatcagttatgtaaaatttgtacctaaagagatctaaaattttatgttatcaaatgtaagtatctcactttttaccacaggcatataaattttcaaataccggctttactctttctatccttcaaatttgccactagaaatactttacaatgctttccacgttggacgacagttgatgtgatcttgattattgatatgagataatattcttatatgtcatttaatttaatcaatgtattaatactaatctaattaatttaccagatcacatatcaatatgttttcaatctcagggctttttataaaattaattacttacttacgtggcttctaagtatttcttaatggttcctaatcgggataggaaagaaaagagtaaaataataacacatatgggttacaattgtaatcaaaatattgtttattttatttaaatggcaatcactgcttaatatttgctatatcttattattcttaaacataacatttacacatgggaatcttatttccttttggtttccaattgaaagtttttattaacatttaactattatgatttattagcaacaattctatttaagtttgatgaagcttttctgatattattgattatgtttcttcaattttaaatgtggtatttaatacgaaaaacccatacattcatgtccaaacaaatgagactgacctttttctggtgaactgagaatgtcttcacacaagacccgtttcctgctatccttggctgcaatcaaaacctcgtcctggcttccagtaatgttctcctttgaaactagctcgtatagctctcgttcctgcttctgtcgtgatgctgtgttctacctttttcgaaactgcaatcagctaccgggaactcttggctcaaggaggttcttttactctcaacctggcctacctctcgttccacgatagatactccacactcacggaactacaccggctttctcactctccgtacactaccgtctactactggacttcacttctcgacagctcaaaacattctgatctctatttgtcattcattcccctactttctaaatatcccttccagattcacaaatcaaacttccaccaccaactctcattcgcagtattcctcaaaaccaatttttaatctttctaaatatgcttaatggatttcaaagaaaatagttaattcccattctaaaattactttctactatttacaaatttaatgatctattatctacttccactaagtcttatttagcatcggctaatgatcgaaccttccgcgaacaacgataatgacctattatcgatttcacttgagtcttatttagcataggctaatgatcgaacctcccgcgaacaacgacaatggtacgcgccattcactttgttcattctaagcgcattgtcccgagtttcgtttaatcacttcttaaaattaaatataacaatttgttgtatacaggttgttctaaatttatatgcccgtggttgagaaaattgaaaatattttatattaaattgaattttgtttataattatcaaaatttaattttcatatcaaatagaaatataacaaatccccgccttgtattcgataaaatttatctgcatttttaaataaattttctcgaggcaaaaccaactccctgtatatttccttactttaatctacgtcttataccccttcttcttgtattactctaattagtcccacctgtagagtaattgtttccttattttcagtgtcctcatcctgtgttagagtgtcggctattatgttgtctttccctttttcccatatcaatcttctgtctttttcctcagatttttcacatacttttaccgtgtattctgcatcctcgttttcatatgcctcctcttcaaatgccactgtttcgatcatatctttttcgctttcatttgttagctttatttcttcttctcctgagctcgtctcttcttttgaggaatcccaggtttcctttgtttctgatactctcaaattttcttcttctgggctcaactcttcttttgaggagccacaggtttcattttcttttatctttttctgaccttttctcctttttcttctttgtccttgcttcgctgccaaattcatttccactgtttgttctttacctgattcgtccgtattttgtttctcatgttccttgtcctgttctttttctttttcttctgttagtttcatcgtattatttttaaaatctatcactacatgtttttctgccaattcgtcaactcctactatcatgtcatgtgacatgtttggcattattacacattgtagtgcatacatcttcttacccagtcgtaccattactcgtatgccttcatttatagttgccaatgtccgtttgtttgcgcccactaaatttaccctaggtattttgtaaattaaatttgttaagttaacttcttctattagttttctgttgaccaatgttatttcagatccagtgtctatcataattttaattggtttctcgttgataaatccatccacaaattttaaattaactccatttttcttttcgttgtttcttgccaatttaataaactccttggggttacaaaagattcctgtttgatttttggtttttagtgagcgccgtcgtgaaaagacgccggttgctcatcgttgtttatattttcgtcataatgtctctctccgtcatattcatctgtctgggtattatttacttctcttctattttctcttggtctgtcggatctgtttcggttttctcgatatccctgttcattttgtctaccattatttctgttttcttgatttgagcgtgtggtgtttctattctggtattctcgatttctgtcctcattccattgcctatttctttgttcataatttcctcttccgttgtctctattttcgttttcccttctgggattaaaatctcgtcttgtatagtccctcctattttgatttctatctctgtaatctgtgtttctcggggcctgtaatcttctcgcgaccttcttgattttctttctcttagacgtgattctcttatttgtaggaattggcataaactatctatgtctttgtagttttgcaatgtgatatggtcttccagcgtttcttcgaaatgtcttgcaatcagttcgactaattgttccgatgagtaattatattgtaaatgttttgcattattgtaaatttgcaaagcatatgtcctttctgatacacccatcctatcattgtatttcccattttgcaattccttgttaatttccaattgttggactttccccagaaataattcaaaaatttttgttcaaattgttgccaattgccgaattcttcttctttgctatcgaaccataggcttgcttcatatttgagatggtttctgatagtttcttttgctgtttcgaaatttccgatgtgctgtattttctttttcaggctatttatgaacggcactgggtgtaatcttcttacatccccgccaaaccttatcttcacgtcatctgtgctatgtataaccatttctcttctttctccgacattctgttgcgtcctgttttcggtgacttgtttttctatttctgtgattcttttttccacttcttctctgtctacttgaatagcattttccaacttattttccaaattttctagttcctttttctggccattcgttaactcctttattttatcttgaattttcatttcttgttcttgcatgtgatctttaa

SEQ ID NO: 957 - DNA, 3923 bp, Diabrotica virgifera
ggagttgcatcagttgtaatagtttatctattcctgataattcttgctgttctgatgccatgattgtcgtgtctaaaatatcttcttggtctgaatgttctttttgttttttgttgtctttgctttggcttcttgtcacagacatttgttttcaagaagtactgtccccgccaaatatgaaattttactagtatgttaccaagacgactttttctcacccaaatattataaattgtcaataaatatatcaaatgtaaatatcgtaaaaataaaatattaaatcagttatgtaaaatttgtacctaaagagatctaaaattttatgttatcaaatgtaagtatctcactttttaccacaggcatataaattttcaaataccggctttactctttctatccttcaaatttgccactagaaatactttacaatgctttccacgttggacgacagttgatgtgatcttgattattgatatgagataatattcttatatgtcatttaatttaatcaatgtattaatactaatctaattaatttaccagatcacatatcaatatgttttcaatctcagggcgaattataaaattaattacttacttacgtggcttctaagtatttcttaatggttcctaatcgggataggaaagaaaagagtaaaataataacacatatgggttacaattgtaatcaaaatattgtttattttatttaaatggcaatcactgcttaatatttgctatatcttattattcttaaacataacatttacacatgggaatcttatttccttttggtttccaattgaaagtttttattaacatttaactattatgatttattagcaacaattctatttaagtttgatgaagcttttctgatattattgattatgtttcttcaattttaaatgtggtatttaatacgaaaaacccatacattcatgtccaaacaaatgagactgacctttttctggtgaactgagaatgtcttcacacaagacccgtttcctgctatccttggctgcaatcaaaacctcgtcctggcttccagtaatgttctcctttgaaactagctcgtatagctctcgttcctgcttctgtcgtgatgctgtgttctacctttttcgaaactgcaatcagctaccgggaactcttggctcaaggaggttcttttactctcaacctggcctacctctcgttccacgatagatactccacactcacggaactacaccggctttctcactctccgtacactaccgtctactactggacttcacttctcgacagctcaaaacattctgatctctatttgtcattcattcccctactttctaaatatcccttccagattcacaaatcaaacttccaccaccaactctcattcgcagtattcctcaaaaccaatttttaatctttctaaatatgcttaatggatttcaaagaaaatagttaattcccattctaaaattactttctactatttacaaatttaatgacctattctctatttccacttagtcttatttagcatcggctaatgatcgatccttccgcgaacaacgataatgacctattatcgatttcacttgagtcttatttaatcacttcttaaaattaaatataacaatttgttgtatacaggttgttctaaatttatatgcccgtggttgagaaaattgaaaatattttatattaaattgaattttgtttataattatcaaaatttaattttcatatcaaatagaaatataacaaatccccgccttgtattcgataaaatttatctgcatttttaaataaattttctcgaggcaaaaccaactccctgtatatttccttactttaatctacgtcttataccccttcttcttgtattactctaattagtcccacctgtagagtaattgtttccttattttcagtgtcctcatcctgtgttagagtgtcggctattatgttgtctttccctttttcccatatcaatcttctgtctttttcctcagatttttcacatacttttaccgtgtattctgcatcctcgttttcatatgcctcctcttcaaatgccactgtttcgatcatatctttttcgctttcatttgttagctttatttcttcttctcctgagctcatctcttcttttgaggaatcccagttttcttttgcttttgatactctcaatttttcttcttctgggctcaactcttcttttgaggagccacaggtttcattttcttttgtctttttctgactttttctcccttttcttctttgtccttgcttcgttgccaaattcatttccactgtttgttctttacctgattcgtccgtattttgtttctcctgttccttgtcctgttcttcttctttttcttctgttagattcatcgtattatttttaaaatctatcactacatgtttttctgccaattcgtcaactcctactatcatgtcatgtgacatgtttggcattattacacattgtagtgcatacatcttcttacccagtcgtaccattactcgtatgccttcatttatagttgccaatgtccgtttgtttgcgcccactaaatttaccctaggtattttgtaaattaaatttgttaagttaacttcttctattagttttctgttgaccaatgttatttcagatccagtgtctatcataattttaattggtttctcgttgataaatccatccacaaattttaaattaactccatttttcttttcgttgtttcttgccaatttaataaactccttggggttacaaaagattcctgtttgatttttggtttttagtgagcgccgtcgtgaaaagacgccggttgctcatcgttgtttatattttcgtcataatgtctctctccgtcatattcatctgtctgggtattatttacttctcttctattttctcttggtctgtcggatctgtttcggttttctcgatatccctgttcattttgtctaccattatttctgttttcttgatttgagcgtgtggtgtttctattctggtattctcgatttctgtcctcattccattgcctatttctttgttcataatttcctcttccgttgtctctattttcgttttcccttctgggattaaaatctcgtcttgtatagtccctcctattttgatttctatctctgtaatctgtgtttctcggggcctgtaatcttctcgcgaccttcttgattttctttctcttagacgtgattctcttatttgtaggaattggcataaactatctatgtctttgtagttttgcaatgtgatatggtcttccagcgtttcttcgaaatgtcttgcaatcagttcgactaattgttccgatgagtaattatattgtaaatgttttgcattattgtaaatttgcaaagcatatgtcctttctgatacacccatcctatcattgtatttcccattttgcaattccttgttaatttccaattgttggactttccccagaaataattcaaaaatttttgttcaaattgttgccaattgccgaattcttcttctttgctatcgaaccataggcttgcttcatatttgagatggtttctgatagtttcttttgctgtttcgaaatttccgatgtgctgtattttctttttcaggctatttatgaacggcactgggtgtaatcttcttacatccccgccaaaccttatcttcacgtcatctgtgctatgtataaccatttctcttctttctccgacattctgttgcgtcctgttttcggtgacttgtttttctatttctgtgattcttttttccacttcttctctgtctacttgaatagcattttccaacttattttccaaattttctagttcctttttctggccattcgttaactcctttattttatcttgaattttcatttcttgttcttgcatgtgatctttaa

SEQ ID NO: 958 - DNA, 3923 bp, Diabrotica virgifera
ggagttgcatcagttgtaatagtttatctattcctgataattcttgctgttctgatgccatgattgtcgtgtctaaaatatcttcttggtctgaatgttctttttgttttttgttgtctttgctttggcttcttgtcacagacatttgttttcaagaagtactgtccccgccaaatatgaaattttactagtatgttaccaagacgactttttctcacccaaatattataaattgtcaataaatatatcaaatgtaaatatcgtaaaaataaaatattaaatcagttatgtaaaatttgtacctaaagagatctaaaattttatgttatcaaatgtaagtatctcactttttaccacaggcatataaattttcaaataccggctttactctttctatccttcaaatttgccactagaaatactttacaatgctttccacgttggacgacagttgatgtgatcttgattattgatatgagataatattcttatatgtcatttaatttaatcaatgtattaatactaatctaattaatttaccagatcacatatcaatatgttttcaatctcagggctttttataaaattaattacttacttacgtggcttctaagtatttcttaatggttcctaatcgggataggaaagaaaagagtaaaataataacacatatgggttacaattgtaatcaaaatattgtttattttatttaaatggcaatcactgcttaatatttgctatatcttattattcttaaacataacatttacacatgggaatcttatttccttttggtttccaattgaaagtttttattaacatttaactattatgatttattagcaacaattctatttaagtttgatgaagcttttctgatattattgattatgtttcttcaattttaaatgtggtatttaatacgaaaaacccatacattcatgtccaaacaaatgagactgacctttttctggtgaactgagaatgtcttcacacaagacccgtttcctgctatccttggctgcaatcaaaacctcgtcctggcttccagtaatgttctcctttgaaactagctcgtatagctctcgttcctgcttctgtcgtgatgctgtgttctacctttttcgaaactgcaatcagctaccgggaactcttggctcaaggaggttcttttactctcaacctggcctacctctcgttccacgatagatactccacactcacggaactacaccggctttctcactctccgtacactaccgtctactactggacttcacttctcgacagctcaaaacattctgatctctatttgtcattcattcccctactttctaaatatcccttccagattcacaaatcaaacttccaccaccaactctcattcgcagtattcctcaaaaccaatttttaatctttctaaatatgcttaatggatttcaaagaaaatagttaattcccattctaaaattactttctactatttacaaatttaatgacctattctctatttccacttagtcttatttagcatcggctaatgatcgatccttccgcgaacaacgataatgacctattatcgatttcacttgagtcttatttaatcacttcttaaaattaaatataacaatttgttgtatacaggttgttctaaatttatatgcccgtggttgagaaaattgaaaatattttatattaaattgaattttgtttataattatcaaaatttaattttcatatcaaatagaaatataacaaatccccgccttgtattcgataaaatttatctgcatttttaaataaattttctcgaggcaaaaccaactccctgtatatttccttactttaatctacgtcttataccccttcttcttgtattactctaattagtcccacctgtagagtaattgtttccttattttcagtgtcctcatcctgtgttagagtgtcggctattatgttgtctttccctttttcccatatcaatcttctgtctttttcctcagatttttcacatacttttaccgtgtattctgcatcctcgttttcatatgcctcctcttcaaatgccactgtttcgatcatatctttttcgctttcatttgttagctttatttcttcttctcctgagctcatctcttcttttgaggaatcccagttttcttttgcttttgatactctcaatttttcttcttctgggctcaactcttcttttgaggagccacaggtttcattttcttttgtctttttctgactttttctcccttttcttctttgtccttgcttcgttgccaaattcatttccactgtttgttctttacctgattcgtccgtattttgtttctcctgttccttgtcctgttcttcttctttttcttctgttagattcatcgtattatttttaaaatctatcactacatgtttttctgccaattcgtcaactcctactatcatgtcatgtgacatgtttggcattattacacattgtagtgcatacatcttcttacccagtcgtaccattactcgtatgccttcatttatagttgccaatgtccgtttgtttgcgcccactaaatttaccctaggtattttgtaaattaaatttgttaagttaacttcttctattagttttctgttgaccaatgttatttcagatccagtgtctatcataattttaattggtttctcgttgataaatccatccacaaattttaaattaactccatttttcttttcgttgtttcttgccaatttaataaactccttggggttacaaaagattcctgtttgatttttggtttttagtgagcgccgtcgtgaaaagacgccggttgctcatcgttgtttatattttcgtcataatgtctctctccgtcatattcatctgtctgggtattatttacttctcttctattttctcttggtctgtcggatctgtttcggttttctcgatatccctgttcattttgtctaccattatttctgttttcttgatttgagcgtgtggtgtttctattctggtattctcgatttctgtcctcattccattgcctatttctttgttcataatttcctcttccgttgtctctattttcgttttcccttctgggattaaaatctcgtcttgtatagtccctcctattttgatttctatctctgtaatctgtgtttctcggggcctgtaatcttctcgcgaccttcttgattttctttctcttagacgtgattctcttatttgtaggaattggcataaactatctatgtctttgtagttttgcaatgtgatatggtcttccagcgtttcttcgaaatgtcttgcaatcagttcgactaattgttccgatgagtaattatattgtaaatgttttgcattattgtaaatttgcaaagcatatgtcctttctgatacacccatcctatcattgtatttcccattttgcaattccttgttaatttccaattgttggactttccccagaaataattcaaaaatttttgttcaaattgttgccaattgccgaattcttcttctttgctatcgaaccataggcttgcttcatatttgagatggtttctgatagtttcttttgctgtttcgaaatttccgatgtgctgtattttctttttcaggctatttatgaacggcactgggtgtaatcttcttacatccccgccaaaccttatcttcacgtcatctgtgctatgtataaccatttctcttctttctccgacattctgttgcgtcctgttttcggtgacttgtttttctatttctgtgattcttttttccacttcttctctgtctacttgaatagcattttccaacttattttccaaattttctagttcctttttctggccattcgttaactcctttattttatcttgaattttcatttcttgttcttgcatgtgatctttaa

SEQ ID NO: 959 - DNA, 3923 bp, Diabrotica virgifera
ggagttgcatcagttgtaatagtttatctattcctgataattcttgctgttctgatgccatgattgtcgtgtctaaaatatcttcttggtctgaatgttctttttgttttttgttgtctttgctttggcttcttgtcacagacatttgttttcaagaagtactgtccccgccaaatatgaaattttactagtatgttaccaagacgactttttctcacccaaatattataaattgtcaataaatatatcaaatgtaaatatcgtaaaaataaaatattaaatcagttatgtaaaatttgtacctaaagagatctaaaattttatgttatcaaatgtaagtatctcactttttaccacaggcatataaattttcaaataccggctttactctttctatccttcaaatttgccactagaaatactttacaatgctttccacgttggacgacagttgatgtgatcttgattattgatatgagataatattcttatatgtcatttaatttaatcaatgtattaatactaatctaattaatttaccagatcacatatcaatatgttttcaatctcagggcgaattataaaattaattacttacttacgtggcttctaagtatttcttaatggttcctaatcgggataggaaagaaaagagtaaaataataacacatatgggttacaattgtaatcaaaatattgtttattttatttaaatggcaatcactgcttaatatttgctatatcttattattcttaaacataacatttacacatgggaatcttatttccttttggtttccaattgaaagtttttattaacatttaactattatgatttattagcaacaattctatttaagtttgatgaagcttttctgatattattgattatgtttcttcaattttaaatgtggtatttaatacgaaaaacccatacattcatgtccaaacaaatgagactgacctttttctggtgaactgagaatgtcttcacacaagacccgtttcctgctatccttggctgcaatcaaaacctcgtcctggcttccagtaatgttctcctttgaaactagctcgtatagctctcgttcctgcttctgtcgtgatgctgtgttctacctttttcgaaactgcaatcagctaccgggaactcttggctcaaggaggttcttttactctcaacctggcctacctctcgttccacgatagatactccacactcacggaactacaccggctttctcactctccgtacactaccgtctactactggacttcacttctcgacagctcaaaacattctgatctctatttgtcattcattcccctactttctaaatatcccttccagattcacaaatcaaacttccaccaccaactctcattcgcagtattcctcaaaaccaatttttaatctttctaaatatgcttaatggatttcaaagaaaatagttaattcccattctaaaattactttctactatttacaaatttaatgacctattctctatttccacttagtcttatttagcatcggctaatgatcgatccttccgcgaacaacgataatgacctattatcgatttcacttgagtcttatttaatcacttcttaaaattaaatataacaatttgttgtatacaggttgttctaaatttatatgcccgtggttgagaaaattgaaaatattttatattaaattgaattttgtttataattatcaaaatttaattttcatatcaaatagaaatataacaaatccccgccttgtattcgataaaatttatctgcatttttaaataaattttctcgaggcaaaaccaactccctgtatatttccttactttaatctacgtcttataccccttcttcttgtattactctaattagtcccacctgtagagtaattgtttccttattttcagtgtcctcatcctgtgttagagtgtcggctattatgttgtctttccctttttcccatatcaatcttctgtctttttcctcagatttttcacatacttttaccgtgtattctgcatcctcgttttcatatgcctcctcttcaaatgccactgtttcgatcatatctttttcgctttcatttgttagctttatttcttcttctcctgagctcgtctcttcttttgaggaatcccaggtttcctttgtttctgatactctcaaattttcttcttctgggctcaactcttcttttgaggagccacaggtttcattttcttttatctttttctgaccttttctcctttttcttctttgtccttgcttcgctgccaaattcatttccactgtttgttctttacctgattcgtccgtattttgtttctcatgttccttgtcctgttctttttctttttcttctgttagtttcatcgtattatttttaaaatctatcactacatgtttttctgccaattcgtcaactcctactatcatgtcatgtgacatgtttggcattattacacattgtagtgcatacatcttcttacccagtcgtaccattactcgtatgccttcatttatagttgccaatgtccgtttgtttgcgcccactaaatttaccctaggtattttgtaaattaaatttgttaagttaacttcttctattagttttctgttgaccaatgttatttcagatccagtgtctatcataattttaattggtttctcgttgataaatccatccacaaattttaaattaactccatttttcttttcgttgtttcttgccaatttaataaactccttggggttacaaaagattcctgtttgatttttggtttttagtgagcgccgtcgtgaaaagacgccggttgctcatcgttgtttatattttcgtcataatgtctctctccgtcatattcatctgtctgggtattatttacttctcttctattttctcttggtctgtcggatctgtttcggttttctcgatatccctgttcattttgtctaccattatttctgttttcttgatttgagcgtgtggtgtttctattctggtattctcgatttctgtcctcattccattgcctatttctttgttcataatttcctcttccgttgtctctattttcgttttcccttctgggattaaaatctcgtcttgtatagtccctcctattttgatttctatctctgtaatctgtgtttctcggggcctgtaatcttctcgcgaccttcttgattttctttctcttagacgtgattctcttatttgtaggaattggcataaactatctatgtctttgtagttttgcaatgtgatatggtcttccagcgtttcttcgaaatgtcttgcaatcagttcgactaattgttccgatgagtaattatattgtaaatgttttgcattattgtaaatttgcaaagcatatgtcctttctgatacacccatcctatcattgtatttcccattttgcaattccttgttaatttccaattgttggactttccccagaaataattcaaaaatttttgttcaaattgttgccaattgccgaattcttcttctttgctatcgaaccataggcttgcttcatatttgagatggtttctgatagtttcttttgctgtttcgaaatttccgatgtgctgtattttctttttcaggctatttatgaacggcactgggtgtaatcttcttacatccccgccaaaccttatcttcacgtcatctgtgctatgtataaccatttctcttctttctccgacattctgttgcgtcctgttttcggtgacttgtttttctatttctgtgattcttttttccacttcttctctgtctacttgaatagcattttccaacttattttccaaattttctagttcctttttctggccattcgttaactcctttattttatcttgaattttcatttcttgttcttgcatgtgatctttaa

SEQ ID NO: 960 - DNA, 6701 bp, Diabrotica virgifera
  SmartBlast Evalue=6E-79; Info=Pol polyprotein (Fragment) n=1 Tax=Drosophila buzzatii RepID=A1BPH1_DROBU
ggagttgcatcagttgtaatagtttatctattcctgataattcttgctgttctgatgccatgattgtcgtgtctaaaatatcttcttggtctgaatgttctttttgttttttgttgtctttgctttggcttcttgtcacagacatttgttttcaagaagtactgtccccgccaaatatgaaattttactagtatgttaccaagacgactttttctcacccaaatattataaattgtcaataaatatatcaaatgtaaatatcgtaaaaataaaatattaaatcagttatgtaaaatttgtacctaaagagatctaaaattttatgttatcaaatgtaagtatctcactttttaccacaggcatataaattttcaaataccggctttactctttctatccttcaaatttgccactagaaatactttacaatgctttccacgttggacgacagttgatgtgatcttgattattgatatgagataatattcttatatgtcatttaatttaatcaatgtattaatactaatctaattaatttaccagatcacatatcaatatgttttcaatctcagggcgaattataaaattaattacttacttacgtggcttctaagtatttcttaatggttcctaatcgggataggaaagaaaagagtaaaataataacacatatgggttacaattgtaatcaaaatattgtttattttatttaaatggcaatcactgcttaatatttgctatatcttattattcttaaacataacatttacacatgggaatcttatttccttttggtttccaattgaaagtttttattaacatttaactattatgatttattagcaacaattctatttaagtttgatgaagcttttctgatattattgattatgtttcttcaattttaaatgtggtatttaatacgaaaaacccatacattcatgtccaaacaaatgagactgacctttttctggtgaactgagaatgtcttcacacaagacccgtttcctgctatccttggctgcaatcaaaacctcgtcctggcttccagtaatgttctcctttgaaactagctcgtatagctctcgttcctgcttctgtcgtgatgctgtgttctacctttttcgaaactgcaatcagctaccgggaactcttggctcaaggaggttcttttactctcaacctggcctacctctcgttccacgatagatactccacactcacggaactacaccggctttctcactctccgtacactaccgtctactactggacttcacttctcgacagctcaaaacattctgatctctatttgtcattcattcccctactttctaaatatcccttccagattcacaaatcaaacttccaccaccaactctcattcgcagtattcctcaaaaccaatttttaatctttctaaatatgcttaatggatttcaaagaaaatagttaattcccattctaaaattactttctactatttacaaatttaatgatctattatctacttccactaagtcttatttagcatcggctaatgatcgaaccttccgcgaacaacgataatgacctattatcgatttcacttgagtcttatttagcataggctaatgatcgaacctcccgcgaacaacgacaatggtacgcgccattcactttgttcattctaagcgcattgtcccgagtttcgtttaatcacttcttaaaattaaatataacaatttgttgtatacaggttgttctaaatttatatgcccgtggttgagaaaattgaaaatattttatattaaattgaattttgtttataattatcaaaatttaattttcatatcaaatagaaatataacaaatccccgccttgtattcgataaaatttatctgcatttttaaataaattttctcgaggcaaaaccaactccctgtatatttccttactttaatctacgtcttatatcctaacttactatctacttcatgtaattctgtcttttattcgtgatatttgtatacatcgtgaatattataaattcctcggatcttttccgagttcctgtgcctcaactcataactatttatcccattttcattattcacgatgtacgggccttcgaaaacaggcatcaactttgcgcaaatgcccccaggaagatttgatactcgtaatgccctcacgagtactttttcacccttttggaaagtcactggtcttctttttctattttgttcctgtctttggatatatttttcgttgcttcgccgtaatcttctctgtacggtttcaatcacctgttgatattcttttggctcttggtcttcccatggccttatcggcagtacacccttcatgatgtattctggggtctcttttgttactgtgctcggaattgtatttagatacctttctatttccgccattttcctgtcccagtggcgatgttgaccatctgttgcaatgcgaagaaatttcgtcacttcctgtatgaatcgttccgaaggattactctgtggatgcctgatgctgacaaaatttgtctctattcctcgttctcgaagttgtcccttgaaacgatcatttcggaaatacgttgcattgtccagtagaatcttttttggtgttcctactatggctataaaattgtcgatttttcttaatatctcctccccctttgtggtgcggcaactatataattttacgtattttgaaaacacatccaccattaccagaatatgtttgttccttttagtggtcataattagatcgcttaacatatctattgctacaatgtctagtttgtttcgggcttcaatatttttggcaacattttcgtttttgaaattccgactcttatatttttgacatacatcgcacttctgggtaatttcctttgcaatgcggtaatcctgtcggctgatgtaattttccctaaaaacgagccaaacttttctgctaccgatatgcccattgtcctcatgtaatttctttattatcttttcggccaatgtctgtgtcactaaatatagttcctttccgtctattctcttaaaatatatgtcattttctacttccgctcttcttttctctctttcctctaggtcttcttggtttgtccttatctcatttaacgaatatatcccttcttcttgtattaatctatttagtcccacctgtagagtaattgtttccttttttcccgtgtcctcatcccgtgttagagcgtcggctattatgttgtcttttccttttatatatcggaactcaaaatcatactcctgtaataatagaatgcctctatgtattctattatttactaatctattcttcatgatatgtactaaagctgcatggtttgtttcgattgtgaattttgctcccaataagtaaaacctcaatttgtttacgcaatatagtacactggcaaactccaattctgtaacactatattttctctcatgtgtttttgtcactcgagatataaaacatatcggcacttcttggtcgttttgtatttgagacagaactcctgcaaatttttgtatggacgcatcagttcggagtataaaaggtaaattgtaaatggggtggtatattttcgttccttttgcgaattctcgttttaatgtttcgaaagcttcctcctgttcttctttccaattccattttattccttttttaagcaactttatcagagggatttccttttggctcaaatcgggaatcagttttttaaaataattaatcgtgccaagaaaacctctcaatgttttcaaattcgttggtcttgggtattcatctatgagcttgactctgtcttcggataatcttactgttttggtgtccaattgaaaacccaaataaatgacttctttttgaaaaaattgacatttttcaatgtttaatttcaatcccgctgtgtccaattcttccagaattatttctatgtgtttcagatgactctgagtatcttgtgaaaaaattaataaatcatcgatataatgaactatgaaatcttcgtggcgattcaaaatggtatgtagagctcggacgagtgcagcacaagcactctgcaatccaaacggcactaccttaaaccggtagacaataccatcaatagaaaaagcggtgtagtttctacacttttcagctaacggtatcaaccaaaaactgtgttttaagtcaattttcgaaaatatgtgtgacccggtgattcttccaaaaatggcctcgatgtttagaggtgattcatattgtgatacagtgtgctggttgatattcctggcatctaaacataatctcaattctccattgcttttctttactatcacaatcgggttaacatacggtgaatcacatctttcgatgatttgatcttccaacattttatttatttcttctttcacctcttgtcgatacttgtatggaatcgggtaagtctttgatcgaaaatttcccaagtttttcacctcaaatgaatgttcgtactttttagccactctgttttcctcattgatcaaattttcgtagtttcttaacatcaaccgcaattctttttctttcccttctccacatatcaattttctgtctttttttctcagattcttcacacatgtttaccgtgcattctgcatcctcgtttgcatatacctcctcttcaaataccactgtttcaatcatattcttttcactttcattttttagctttatttcttcttctcctgagctcgtctcttcttttgaggaatcccaggtttcctttgtttctgatactctcaaattttcttcttctgggctcaactcttcttttgaggagccacaggtttcattttcttttatctttttctgaccttttctcctttttcttctttgtccttgcttcgctgccaaattcatttccactgtttgttctttacctgattcgtccgtattttgtttctcatgttccttgtcctgttctttttctttttcttctgttagtttcatcgtattatttttaaaatctatcactacatgtttttctgccaattcgtcaactcctactatcatgtcatgtgacatgtttggcattattacacattgtagtgcatacatcttcttacccagtcgtaccattactcgtatgccttcatttatagttgccaatgtccgtttgtttgcgcccactaaatttaccctaggtattttgtaaattaaatttgttaagttaacttcttctattagttttctgttgaccaatgttatttcagatccagtgtctatcataattttaattggtttctcgttgataaatccatccacaaattttaaattaactccatttttcttttcgttgtttcttgccaatttaataaactccttggggttacaaaagattcctgtttgatttttggtttttagtgagcgccgtcgtgaaaagacgccggttgctcatcgttgtttatattttcgtcataatgtctctctccgtcatattcatctgtctgggtattatttacttctcttctattttctcttggtctgtcggatctgtttcggttttctcgatatccctgttcattttgtctaccattatttctgttttcttgatttgagcgtgtggtgtttctattctggtattctcgatttctgtcctcattccattgcctatttctttgttcataatttcctcttccgttgtctctattttcgttttcccttctgggattaaaatctcgtcttgtatagtccctcctattttgatttctatctctgtaatctgtgtttctcggggcctgtaatcttctcgcgaccttcttgattttctttctcttagacgtgattctcttatttgtaggaattggcataaactatctatgtctttgtagttttgcaatgtgatatggtcttccagcgtttcttcgaaatgtcttgcaatcagttcgactaattgttccgatgagtaattatattgtaaatgttttgcattattgtaaatttgcaaagcatatgtcctttctgatacacccatcctatcattgtatttcccattttgcaattccttgttaatttccaattgttggactttccccagaaataattcaaaaatttttgttcaaattgttgccaattgccgaattcttcttctttgctatcgaaccataggcttgcttcatatttgagatggtttctgatagtttcttttgctgtttcgaaatttccgatgtgctgtattttctttttcaggctatttatgaacggcactgggtgtaatcttcttacatccccgccaaaccttatcttcacgtcatctgtgctatgtataaccatttctcttctttctccgacattctgttgcgtattgatttccgcaatctttctttccacttcttctatgtctgcttgaatagcgttttgcaacttgttttccaaactttccatttcttttttctggcaattcgttatctccttcattttgattttgatttctttaatctctatctcttgttctcccatctcgttcttgatcattgtcaaacatccttttacttccttttcatacttttctatgcgttcctccattttcttgttgttctcttctattgcttgtttcatttttttgttgtgtttgatccattttttgatccaatttttgttgtgtttcctccattttttgttgtgtttcatccattttttgatccactttatctattttctttgatgtttc

SEQ ID NO: 961 - DNA, 3923 bp, Diabrotica virgifera
ggagttgcatcagttgtaatagtttatctattcctgataattcttgctgttctgatgccatgattgtcgtgtctaaaatatcttcttggtctgaatgttctttttgttttttgttgtctttgctttggcttcttgtcacagacatttgttttcaagaagtactgtccccgccaaatatgaaattttactagtatgttaccaagacgactttttctcacccaaatattataaattgtcaataaatatatcaaatgtaaatatcgtaaaaataaaatattaaatcagttatgtaaaatttgtacctaaagagatctaaaattttatgttatcaaatgtaagtatctcactttttaccacaggcatataaattttcaaataccggctttactctttctatccttcaaatttgccactagaaatactttacaatgctttccacgttggacgacagttgatgtgatcttgattattgatatgagataatattcttatatgtcatttaatttaatcaatgtattaatactaatctaattaatttaccagatcacatatcaatatgttttcaatctcagggctttttataaaattaattacttacttacgtggcttctaagtatttcttaatggttcctaatcgggataggaaagaaaagagtaaaataataacacatatgggttacaattgtaatcaaaatattgtttattttatttaaatggcaatcactgcttaatatttgctatatcttattattcttaaacataacatttacacatgggaatcttatttccttttggtttccaattgaaagtttttattaacatttaactattatgatttattagcaacaattctatttaagtttgatgaagcttttctgatattattgattatgtttcttcaattttaaatgtggtatttaatacgaaaaacccatacattcatgtccaaacaaatgagactgacctttttctggtgaactgagaatgtcttcacacaagacccgtttcctgctatccttggctgcaatcaaaacctcgtcctggcttccagtaatgttctcctttgaaactagctcgtatagctctcgttcctgcttctgtcgtgatgctgtgttctacctttttcgaaactgcaatcagctaccgggaactcttggctcaaggaggttcttttactctcaacctggcctacctctcgttccacgatagatactccacactcacggaactacaccggctttctcactctccgtacactaccgtctactactggacttcacttctcgacagctcaaaacattctgatctctatttgtcattcattcccctactttctaaatatcccttccagattcacaaatcaaacttccaccaccaactctcattcgcagtattcctcaaaaccaatttttaatctttctaaatatgcttaatggatttcaaagaaaatagttaattcccattctaaaattactttctactatttacaaatttaatgacctattctctatttccacttagtcttatttagcatcggctaatgatcgatccttccgcgaacaacgataatgacctattatcgatttcacttgagtcttatttaatcacttcttaaaattaaatataacaatttgttgtatacaggttgttctaaatttatatgcccgtggttgagaaaattgaaaatattttatattaaattgaattttgtttataattatcaaaatttaattttcatatcaaatagaaatataacaaatccccgccttgtattcgataaaatttatctgcatttttaaataaattttctcgaggcaaaaccaactccctgtatatttccttactttaatctacgtcttataccccttcttcttgtattactctaattagtcccacctgtagagtaattgtttccttattttcagtgtcctcatcctgtgttagagtgtcggctattatgttgtctttccctttttcccatatcaatcttctgtctttttcctcagatttttcacatacttttaccgtgtattctgcatcctcgttttcatatgcctcctcttcaaatgccactgtttcgatcatatctttttcgctttcatttgttagctttatttcttcttctcctgagctcgtctcttcttttgaggaatcccaggtttcctttgtttctgatactctcaaattttcttcttctgggctcaactcttcttttgaggagccacaggtttcattttcttttatctttttctgaccttttctcctttttcttctttgtccttgcttcgctgccaaattcatttccactgtttgttctttacctgattcgtccgtattttgtttctcatgttccttgtcctgttctttttctttttcttctgttagtttcatcgtattatttttaaaatctatcactacatgtttttctgccaattcgtcaactcctactatcatgtcatgtgacatgtttggcattattacacattgtagtgcatacatcttcttacccagtcgtaccattactcgtatgccttcatttatagttgccaatgtccgtttgtttgcgcccactaaatttaccctaggtattttgtaaattaaatttgttaagttaacttcttctattagttttctgttgaccaatgttatttcagatccagtgtctatcataattttaattggtttctcgttgataaatccatccacaaattttaaattaactccatttttcttttcgttgtttcttgccaatttaataaactccttggggttacaaaagattcctgtttgatttttggtttttagtgagcgccgtcgtgaaaagacgccggttgctcatcgttgtttatattttcgtcataatgtctctctccgtcatattcatctgtctgggtattatttacttctcttctattttctcttggtctgtcggatctgtttcggttttctcgatatccctgttcattttgtctaccattatttctgttttcttgatttgagcgtgtggtgtttctattctggtattctcgatttctgtcctcattccattgcctatttctttgttcataatttcctcttccgttgtctctattttcgttttcccttctgggattaaaatctcgtcttgtatagtccctcctattttgatttctatctctgtaatctgtgtttctcggggcctgtaatcttctcgcgaccttcttgattttctttctcttagacgtgattctcttatttgtaggaattggcataaactatctatgtctttgtagttttgcaatgtgatatggtcttccagcgtttcttcgaaatgtcttgcaatcagttcgactaattgttccgatgagtaattatattgtaaatgttttgcattattgtaaatttgcaaagcatatgtcctttctgatacacccatcctatcattgtatttcccattttgcaattccttgttaatttccaattgttggactttccccagaaataattcaaaaatttttgttcaaattgttgccaattgccgaattcttcttctttgctatcgaaccataggcttgcttcatatttgagatggtttctgatagtttcttttgctgtttcgaaatttccgatgtgctgtattttctttttcaggctatttatgaacggcactgggtgtaatcttcttacatccccgccaaaccttatcttcacgtcatctgtgctatgtataaccatttctcttctttctccgacattctgttgcgtcctgttttcggtgacttgtttttctatttctgtgattcttttttccacttcttctctgtctacttgaatagcattttccaacttattttccaaattttctagttcctttttctggccattcgttaactcctttattttatcttgaattttcatttcttgttcttgcatgtgatctttaa

SEQ ID NO: 962 - DNA, 2906 bp, Diabrotica virgifera
tcactttgtcatccattcccctactttctaaatatcccttccagattcacaaatcaatcttccaccaccaactctcattcgtaatattcctcaaaaccaatttttaatctttctaaatatgcttaatggatttcaaaagaaaatatttaattcccattctaaaatactttctaactatttacaaattttaatgacctattctctctttcaaatgagtcttatttagcataggctaatgatcgaaaccttccgcgaaaaacgataatgaactatcatctatttcactgagttttatttagcataggctaatgatcgaccttccgagaagaacgataatggtacgcgtcattcactttgtttatctaagcacattgttccgagtttcgtacgcttattctaatcacttcttaaaattacataaacaatttgttgtatacaggttgttctaaatttatatgcccgtggttgagaaaattgaaaatattttatattaaattgaattttgtttataattatcaaaatttaattttcatatcaaatagaaatataacaaatccccgccttgtattcgataaaatttatctgcatttttaaataaattttctcgaggcaaaaccaactccctgtatatttccttactttaatctacgtcttataccccttcttcttgtattactctaattagtcccacctgtagagtaattgtttccttattttcagtgtcctcatcctgtgttagagtgtcggctattatgttgtctttccctttttcccatatcaatcttctgtctttttcctcagatttttcacatacttttaccgtgtattctgcatcctcgttttcatatgcctcctcttcaaatgccactgtttcgatcatatctttttcgctttcatttgttagctttatttcttcttctcctgagctcatctcttcttttgaggaatcccagttttcttttgcttttgatactctcaatttttcttcttctgggctcaactcttcttttgaggagccacaggtttcattttcttttgtctttttctgactttttctcccttttcttctttgtccttgcttcgttgccaaattcatttccactgtttgttctttacctgattcgtccgtattttgtttctcctgttccttgtcctgttcttcttctttttcttctgttagattcatcgtattatttttaaaatctatcactacatgtttttctgccaattcgtcaactcctactatcatgtcatgtgacatgtttggcattattacacattgtagtgcatacatcttcttacccagtcgtaccattactcgtatgccttcatttatagttgccaatgtccgtttgtttgcgcccactaaatttaccctaggtattttgtaaattaaatttgttaagttaacttcttctattagttttctgttgaccaatgttatttcagatccagtgtctatcataattttaattggtttctcgttgataaatccatccacaaattttaaattaactccatttttcttttcgttgtttcttgccaatttaataaactccttggggttacaaaagattcctgtttgatttttggtttttagtgagcgccgtcgtgaaaagacgccggttgctcatcgttgtttatattttcgtcataatgtctctctccgtcatattcatctgtctgggtattatttacttctcttctattttctcttggtctgtcggatctgtttcggttttctcgatatccctgttcattttgtctaccattatttctgttttcttgatttgagcgtgtggtgtttctattctggtattctcgatttctgtcctcattccattgcctatttctttgttcataatttcctcttccgttgtctctattttcgttttcccttctgggattaaaatctcgtcttgtatagtccctcctattttgatttctatctctgtaatctgtgtttctcggggcctgtaatcttctcgcgaccttcttgattttctttctcttagacgtgattctcttatttgtaggaattggcataaactatctatgtctttgtagttttgcaatgtgatatggtcttccagcgtttcttcgaaatgtcttgcaatcagttcgactaattgttccgatgagtaattatattgtaaatgttttgcattattgtaaatttgcaaagcatatgtcctttctgatacacccatcctatcattgtatttcccattttgcaattccttgttaatttccaattgttggactttccccagaaataattcaaaaatttttgttcaaattgttgccaattgccgaattcttcttctttgctatcgaaccataggcttgcttcatatttgagatggtttctgatagtttcttttgctgtttcgaaatttccgatgtgctgtattttctttttcaggctatttatgaacggcactgggtgtaatcttcttacatccccgccaaaccttatcttcacgtcatctgtgctatgtataaccatttctcttctttctccgacattctgttgcgtattgatttccgcaatctttctttccacttcttctatgtctgcttgaatagcgttttgcaacttgttttccaaactttccatttcttttttctggcaattcgttatctccttcattttgattttgatttctttaatctctatctcttgttctcccatctcgttcttgatcattgtcaaacatccttttacttccttttcatacttttctatgcgttcctccattttcttgttgttctcttctattgcttgtttcatttttttgttgtgtttgatccattttttgatccaatttttgttgtgtttcctccattttttgttgtgtttcatccattttttgatccactttatctattttctttgatgtttc

SEQ ID NO: 963 - DNA, 2906 bp, Diabrotica virgifera
tcactttgtcatccattcccctactttctaaatatcccttccagattcacaaatcaatcttccaccaccaactctcattcgtaatattcctcaaaaccaatttttaatctttctaaatatgcttaatggatttcaaaagaaaatatttaattcccattctaaaatactttctaactatttacaaattttaatgacctattctctctttcaaatgagtcttatttagcataggctaatgatcgaaaccttccgcgaaaaacgataatgaactatcatctatttcactgagttttatttagcataggctaatgatcgaccttccgagaagaacgataatggtacgcgtcattcactttgtttatctaagcacattgttccgagtttcgtacgcttattctaatcacttcttaaaattacataaacaatttgttgtatacaggttgttctaaatttatatgcccgtggttgagaaaattgaaaatattttatattaaattgaattttgtttataattatcaaaatttaattttcatatcaaatagaaatataacaaatccccgccttgtattcgataaaatttatctgcatttttaaataaattttctcgaggcaaaaccaactccctgtatatttccttactttaatctacgtcttataccccttcttcttgtattactctaattagtcccacctgtagagtaattgtttccttattttcagtgtcctcatcctgtgttagagtgtcggctattatgttgtctttccctttttcccatatcaatcttctgtctttttcctcagatttttcacatacttttaccgtgtattctgcatcctcgttttcatatgcctcctcttcaaatgccactgtttcgatcatatctttttcgctttcatttgttagctttatttcttcttctcctgagctcgtctcttcttttgaggaatcccaggtttcctttgtttctgatactctcaaattttcttcttctgggctcaactcttcttttgaggagccacaggtttcattttcttttatctttttctgaccttttctcctttttcttctttgtccttgcttcgctgccaaattcatttccactgtttgttctttacctgattcgtccgtattttgtttctcatgttccttgtcctgttctttttctttttcttctgttagtttcatcgtattatttttaaaatctatcactacatgtttttctgccaattcgtcaactcctactatcatgtcatgtgacatgtttggcattattacacattgtagtgcatacatcttcttacccagtcgtaccattactcgtatgccttcatttatagttgccaatgtccgtttgtttgcgcccactaaatttaccctaggtattttgtaaattaaatttgttaagttaacttcttctattagttttctgttgaccaatgttatttcagatccagtgtctatcataattttaattggtttctcgttgataaatccatccacaaattttaaattaactccatttttcttttcgttgtttcttgccaatttaataaactccttggggttacaaaagattcctgtttgatttttggtttttagtgagcgccgtcgtgaaaagacgccggttgctcatcgttgtttatattttcgtcataatgtctctctccgtcatattcatctgtctgggtattatttacttctcttctattttctcttggtctgtcggatctgtttcggttttctcgatatccctgttcattttgtctaccattatttctgttttcttgatttgagcgtgtggtgtttctattctggtattctcgatttctgtcctcattccattgcctatttctttgttcataatttcctcttccgttgtctctattttcgttttcccttctgggattaaaatctcgtcttgtatagtccctcctattttgatttctatctctgtaatctgtgtttctcggggcctgtaatcttctcgcgaccttcttgattttctttctcttagacgtgattctcttatttgtaggaattggcataaactatctatgtctttgtagttttgcaatgtgatatggtcttccagcgtttcttcgaaatgtcttgcaatcagttcgactaattgttccgatgagtaattatattgtaaatgttttgcattattgtaaatttgcaaagcatatgtcctttctgatacacccatcctatcattgtatttcccattttgcaattccttgttaatttccaattgttggactttccccagaaataattcaaaaatttttgttcaaattgttgccaattgccgaattcttcttctttgctatcgaaccataggcttgcttcatatttgagatggtttctgatagtttcttttgctgtttcgaaatttccgatgtgctgtattttctttttcaggctatttatgaacggcactgggtgtaatcttcttacatccccgccaaaccttatcttcacgtcatctgtgctatgtataaccatttctcttctttctccgacattctgttgcgtattgatttccgcaatctttctttccacttcttctatgtctgcttgaatagcgttttgcaacttgttttccaaactttccatttcttttttctggcaattcgttatctccttcattttgattttgatttctttaatctctatctcttgttctcccatctcgttcttgatcattgtcaaacatccttttacttccttttcatacttttctatgcgttcctccattttcttgttgttctcttctattgcttgtttcatttttttgttgtgtttgatccattttttgatccaatttttgttgtgtttcctccattttttgttgtgtttcatccattttttgatccactttatctattttctttgatgtttc

SEQ ID NO: 964 - DNA, 2792 bp, Diabrotica virgifera
ttccagattcacaaatcaaaattccaccaccaactctcattcgcagtattcctcaaaaccaatttttaaactttctaaatatgcttaatggatttcaaaagaaaatagttaattcccattctaaaattactttctactaattacaaaatttaatgatctattatctacttccactaagtcttatttagcatcggctaatgatcgaaccttccgcgaacaacgataatgacctattatcgatttcacttgagttttattttaagcgcattgtcccgagtttcgtttaatcacttcttaaaattaaataacaatttgttgtatacaggttgttctaaatttatatgcccgtggttgagaaaattgaaaatattttatattaaattgaattttgtttataattatcaaaatttaattttcatatcaaatagaaatataacaaatccccgccttgtattcgataaaatttatctgcatttttaaataaattttctcgaggcaaaaccaactccctgtatatttccttactttaatctacgtcttataccccttcttcttgtattactctaattagtcccacctgtagagtaattgtttccttattttcagtgtcctcatcctgtgttagagtgtcggctattatgttgtctttccctttttcccatatcaatcttctgtctttttcctcagatttttcacatacttttaccgtgtattctgcatcctcgttttcatatgcctcctcttcaaatgccactgtttcgatcatatctttttcgctttcatttgttagctttatttcttcttctcctgagctcatctcttcttttgaggaatcccagttttcttttgcttttgatactctcaatttttcttcttctgggctcaactcttcttttgaggagccacaggtttcattttcttttgtctttttctgactttttctcccttttcttctttgtccttgcttcgttgccaaattcatttccactgtttgttctttacctgattcgtccgtattttgtttctcctgttccttgtcctgttcttcttctttttcttctgttagattcatcgtattatttttaaaatctatcactacatgtttttctgccaattcgtcaactcctactatcatgtcatgtgacatgtttggcattattacacattgtagtgcatacatcttcttacccagtcgtaccattactcgtatgccttcatttatagttgccaatgtccgtttgtttgcgcccactaaatttaccctaggtattttgtaaattaaatttgttaagttaacttcttctattagttttctgttgaccaatgttatttcagatccagtgtctatcataattttaattggtttctcgttgataaatccatccacaaattttaaattaactccatttttcttttcgttgtttcttgccaatttaataaactccttggggttacaaaagattcctgtttgatttttggtttttagtgagcgccgtcgtgaaaagacgccggttgctcatcgttgtttatattttcgtcataatgtctctctccgtcatattcatctgtctgggtattatttacttctcttctattttctcttggtctgtcggatctgtttcggttttctcgatatccctgttcattttgtctaccattatttctgttttcttgatttgagcgtgtggtgtttctattctggtattctcgatttctgtcctcattccattgcctatttctttgttcataatttcctcttccgttgtctctattttcgttttcccttctgggattaaaatctcgtcttgtatagtccctcctattttgatttctatctctgtaatctgtgtttctcggggcctgtaatcttctcgcgaccttcttgattttctttctcttagacgtgattctcttatttgtaggaattggcataaactatctatgtctttgtagttttgcaatgtgatatggtcttccagcgtttcttcgaaatgtcttgcaatcagttcgactaattgttccgatgagtaattatattgtaaatgttttgcattattgtaaatttgcaaagcatatgtcctttctgatacacccatcctatcattgtatttcccattttgcaattccttgttaatttccaattgttggactttccccagaaataattcaaaaatttttgttcaaattgttgccaattgccgaattcttcttctttgctatcgaaccataggcttgcttcatatttgagatggtttctgatagtttcttttgctgtttcgaaatttccgatgtgctgtattttctttttcaggctatttatgaacggcactgggtgtaatcttcttacatccccgccaaaccttatcttcacgtcatctgtgctatgtataaccatttctcttctttctccgacattctgttgcgtattgatttccgcaatctttctttccacttcttctatgtctgcttgaatagcgttttgcaacttgttttccaaactttccatttcttttttctggcaattcgttatctccttcattttgattttgatttctttaatctctatctcttgttctcccatctcgttcttgatcattgtcaaacatccttttacttccttttcatacttttctatgcgttcctccattttcttgttgttctcttctattgcttgtttcatttttttgttgtgtttgatccattttttgatccaatttttgttgtgtttcctccattttttgttgtgtttcatccattttttgatccactttatctattttctttgatgtttc

SEQ ID NO: 965 - DNA, 2792 bp, Diabrotica virgifera
ttccagattcacaaatcaaaattccaccaccaactctcattcgcagtattcctcaaaaccaatttttaaactttctaaatatgcttaatggatttcaaaagaaaatagttaattcccattctaaaattactttctactaattacaaaatttaatgatctattatctacttccactaagtcttatttagcatcggctaatgatcgaaccttccgcgaacaacgataatgacctattatcgatttcacttgagttttattttaagcgcattgtcccgagtttcgtttaatcacttcttaaaattaaataacaatttgttgtatacaggttgttctaaatttatatgcccgtggttgagaaaattgaaaatattttatattaaattgaattttgtttataattatcaaaatttaattttcatatcaaatagaaatataacaaatccccgccttgtattcgataaaatttatctgcatttttaaataaattttctcgaggcaaaaccaactccctgtatatttccttactttaatctacgtcttataccccttcttcttgtattactctaattagtcccacctgtagagtaattgtttccttattttcagtgtcctcatcctgtgttagagtgtcggctattatgttgtctttccctttttcccatatcaatcttctgtctttttcctcagatttttcacatacttttaccgtgtattctgcatcctcgttttcatatgcctcctcttcaaatgccactgtttcgatcatatctttttcgctttcatttgttagctttatttcttcttctcctgagctcgtctcttcttttgaggaatcccaggtttcctttgtttctgatactctcaaattttcttcttctgggctcaactcttcttttgaggagccacaggtttcattttcttttatctttttctgaccttttctcctttttcttctttgtccttgcttcgctgccaaattcatttccactgtttgttctttacctgattcgtccgtattttgtttctcatgttccttgtcctgttctttttctttttcttctgttagtttcatcgtattatttttaaaatctatcactacatgtttttctgccaattcgtcaactcctactatcatgtcatgtgacatgtttggcattattacacattgtagtgcatacatcttcttacccagtcgtaccattactcgtatgccttcatttatagttgccaatgtccgtttgtttgcgcccactaaatttaccctaggtattttgtaaattaaatttgttaagttaacttcttctattagttttctgttgaccaatgttatttcagatccagtgtctatcataattttaattggtttctcgttgataaatccatccacaaattttaaattaactccatttttcttttcgttgtttcttgccaatttaataaactccttggggttacaaaagattcctgtttgatttttggtttttagtgagcgccgtcgtgaaaagacgccggttgctcatcgttgtttatattttcgtcataatgtctctctccgtcatattcatctgtctgggtattatttacttctcttctattttctcttggtctgtcggatctgtttcggttttctcgatatccctgttcattttgtctaccattatttctgttttcttgatttgagcgtgtggtgtttctattctggtattctcgatttctgtcctcattccattgcctatttctttgttcataatttcctcttccgttgtctctattttcgttttcccttctgggattaaaatctcgtcttgtatagtccctcctattttgatttctatctctgtaatctgtgtttctcggggcctgtaatcttctcgcgaccttcttgattttctttctcttagacgtgattctcttatttgtaggaattggcataaactatctatgtctttgtagttttgcaatgtgatatggtcttccagcgtttcttcgaaatgtcttgcaatcagttcgactaattgttccgatgagtaattatattgtaaatgttttgcattattgtaaatttgcaaagcatatgtcctttctgatacacccatcctatcattgtatttcccattttgcaattccttgttaatttccaattgttggactttccccagaaataattcaaaaatttttgttcaaattgttgccaattgccgaattcttcttctttgctatcgaaccataggcttgcttcatatttgagatggtttctgatagtttcttttgctgtttcgaaatttccgatgtgctgtattttctttttcaggctatttatgaacggcactgggtgtaatcttcttacatccccgccaaaccttatcttcacgtcatctgtgctatgtataaccatttctcttctttctccgacattctgttgcgtattgatttccgcaatctttctttccacttcttctatgtctgcttgaatagcgttttgcaacttgttttccaaactttccatttcttttttctggcaattcgttatctccttcattttgattttgatttctttaatctctatctcttgttctcccatctcgttcttgatcattgtcaaacatccttttacttccttttcatacttttctatgcgttcctccattttcttgttgttctcttctattgcttgtttcatttttttgttgtgtttgatccattttttgatccaatttttgttgtgtttcctccattttttgttgtgtttcatccattttttgatccactttatctattttctttgatgtttc

SEQ ID NO: 966 - DNA, 2718 bp, Diabrotica virgifera
tcactttgtcatccattcccctactttctaaatatcccttccagattcacaaatcaatcttccaccaccaactctcattcgtaatattcctcaaaaccaatttttaatctttctaaatatgcttaatggatttcaaaagaaaatatttaattcccattctaaaatactttctaactatttacaaattttaatgacctattctctctttcaaatgagtcttatttagcataggctaatgatcgaaaccttccgcgaaaaacgataatgaactatcatctatttcactgagttttatttagcataggctaatgatcgaccttccgagaagaacgataatggtacgcgtcattcactttgtttatctaagcacattgttccgagtttcgtacgcttattctaatcacttcttaaaattacataaacaatttgttgtatacaggttgttctaaatttatatgcccgtggttgagaaaattgaaaatattttatattaaattgaattttgtttataattatcaaaatttaattttcatatcaaatagaaatataacaaatccccgccttgtattcgataaaatttatctgcatttttaaataaattttctcgaggcaaaaccaactccctgtatatttccttactttaatctacgtcttataccccttcttcttgtattactctaattagtcccacctgtagagtaattgtttccttattttcagtgtcctcatcctgtgttagagtgtcggctattatgttgtctttccctttttcccatatcaatcttctgtctttttcctcagatttttcacatacttttaccgtgtattctgcatcctcgttttcatatgcctcctcttcaaatgccactgtttcgatcatatctttttcgctttcatttgttagctttatttcttcttctcctgagctcatctcttcttttgaggaatcccagttttcttttgcttttgatactctcaatttttcttcttctgggctcaactcttcttttgaggagccacaggtttcattttcttttgtctttttctgactttttctcccttttcttctttgtccttgcttcgttgccaaattcatttccactgtttgttctttacctgattcgtccgtattttgtttctcctgttccttgtcctgttcttcttctttttcttctgttagattcatcgtattatttttaaaatctatcactacatgtttttctgccaattcgtcaactcctactatcatgtcatgtgacatgtttggcattattacacattgtagtgcatacatcttcttacccagtcgtaccattactcgtatgccttcatttatagttgccaatgtccgtttgtttgcgcccactaaatttaccctaggtattttgtaaattaaatttgttaagttaacttcttctattagttttctgttgaccaatgttatttcagatccagtgtctatcataattttaattggtttctcgttgataaatccatccacaaattttaaattaactccatttttcttttcgttgtttcttgccaatttaataaactccttggggttacaaaagattcctgtttgatttttggtttttagtgagcgccgtcgtgaaaagacgccggttgctcatcgttgtttatattttcgtcataatgtctctctccgtcatattcatctgtctgggtattatttacttctcttctattttctcttggtctgtcggatctgtttcggttttctcgatatccctgttcattttgtctaccattatttctgttttcttgatttgagcgtgtggtgtttctattctggtattctcgatttctgtcctcattccattgcctatttctttgttcataatttcctcttccgttgtctctattttcgttttcccttctgggattaaaatctcgtcttgtatagtccctcctattttgatttctatctctgtaatctgtgtttctcggggcctgtaatcttctcgcgaccttcttgattttctttctcttagacgtgattctcttatttgtaggaattggcataaactatctatgtctttgtagttttgcaatgtgatatggtcttccagcgtttcttcgaaatgtcttgcaatcagttcgactaattgttccgatgagtaattatattgtaaatgttttgcattattgtaaatttgcaaagcatatgtcctttctgatacacccatcctatcattgtatttcccattttgcaattccttgttaatttccaattgttggactttccccagaaataattcaaaaatttttgttcaaattgttgccaattgccgaattcttcttctttgctatcgaaccataggcttgcttcatatttgagatggtttctgatagtttcttttgctgtttcgaaatttccgatgtgctgtattttctttttcaggctatttatgaacggcactgggtgtaatcttcttacatccccgccaaaccttatcttcacgtcatctgtgctatgtataaccatttctcttctttctccgacattctgttgcgtcctgttttcggtgacttgtttttctatttctgtgattcttttttccacttcttctctgtctacttgaatagcattttccaacttattttccaaattttctagttcctttttctggccattcgttaactcctttattttatcttgaattttcatttcttgttcttgcatgtgatctttaa

SEQ ID NO: 967 - DNA, 2718 bp, Diabrotica virgifera
tcactttgtcatccattcccctactttctaaatatcccttccagattcacaaatcaatcttccaccaccaactctcattcgtaatattcctcaaaaccaatttttaatctttctaaatatgcttaatggatttcaaaagaaaatatttaattcccattctaaaatactttctaactatttacaaattttaatgacctattctctctttcaaatgagtcttatttagcataggctaatgatcgaaaccttccgcgaaaaacgataatgaactatcatctatttcactgagttttatttagcataggctaatgatcgaccttccgagaagaacgataatggtacgcgtcattcactttgtttatctaagcacattgttccgagtttcgtacgcttattctaatcacttcttaaaattacataaacaatttgttgtatacaggttgttctaaatttatatgcccgtggttgagaaaattgaaaatattttatattaaattgaattttgtttataattatcaaaatttaattttcatatcaaatagaaatataacaaatccccgccttgtattcgataaaatttatctgcatttttaaataaattttctcgaggcaaaaccaactccctgtatatttccttactttaatctacgtcttataccccttcttcttgtattactctaattagtcccacctgtagagtaattgtttccttattttcagtgtcctcatcctgtgttagagtgtcggctattatgttgtctttccctttttcccatatcaatcttctgtctttttcctcagatttttcacatacttttaccgtgtattctgcatcctcgttttcatatgcctcctcttcaaatgccactgtttcgatcatatctttttcgctttcatttgttagctttatttcttcttctcctgagctcgtctcttcttttgaggaatcccaggtttcctttgtttctgatactctcaaattttcttcttctgggctcaactcttcttttgaggagccacaggtttcattttcttttatctttttctgaccttttctcctttttcttctttgtccttgcttcgctgccaaattcatttccactgtttgttctttacctgattcgtccgtattttgtttctcatgttccttgtcctgttctttttctttttcttctgttagtttcatcgtattatttttaaaatctatcactacatgtttttctgccaattcgtcaactcctactatcatgtcatgtgacatgtttggcattattacacattgtagtgcatacatcttcttacccagtcgtaccattactcgtatgccttcatttatagttgccaatgtccgtttgtttgcgcccactaaatttaccctaggtattttgtaaattaaatttgttaagttaacttcttctattagttttctgttgaccaatgttatttcagatccagtgtctatcataattttaattggtttctcgttgataaatccatccacaaattttaaattaactccatttttcttttcgttgtttcttgccaatttaataaactccttggggttacaaaagattcctgtttgatttttggtttttagtgagcgccgtcgtgaaaagacgccggttgctcatcgttgtttatattttcgtcataatgtctctctccgtcatattcatctgtctgggtattatttacttctcttctattttctcttggtctgtcggatctgtttcggttttctcgatatccctgttcattttgtctaccattatttctgttttcttgatttgagcgtgtggtgtttctattctggtattctcgatttctgtcctcattccattgcctatttctttgttcataatttcctcttccgttgtctctattttcgttttcccttctgggattaaaatctcgtcttgtatagtccctcctattttgatttctatctctgtaatctgtgtttctcggggcctgtaatcttctcgcgaccttcttgattttctttctcttagacgtgattctcttatttgtaggaattggcataaactatctatgtctttgtagttttgcaatgtgatatggtcttccagcgtttcttcgaaatgtcttgcaatcagttcgactaattgttccgatgagtaattatattgtaaatgttttgcattattgtaaatttgcaaagcatatgtcctttctgatacacccatcctatcattgtatttcccattttgcaattccttgttaatttccaattgttggactttccccagaaataattcaaaaatttttgttcaaattgttgccaattgccgaattcttcttctttgctatcgaaccataggcttgcttcatatttgagatggtttctgatagtttcttttgctgtttcgaaatttccgatgtgctgtattttctttttcaggctatttatgaacggcactgggtgtaatcttcttacatccccgccaaaccttatcttcacgtcatctgtgctatgtataaccatttctcttctttctccgacattctgttgcgtcctgttttcggtgacttgtttttctatttctgtgattcttttttccacttcttctctgtctacttgaatagcattttccaacttattttccaaattttctagttcctttttctggccattcgttaactcctttattttatcttgaattttcatttcttgttcttgcatgtgatctttaa

SEQ ID NO: 968 - DNA, 2604 bp, Diabrotica virgifera
ttccagattcacaaatcaaaattccaccaccaactctcattcgcagtattcctcaaaaccaatttttaaactttctaaatatgcttaatggatttcaaaagaaaatagttaattcccattctaaaattactttctactaattacaaaatttaatgatctattatctacttccactaagtcttatttagcatcggctaatgatcgaaccttccgcgaacaacgataatgacctattatcgatttcacttgagttttattttaagcgcattgtcccgagtttcgtttaatcacttcttaaaattaaataacaatttgttgtatacaggttgttctaaatttatatgcccgtggttgagaaaattgaaaatattttatattaaattgaattttgtttataattatcaaaatttaattttcatatcaaatagaaatataacaaatccccgccttgtattcgataaaatttatctgcatttttaaataaattttctcgaggcaaaaccaactccctgtatatttccttactttaatctacgtcttataccccttcttcttgtattactctaattagtcccacctgtagagtaattgtttccttattttcagtgtcctcatcctgtgttagagtgtcggctattatgttgtctttccctttttcccatatcaatcttctgtctttttcctcagatttttcacatacttttaccgtgtattctgcatcctcgttttcatatgcctcctcttcaaatgccactgtttcgatcatatctttttcgctttcatttgttagctttatttcttcttctcctgagctcatctcttcttttgaggaatcccagttttcttttgcttttgatactctcaatttttcttcttctgggctcaactcttcttttgaggagccacaggtttcattttcttttgtctttttctgactttttctcccttttcttctttgtccttgcttcgttgccaaattcatttccactgtttgttctttacctgattcgtccgtattttgtttctcctgttccttgtcctgttcttcttctttttcttctgttagattcatcgtattatttttaaaatctatcactacatgtttttctgccaattcgtcaactcctactatcatgtcatgtgacatgtttggcattattacacattgtagtgcatacatcttcttacccagtcgtaccattactcgtatgccttcatttatagttgccaatgtccgtttgtttgcgcccactaaatttaccctaggtattttgtaaattaaatttgttaagttaacttcttctattagttttctgttgaccaatgttatttcagatccagtgtctatcataattttaattggtttctcgttgataaatccatccacaaattttaaattaactccatttttcttttcgttgtttcttgccaatttaataaactccttggggttacaaaagattcctgtttgatttttggtttttagtgagcgccgtcgtgaaaagacgccggttgctcatcgttgtttatattttcgtcataatgtctctctccgtcatattcatctgtctgggtattatttacttctcttctattttctcttggtctgtcggatctgtttcggttttctcgatatccctgttcattttgtctaccattatttctgttttcttgatttgagcgtgtggtgtttctattctggtattctcgatttctgtcctcattccattgcctatttctttgttcataatttcctcttccgttgtctctattttcgttttcccttctgggattaaaatctcgtcttgtatagtccctcctattttgatttctatctctgtaatctgtgtttctcggggcctgtaatcttctcgcgaccttcttgattttctttctcttagacgtgattctcttatttgtaggaattggcataaactatctatgtctttgtagttttgcaatgtgatatggtcttccagcgtttcttcgaaatgtcttgcaatcagttcgactaattgttccgatgagtaattatattgtaaatgttttgcattattgtaaatttgcaaagcatatgtcctttctgatacacccatcctatcattgtatttcccattttgcaattccttgttaatttccaattgttggactttccccagaaataattcaaaaatttttgttcaaattgttgccaattgccgaattcttcttctttgctatcgaaccataggcttgcttcatatttgagatggtttctgatagtttcttttgctgtttcgaaatttccgatgtgctgtattttctttttcaggctatttatgaacggcactgggtgtaatcttcttacatccccgccaaaccttatcttcacgtcatctgtgctatgtataaccatttctcttctttctccgacattctgttgcgtcctgttttcggtgacttgtttttctatttctgtgattcttttttccacttcttctctgtctacttgaatagcattttccaacttattttccaaattttctagttcctttttctggccattcgttaactcctttattttatcttgaattttcatttcttgttcttgcatgtgatctttaa

SEQ ID NO: 969 - DNA, 2604 bp, Diabrotica virgifera
ttccagattcacaaatcaaaattccaccaccaactctcattcgcagtattcctcaaaaccaatttttaaactttctaaatatgcttaatggatttcaaaagaaaatagttaattcccattctaaaattactttctactaattacaaaatttaatgatctattatctacttccactaagtcttatttagcatcggctaatgatcgaaccttccgcgaacaacgataatgacctattatcgatttcacttgagttttattttaagcgcattgtcccgagtttcgtttaatcacttcttaaaattaaataacaatttgttgtatacaggttgttctaaatttatatgcccgtggttgagaaaattgaaaatattttatattaaattgaattttgtttataattatcaaaatttaattttcatatcaaatagaaatataacaaatccccgccttgtattcgataaaatttatctgcatttttaaataaattttctcgaggcaaaaccaactccctgtatatttccttactttaatctacgtcttataccccttcttcttgtattactctaattagtcccacctgtagagtaattgtttccttattttcagtgtcctcatcctgtgttagagtgtcggctattatgttgtctttccctttttcccatatcaatcttctgtctttttcctcagatttttcacatacttttaccgtgtattctgcatcctcgttttcatatgcctcctcttcaaatgccactgtttcgatcatatctttttcgctttcatttgttagctttatttcttcttctcctgagctcgtctcttcttttgaggaatcccaggtttcctttgtttctgatactctcaaattttcttcttctgggctcaactcttcttttgaggagccacaggtttcattttcttttatctttttctgaccttttctcctttttcttctttgtccttgcttcgctgccaaattcatttccactgtttgttctttacctgattcgtccgtattttgtttctcatgttccttgtcctgttctttttctttttcttctgttagtttcatcgtattatttttaaaatctatcactacatgtttttctgccaattcgtcaactcctactatcatgtcatgtgacatgtttggcattattacacattgtagtgcatacatcttcttacccagtcgtaccattactcgtatgccttcatttatagttgccaatgtccgtttgtttgcgcccactaaatttaccctaggtattttgtaaattaaatttgttaagttaacttcttctattagttttctgttgaccaatgttatttcagatccagtgtctatcataattttaattggtttctcgttgataaatccatccacaaattttaaattaactccatttttcttttcgttgtttcttgccaatttaataaactccttggggttacaaaagattcctgtttgatttttggtttttagtgagcgccgtcgtgaaaagacgccggttgctcatcgttgtttatattttcgtcataatgtctctctccgtcatattcatctgtctgggtattatttacttctcttctattttctcttggtctgtcggatctgtttcggttttctcgatatccctgttcattttgtctaccattatttctgttttcttgatttgagcgtgtggtgtttctattctggtattctcgatttctgtcctcattccattgcctatttctttgttcataatttcctcttccgttgtctctattttcgttttcccttctgggattaaaatctcgtcttgtatagtccctcctattttgatttctatctctgtaatctgtgtttctcggggcctgtaatcttctcgcgaccttcttgattttctttctcttagacgtgattctcttatttgtaggaattggcataaactatctatgtctttgtagttttgcaatgtgatatggtcttccagcgtttcttcgaaatgtcttgcaatcagttcgactaattgttccgatgagtaattatattgtaaatgttttgcattattgtaaatttgcaaagcatatgtcctttctgatacacccatcctatcattgtatttcccattttgcaattccttgttaatttccaattgttggactttccccagaaataattcaaaaatttttgttcaaattgttgccaattgccgaattcttcttctttgctatcgaaccataggcttgcttcatatttgagatggtttctgatagtttcttttgctgtttcgaaatttccgatgtgctgtattttctttttcaggctatttatgaacggcactgggtgtaatcttcttacatccccgccaaaccttatcttcacgtcatctgtgctatgtataaccatttctcttctttctccgacattctgttgcgtcctgttttcggtgacttgtttttctatttctgtgattcttttttccacttcttctctgtctacttgaatagcattttccaacttattttccaaattttctagttcctttttctggccattcgttaactcctttattttatcttgaattttcatttcttgttcttgcatgtgatctttaa

SEQ ID NO: 970 - DNA, 1994 bp, Diabrotica virgifera
ttttcgaggaatcccaatcttctattttcttttatcaatcttctttcttctttttcttcttctgggctcatctctttttttcgaggaatcccaggcttcattgtttttacttatcttctgctgctttctcctctttcttccctgtccttgcttcattgccaaattcatttccaccgtttgttttttgtctcattatcctttttccgtttctcatgttccttgtccatttccagaatgttggttcttcttcttttccatctgtgattttcatcgtgttatttttgaaatctatcaccacatgtttttctgacaattcatccactcctacgatcatatcatgcatcatgtttggcattataacacattgtagtgcataaaatttcttccccaatcgaacctttattcgtattccttcatttattgttgccaaagtccgtttatttgcgcccactaaatttaccctgggaattttgtaaattaaattcgtcaaatcaacctcttctattaatttcctgttaatcaaagtaatttctgaaccagtatcaatcataattttaatcggtttctcattgataaaaccatctacaaattttaaatttactccacttcctttatcattatttcctgctaatttaataaattccttcgggtgacaaaaaattcctgtttgttcttttgtttttagtgagcgctttcgtgaaaagacgcttgctgttcttcttcgcttcttcttccgtcgctttgtctctcatcctcatattcatatatttgcgtgttgtttaccgctcttctgttttctctttgtctgtcggacccgtatcggtttccacgattttcctgttcattccttctattatcatttctgtcttcttgatttgtgcgggtgttatttctattctggttttctcgatatctgtcttcgttccattgccgatttctttgttcatagtttcctcttccattgtctctattttcgttttcactcctcggaataaattctcttcttgtataatctctcctaaagttctgtcttctatctctatagtctcgattttcgcgttgtctataattatcttgcgatcttcttatttctctttctctcatttttgcttctcgtatttgtaagaattggcacaaactgtcgatatctttgtagttttgtaagttatgtgatcttctaaggtatcttcaaaatgtctggctatcagttctactagctgttcggacgaataattgtactgtagatgttttgcattattatataattgtagtgcatatgttttctctgaaatacccattctatcatggtacctcccattttgcaattccttgtttatttctagctgttgtatttttccccagaaataactcaggaacttttgttcgaatttatgccaattgtccaattcttcttctttgctatcgaaccataaactcgcctcatctttaagatggttccttatcgtttctttggctgtctcgaagttaccgatgtatcgtatttcttttttaaattgtttatgaaaattactgggtgtaatttttttacatccccgccaaatcttattttcacatcctctgtactatggataatcgtttctcttccttctccgaaattctgttgattcttgatttcctccatttgtctttctatttctcgcctgtcttcttgtaatgcgttttcaaatttggtttccaaattctctagttcctttttctggcaattgtttatctccttcattttgattttgatttctttaatctctatctcttgttctcccatctcgttcttgatcattgtcaaacatccttttacttccttttcatacttttctatgcgttcctccattttcttgttgttctcttctattgcttgtttcatttttttgttgtgtttgatccattttttgatccaatttttgttgtgtttcctccattttttgttgtgtttcatccattttttgatccactttatctattttctttgatgtttc

SEQ ID NO: 971 - DNA, 6701 bp, Diabrotica virgifera
  SmartBlast Evalue=6E-79; Info=Pol polyprotein (Fragment) n=1 Tax=Drosophila buzzatii RepID=A1BPH1_DROBU
ggagttgcatcagttgtaatagtttatctattcctgataattcttgctgttctgatgccatgattgtcgtgtctaaaatatcttcttggtctgaatgttctttttgttttttgttgtctttgctttggcttcttgtcacagacatttgttttcaagaagtactgtccccgccaaatatgaaattttactagtatgttaccaagacgactttttctcacccaaatattataaattgtcaataaatatatcaaatgtaaatatcgtaaaaataaaatattaaatcagttatgtaaaatttgtacctaaagagatctaaaattttatgttatcaaatgtaagtatctcactttttaccacaggcatataaattttcaaataccggctttactctttctatccttcaaatttgccactagaaatactttacaatgctttccacgttggacgacagttgatgtgatcttgattattgatatgagataatattcttatatgtcatttaatttaatcaatgtattaatactaatctaattaatttaccagatcacatatcaatatgttttcaatctcagggctttttataaaattaattacttacttacgtggcttctaagtatttcttaatggttcctaatcgggataggaaagaaaagagtaaaataataacacatatgggttacaattgtaatcaaaatattgtttattttatttaaatggcaatcactgcttaatatttgctatatcttattattcttaaacataacatttacacatgggaatcttatttccttttggtttccaattgaaagtttttattaacatttaactattatgatttattagcaacaattctatttaagtttgatgaagcttttctgatattattgattatgtttcttcaattttaaatgtggtatttaatacgaaaaacccatacattcatgtccaaacaaatgagactgacctttttctggtgaactgagaatgtcttcacacaagacccgtttcctgctatccttggctgcaatcaaaacctcgtcctggcttccagtaatgttctcctttgaaactagctcgtatagctctcgttcctgcttctgtcgtgatgctgtgttctacctttttcgaaactgcaatcagctaccgggaactcttggctcaaggaggttcttttactctcaacctggcctacctctcgttccacgatagatactccacactcacggaactacaccggctttctcactctccgtacactaccgtctactactggacttcacttctcgacagctcaaaacattctgatctctatttgtcattcattcccctactttctaaatatcccttccagattcacaaatcaaacttccaccaccaactctcattcgcagtattcctcaaaaccaatttttaatctttctaaatatgcttaatggatttcaaagaaaatagttaattcccattctaaaattactttctactatttacaaatttaatgatctattatctacttccactaagtcttatttagcatcggctaatgatcgaaccttccgcgaacaacgataatgacctattatcgatttcacttgagtcttatttagcataggctaatgatcgaacctcccgcgaacaacgacaatggtacgcgccattcactttgttcattctaagcgcattgtcccgagtttcgtttaatcacttcttaaaattaaatataacaatttgttgtatacaggttgttctaaatttatatgcccgtggttgagaaaattgaaaatattttatattaaattgaattttgtttataattatcaaaatttaattttcatatcaaatagaaatataacaaatccccgccttgtattcgataaaatttatctgcatttttaaataaattttctcgaggcaaaaccaactccctgtatatttccttactttaatctacgtcttatatcctaacttactatctacttcatgtaattctgtcttttattcgtgatatttgtatacatcgtgaatattataaattcctcggatcttttccgagttcctgtgcctcaactcataactatttatcccattttcattattcacgatgtacgggccttcgaaaacaggcatcaactttgcgcaaatgcccccaggaagatttgatactcgtaatgccctcacgagtactttttcacccttttggaaagtcactggtcttctttttctattttgttcctgtctttggatatatttttcgttgcttcgccgtaatcttctctgtacggtttcaatcacctgttgatattcttttggctcttggtcttcccatggccttatcggcagtacacccttcatgatgtattctggggtctcttttgttactgtgctcggaattgtatttagatacctttctatttccgccattttcctgtcccagtggcgatgttgaccatctgttgcaatgcgaagaaatttcgtcacttcctgtatgaatcgttccgaaggattactctgtggatgcctgatgctgacaaaatttgtctctattcctcgttctcgaagttgtcccttgaaacgatcatttcggaaatacgttgcattgtccagtagaatcttttttggtgttcctactatggctataaaattgtcgatttttcttaatatctcctccccctttgtggtgcggcaactatataattttacgtattttgaaaacacatccaccattaccagaatatgtttgttccttttagtggtcataattagatcgcttaacatatctattgctacaatgtctagtttgtttcgggcttcaatatttttggcaacattttcgtttttgaaattccgactcttatatttttgacatacatcgcacttctgggtaatttcctttgcaatgcggtaatcctgtcggctgatgtaattttccctaaaaacgagccaaacttttctgctaccgatatgcccattgtcctcatgtaatttctttattatcttttcggccaatgtctgtgtcactaaatatagttcctttccgtctattctcttaaaatatatgtcattttctacttccgctcttcttttctctctttcctctaggtcttcttggtttgtccttatctcatttaacgaatatatcccttcttcttgtattaatctatttagtcccacctgtagagtaattgtttccttttttcccgtgtcctcatcccgtgttagagcgtcggctattatgttgtcttttccttttatatatcggaactcaaaatcatactcctgtaataatagaatgcctctatgtattctattatttactaatctattcttcatgatatgtactaaagctgcatggtttgtttcgattgtgaattttgctcccaataagtaaaacctcaatttgtttacgcaatatagtacactggcaaactccaattctgtaacactatattttctctcatgtgtttttgtcactcgagatataaaacatatcggcacttcttggtcgttttgtatttgagacagaactcctgcaaatttttgtatggacgcatcagttcggagtataaaaggtaaattgtaaatggggtggtatattttcgttccttttgcgaattctcgttttaatgtttcgaaagcttcctcctgttcttctttccaattccattttattccttttttaagcaactttatcagagggatttccttttggctcaaatcgggaatcagttttttaaaataattaatcgtgccaagaaaacctctcaatgttttcaaattcgttggtcttgggtattcatctatgagcttgactctgtcttcggataatcttactgttttggtgtccaattgaaaacccaaataaatgacttctttttgaaaaaattgacatttttcaatgtttaatttcaatcccgctgtgtccaattcttccagaattatttctatgtgtttcagatgactctgagtatcttgtgaaaaaattaataaatcatcgatataatgaactatgaaatcttcgtggcgattcaaaatggtatgtagagctcggacgagtgcagcacaagcactctgcaatccaaacggcactaccttaaaccggtagacaataccatcaatagaaaaagcggtgtagtttctacacttttcagctaacggtatcaaccaaaaactgtgttttaagtcaattttcgaaaatatgtgtgacccggtgattcttccaaaaatggcctcgatgtttagaggtgattcatattgtgatacagtgtgctggttgatattcctggcatctaaacataatctcaattctccattgcttttctttactatcacaatcgggttaacatacggtgaatcacatctttcgatgatttgatcttccaacattttatttatttcttctttcacctcttgtcgatacttgtatggaatcgggtaagtctttgatcgaaaatttcccaagtttttcacctcaaatgaatgttcgtactttttagccactctgttttcctcattgatcaaattttcgtagtttcttaacatcaaccgcaattctttttctttcccttctccacatatcaattttctgtctttttttctcagattcttcacacatgtttaccgtgcattctgcatcctcgtttgcatatacctcctcttcaaataccactgtttcaatcatattcttttcactttcattttttagctttatttcttcttctcctgagctcgtctcttcttttgaggaatcccaggtttcctttgtttctgatactctcaaattttcttcttctgggctcaactcttcttttgaggagccacaggtttcattttcttttatctttttctgaccttttctcctttttcttctttgtccttgcttcgctgccaaattcatttccactgtttgttctttacctgattcgtccgtattttgtttctcatgttccttgtcctgttctttttctttttcttctgttagtttcatcgtattatttttaaaatctatcactacatgtttttctgccaattcgtcaactcctactatcatgtcatgtgacatgtttggcattattacacattgtagtgcatacatcttcttacccagtcgtaccattactcgtatgccttcatttatagttgccaatgtccgtttgtttgcgcccactaaatttaccctaggtattttgtaaattaaatttgttaagttaacttcttctattagttttctgttgaccaatgttatttcagatccagtgtctatcataattttaattggtttctcgttgataaatccatccacaaattttaaattaactccatttttcttttcgttgtttcttgccaatttaataaactccttggggttacaaaagattcctgtttgatttttggtttttagtgagcgccgtcgtgaaaagacgccggttgctcatcgttgtttatattttcgtcataatgtctctctccgtcatattcatctgtctgggtattatttacttctcttctattttctcttggtctgtcggatctgtttcggttttctcgatatccctgttcattttgtctaccattatttctgttttcttgatttgagcgtgtggtgtttctattctggtattctcgatttctgtcctcattccattgcctatttctttgttcataatttcctcttccgttgtctctattttcgttttcccttctgggattaaaatctcgtcttgtatagtccctcctattttgatttctatctctgtaatctgtgtttctcggggcctgtaatcttctcgcgaccttcttgattttctttctcttagacgtgattctcttatttgtaggaattggcataaactatctatgtctttgtagttttgcaatgtgatatggtcttccagcgtttcttcgaaatgtcttgcaatcagttcgactaattgttccgatgagtaattatattgtaaatgttttgcattattgtaaatttgcaaagcatatgtcctttctgatacacccatcctatcattgtatttcccattttgcaattccttgttaatttccaattgttggactttccccagaaataattcaaaaatttttgttcaaattgttgccaattgccgaattcttcttctttgctatcgaaccataggcttgcttcatatttgagatggtttctgatagtttcttttgctgtttcgaaatttccgatgtgctgtattttctttttcaggctatttatgaacggcactgggtgtaatcttcttacatccccgccaaaccttatcttcacgtcatctgtgctatgtataaccatttctcttctttctccgacattctgttgcgtattgatttccgcaatctttctttccacttcttctatgtctgcttgaatagcgttttgcaacttgttttccaaactttccatttcttttttctggcaattcgttatctccttcattttgattttgatttctttaatctctatctcttgttctcccatctcgttcttgatcattgtcaaacatccttttacttccttttcatacttttctatgcgttcctccattttcttgttgttctcttctattgcttgtttcatttttttgttgtgtttgatccattttttgatccaatttttgttgtgtttcctccattttttgttgtgtttcatccattttttgatccactttatctattttctttgatgtttc

SEQ ID NO: 972 - DNA, 1244 bp, Diabrotica virgifera
ggagttgcatcagttgtaatagtttatctattcctgataattcttgctgttctgatgccatgattgtcgtgtctaaaatatcttcttggtctgaatgttctttttgttttttgttgtctttgctttggcttcttgtcacagacatttgttttcaagaagtactgtccccgccaaatatgaaattttactagtatgttaccaagacgactttttctcacccaaatattataaattgtcaataaatatatcaaatgtaaatatcgtaaaaataaaatattaaatcagttatgtaaaatttgtacctaaagagatctaaaattttatgttatcaaatgtaagtatctcactttttaccacaggcatataaattttcaaataccggctttactctttctatccttcaaatttgccactagaaatactttacaatgctttccacgttggacgacagttgatgtgatcttgattattgatatgagataatattcttatatgtcatttaatttaatcaatgtattaatactaatctaattaatttaccagatcacatatcaatatgttttcaatctcagggcgaattataaattaattacttactttcgtggcttctaaatatttcttaatggttcctaatcgggatagaaaagaaaagagtaaaaaaaaatacacatatgggttacaattataatcaaaatattttttattttatttaaaaggcaatcaatgcttaatatttgctatttcttattattcttaaacataacatttacaaatgggaatcttatttccttttggttttcaattgaaagtttttattaacatttaactattaggagttattaggaacaactctatttaagtttgatgaagcttttctgatattattgattatgttattcaattttttatgtggaatttaatacgaaaacccatacattcatgtccaaacaaatgagactgaccttttcctggtgaactgaaaatgtcctcacaccagaccctttcctgctatccttggctgcgatcaaacctcgtcctggcttccagtgatgttctcctttgaaaaactagctcgaatagctctcgttcctgcttttgtcgtgatgctgtgttctacctttttcgaaactgctatcagctaccgggacactctgggctcaaggaggttcttttactctcgacctggcctacttctcgttccacgatagatactccacactcacggaactacaccggctttctca

SEQ ID NO: 973 - DNA, 6607 bp, Diabrotica virgifera
  SmartBlast Evalue=6E-79; Info=Pol polyprotein (Fragment) n=1 Tax=Drosophila buzzatii RepID=A1BPH1_DROBU
ggagttgcatcagttgtaatagtttatctattcctgataattcttgctgttctgatgccatgattgtcgtgtctaaaatatcttcttggtctgaatgttctttttgttttttgttgtctttgctttggcttcttgtcacagacatttgttttcaagaagtactgtccccgccaaatatgaaattttactagtatgttaccaagacgactttttctcacccaaatattataaattgtcaataaatatatcaaatgtaaatatcgtaaaaataaaatattaaatcagttatgtaaaatttgtacctaaagagatctaaaattttatgttatcaaatgtaagtatctcactttttaccacaggcatataaattttcaaataccggctttactctttctatccttcaaatttgccactagaaatactttacaatgctttccacgttggacgacagttgatgtgatcttgattattgatatgagataatattcttatatgtcatttaatttaatcaatgtattaatactaatctaattaatttaccagatcacatatcaatatgttttcaatctcagggcgaattataaaattaattacttacttacgtggcttctaagtatttcttaatggttcctaatcgggataggaaagaaaagagtaaaataataacacatatgggttacaattgtaatcaaaatattgtttattttatttaaatggcaatcactgcttaatatttgctatatcttattattcttaaacataacatttacacatgggaatcttatttccttttggtttccaattgaaagtttttattaacatttaactattatgatttattagcaacaattctatttaagtttgatgaagcttttctgatattattgattatgtttcttcaattttaaatgtggtatttaatacgaaaaacccatacattcatgtccaaacaaatgagactgacctttttctggtgaactgagaatgtcttcacacaagacccgtttcctgctatccttggctgcaatcaaaacctcgtcctggcttccagtaatgttctcctttgaaactagctcgtatagctctcgttcctgcttctgtcgtgatgctgtgttctacctttttcgaaactgcaatcagctaccgggaactcttggctcaaggaggttcttttactctcaacctggcctacctctcgttccacgatagatactccacactcacggaactacaccggctttctcactctccgtacactaccgtctactactggacttcacttctcgacagctcaaaacattctgatctctatttgtcattcattcccctactttctaaatatcccttccagattcacaaatcaaacttccaccaccaactctcattcgcagtattcctcaaaaccaatttttaatctttctaaatatgcttaatggatttcaaagaaaatagttaattcccattctaaaattactttctactatttacaaatttaatgacctattctctatttccacttagtcttatttagcatcggctaatgatcgatccttccgcgaacaacgataatgacctattatcgatttcacttgagtcttatttaatcacttcttaaaattaaatataacaatttgttgtatacaggttgttctaaatttatatgcccgtggttgagaaaattgaaaatattttatattaaattgaattttgtttataattatcaaaatttaattttcatatcaaatagaaatataacaaatccccgccttgtattcgataaaatttatctgcatttttaaataaattttctcgaggcaaaaccaactccctgtatatttccttactttaatctacgtcttatatcctaacttactatctacttcatgtaattctgtcttttattcgtgatatttgtatacatcgtgaatattataaattcctcggatcttttccgagttcctgtgcctcaactcataactatttatcccattttcattattcacgatgtacgggccttcgaaaacaggcatcaactttgcgcaaatgcccccaggaagatttgatactcgtaatgccctcacgagtactttttcacccttttggaaagtcactggtcttctttttctattttgttcctgtctttggatatatttttcgttgcttcgccgtaatcttctctgtacggtttcaatcacctgttgatattcttttggctcttggtcttcccatggccttatcggcagtacacccttcatgatgtattctggggtctcttttgttactgtgctcggaattgtatttagatacctttctatttccgccattttcctgtcccagtggcgatgttgaccatctgttgcaatgcgaagaaatttcgtcacttcctgtatgaatcgttccgaaggattactctgtggatgcctgatgctgacaaaatttgtctctattcctcgttctcgaagttgtcccttgaaacgatcatttcggaaatacgttgcattgtccagtagaatcttttttggtgttcctactatggctataaaattgtcgatttttcttaatatctcctccccctttgtggtgcggcaactatataattttacgtattttgaaaacacatccaccattaccagaatatgtttgttccttttagtggtcataattagatcgcttaacatatctattgctacaatgtctagtttgtttcgggcttcaatatttttggcaacattttcgtttttgaaattccgactcttatatttttgacatacatcgcacttctgggtaatttcctttgcaatgcggtaatcctgtcggctgatgtaattttccctaaaaacgagccaaacttttctgctaccgatatgcccattgtcctcatgtaatttctttattatcttttcggccaatgtctgtgtcactaaatatagttcctttccgtctattctcttaaaatatatgtcattttctacttccgctcttcttttctctctttcctctaggtcttcttggtttgtccttatctcatttaacgaatatatcccttcttcttgtattaatctatttagtcccacctgtagagtaattgtttccttttttcccgtgtcctcatcccgtgttagagcgtcggctattatgttgtcttttccttttatatatcggaactcaaaatcatactcctgtaataatagaatgcctctatgtattctattatttactaatctattcttcatgatatgtactaaagctgcatggtttgtttcgattgtgaattttgctcccaataagtaaaacctcaatttgtttacgcaatatagtacactggcaaactccaattctgtaacactatattttctctcatgtgtttttgtcactcgagatataaaacatatcggcacttcttggtcgttttgtatttgagacagaactcctgcaaatttttgtatggacgcatcagttcggagtataaaaggtaaattgtaaatggggtggtatattttcgttccttttgcgaattctcgttttaatgtttcgaaagcttcctcctgttcttctttccaattccattttattccttttttaagcaactttatcagagggatttccttttggctcaaatcgggaatcagttttttaaaataattaatcgtgccaagaaaacctctcaatgttttcaaattcgttggtcttgggtattcatctatgagcttgactctgtcttcggataatcttactgttttggtgtccaattgaaaacccaaataaatgacttctttttgaaaaaattgacatttttcaatgtttaatttcaatcccgctgtgtccaattcttccagaattatttctatgtgtttcagatgactctgagtatcttgtgaaaaaattaataaatcatcgatataatgaactatgaaatcttcgtggcgattcaaaatggtatgtagagctcggacgagtgcagcacaagcactctgcaatccaaacggcactaccttaaaccggtagacaataccatcaatagaaaaagcggtgtagtttctacacttttcagctaacggtatcaaccaaaaactgtgttttaagtcaattttcgaaaatatgtgtgacccggtgattcttccaaaaatggcctcgatgtttagaggtgattcatattgtgatacagtgtgctggttgatattcctggcatctaaacataatctcaattctccattgcttttctttactatcacaatcgggttaacatacggtgaatcacatctttcgatgatttgatcttccaacattttatttatttcttctttcacctcttgtcgatacttgtatggaatcgggtaagtctttgatcgaaaatttcccaagtttttcacctcaaatgaatgttcgtactttttagccactctgttttcctcattgatcaaattttcgtagtttcttaacatcaaccgcaattctttttctttcccttctccacatatcaattttctgtctttttttctcagattcttcacacatgtttaccgtgcattctgcatcctcgtttgcatatacctcctcttcaaataccactgtttcaatcatattcttttcactttcattttttagctttatttcttcttctcctgagctcatctcttcttttgaggaatcccagttttcttttgcttttgatactctcaatttttcttcttctgggctcaactcttcttttgaggagccacaggtttcattttcttttgtctttttctgactttttctcccttttcttctttgtccttgcttcgttgccaaattcatttccactgtttgttctttacctgattcgtccgtattttgtttctcctgttccttgtcctgttcttcttctttttcttctgttagattcatcgtattatttttaaaatctatcactacatgtttttctgccaattcgtcaactcctactatcatgtcatgtgacatgtttggcattattacacattgtagtgcatacatcttcttacccagtcgtaccattactcgtatgccttcatttatagttgccaatgtccgtttgtttgcgcccactaaatttaccctaggtattttgtaaattaaatttgttaagttaacttcttctattagttttctgttgaccaatgttatttcagatccagtgtctatcataattttaattggtttctcgttgataaatccatccacaaattttaaattaactccatttttcttttcgttgtttcttgccaatttaataaactccttggggttacaaaagattcctgtttgatttttggtttttagtgagcgccgtcgtgaaaagacgccggttgctcatcgttgtttatattttcgtcataatgtctctctccgtcatattcatctgtctgggtattatttacttctcttctattttctcttggtctgtcggatctgtttcggttttctcgatatccctgttcattttgtctaccattatttctgttttcttgatttgagcgtgtggtgtttctattctggtattctcgatttctgtcctcattccattgcctatttctttgttcataatttcctcttccgttgtctctattttcgttttcccttctgggattaaaatctcgtcttgtatagtccctcctattttgatttctatctctgtaatctgtgtttctcggggcctgtaatcttctcgcgaccttcttgattttctttctcttagacgtgattctcttatttgtaggaattggcataaactatctatgtctttgtagttttgcaatgtgatatggtcttccagcgtttcttcgaaatgtcttgcaatcagttcgactaattgttccgatgagtaattatattgtaaatgttttgcattattgtaaatttgcaaagcatatgtcctttctgatacacccatcctatcattgtatttcccattttgcaattccttgttaatttccaattgttggactttccccagaaataattcaaaaatttttgttcaaattgttgccaattgccgaattcttcttctttgctatcgaaccataggcttgcttcatatttgagatggtttctgatagtttcttttgctgtttcgaaatttccgatgtgctgtattttctttttcaggctatttatgaacggcactgggtgtaatcttcttacatccccgccaaaccttatcttcacgtcatctgtgctatgtataaccatttctcttctttctccgacattctgttgcgtattgatttccgcaatctttctttccacttcttctatgtctgcttgaatagcgttttgcaacttgttttccaaactttccatttcttttttctggcaattcgttatctccttcattttgattttgatttctttaatctctatctcttgttctcccatctcgttcttgatcattgtcaaacatccttttacttccttttcatacttttctatgcgttcctccattttcttgttgttctcttctattgcttgtttcatttttttgttgtgtttgatccattttttgatccaatttttgttgtgtttcctccattttttgttgtgtttcatccattttttgatccactttatctattttctttgatgtttc

SEQ ID NO: 974 - DNA, 6607 bp, Diabrotica virgifera
  SmartBlast Evalue=6E-79; Info=Pol polyprotein (Fragment) n=1 Tax=Drosophila buzzatii RepID=A1BPH1_DROBU
ggagttgcatcagttgtaatagtttatctattcctgataattcttgctgttctgatgccatgattgtcgtgtctaaaatatcttcttggtctgaatgttctttttgttttttgttgtctttgctttggcttcttgtcacagacatttgttttcaagaagtactgtccccgccaaatatgaaattttactagtatgttaccaagacgactttttctcacccaaatattataaattgtcaataaatatatcaaatgtaaatatcgtaaaaataaaatattaaatcagttatgtaaaatttgtacctaaagagatctaaaattttatgttatcaaatgtaagtatctcactttttaccacaggcatataaattttcaaataccggctttactctttctatccttcaaatttgccactagaaatactttacaatgctttccacgttggacgacagttgatgtgatcttgattattgatatgagataatattcttatatgtcatttaatttaatcaatgtattaatactaatctaattaatttaccagatcacatatcaatatgttttcaatctcagggctttttataaaattaattacttacttacgtggcttctaagtatttcttaatggttcctaatcgggataggaaagaaaagagtaaaataataacacatatgggttacaattgtaatcaaaatattgtttattttatttaaatggcaatcactgcttaatatttgctatatcttattattcttaaacataacatttacacatgggaatcttatttccttttggtttccaattgaaagtttttattaacatttaactattatgatttattagcaacaattctatttaagtttgatgaagcttttctgatattattgattatgtttcttcaattttaaatgtggtatttaatacgaaaaacccatacattcatgtccaaacaaatgagactgacctttttctggtgaactgagaatgtcttcacacaagacccgtttcctgctatccttggctgcaatcaaaacctcgtcctggcttccagtaatgttctcctttgaaactagctcgtatagctctcgttcctgcttctgtcgtgatgctgtgttctacctttttcgaaactgcaatcagctaccgggaactcttggctcaaggaggttcttttactctcaacctggcctacctctcgttccacgatagatactccacactcacggaactacaccggctttctcactctccgtacactaccgtctactactggacttcacttctcgacagctcaaaacattctgatctctatttgtcattcattcccctactttctaaatatcccttccagattcacaaatcaaacttccaccaccaactctcattcgcagtattcctcaaaaccaatttttaatctttctaaatatgcttaatggatttcaaagaaaatagttaattcccattctaaaattactttctactatttacaaatttaatgacctattctctatttccacttagtcttatttagcatcggctaatgatcgatccttccgcgaacaacgataatgacctattatcgatttcacttgagtcttatttaatcacttcttaaaattaaatataacaatttgttgtatacaggttgttctaaatttatatgcccgtggttgagaaaattgaaaatattttatattaaattgaattttgtttataattatcaaaatttaattttcatatcaaatagaaatataacaaatccccgccttgtattcgataaaatttatctgcatttttaaataaattttctcgaggcaaaaccaactccctgtatatttccttactttaatctacgtcttatatcctaacttactatctacttcatgtaattctgtcttttattcgtgatatttgtatacatcgtgaatattataaattcctcggatcttttccgagttcctgtgcctcaactcataactatttatcccattttcattattcacgatgtacgggccttcgaaaacaggcatcaactttgcgcaaatgcccccaggaagatttgatactcgtaatgccctcacgagtactttttcacccttttggaaagtcactggtcttctttttctattttgttcctgtctttggatatatttttcgttgcttcgccgtaatcttctctgtacggtttcaatcacctgttgatattcttttggctcttggtcttcccatggccttatcggcagtacacccttcatgatgtattctggggtctcttttgttactgtgctcggaattgtatttagatacctttctatttccgccattttcctgtcccagtggcgatgttgaccatctgttgcaatgcgaagaaatttcgtcacttcctgtatgaatcgttccgaaggattactctgtggatgcctgatgctgacaaaatttgtctctattcctcgttctcgaagttgtcccttgaaacgatcatttcggaaatacgttgcattgtccagtagaatcttttttggtgttcctactatggctataaaattgtcgatttttcttaatatctcctccccctttgtggtgcggcaactatataattttacgtattttgaaaacacatccaccattaccagaatatgtttgttccttttagtggtcataattagatcgcttaacatatctattgctacaatgtctagtttgtttcgggcttcaatatttttggcaacattttcgtttttgaaattccgactcttatatttttgacatacatcgcacttctgggtaatttcctttgcaatgcggtaatcctgtcggctgatgtaattttccctaaaaacgagccaaacttttctgctaccgatatgcccattgtcctcatgtaatttctttattatcttttcggccaatgtctgtgtcactaaatatagttcctttccgtctattctcttaaaatatatgtcattttctacttccgctcttcttttctctctttcctctaggtcttcttggtttgtccttatctcatttaacgaatatatcccttcttcttgtattaatctatttagtcccacctgtagagtaattgtttccttttttcccgtgtcctcatcccgtgttagagcgtcggctattatgttgtcttttccttttatatatcggaactcaaaatcatactcctgtaataatagaatgcctctatgtattctattatttactaatctattcttcatgatatgtactaaagctgcatggtttgtttcgattgtgaattttgctcccaataagtaaaacctcaatttgtttacgcaatatagtacactggcaaactccaattctgtaacactatattttctctcatgtgtttttgtcactcgagatataaaacatatcggcacttcttggtcgttttgtatttgagacagaactcctgcaaatttttgtatggacgcatcagttcggagtataaaaggtaaattgtaaatggggtggtatattttcgttccttttgcgaattctcgttttaatgtttcgaaagcttcctcctgttcttctttccaattccattttattccttttttaagcaactttatcagagggatttccttttggctcaaatcgggaatcagttttttaaaataattaatcgtgccaagaaaacctctcaatgttttcaaattcgttggtcttgggtattcatctatgagcttgactctgtcttcggataatcttactgttttggtgtccaattgaaaacccaaataaatgacttctttttgaaaaaattgacatttttcaatgtttaatttcaatcccgctgtgtccaattcttccagaattatttctatgtgtttcagatgactctgagtatcttgtgaaaaaattaataaatcatcgatataatgaactatgaaatcttcgtggcgattcaaaatggtatgtagagctcggacgagtgcagcacaagcactctgcaatccaaacggcactaccttaaaccggtagacaataccatcaatagaaaaagcggtgtagtttctacacttttcagctaacggtatcaaccaaaaactgtgttttaagtcaattttcgaaaatatgtgtgacccggtgattcttccaaaaatggcctcgatgtttagaggtgattcatattgtgatacagtgtgctggttgatattcctggcatctaaacataatctcaattctccattgcttttctttactatcacaatcgggttaacatacggtgaatcacatctttcgatgatttgatcttccaacattttatttatttcttctttcacctcttgtcgatacttgtatggaatcgggtaagtctttgatcgaaaatttcccaagtttttcacctcaaatgaatgttcgtactttttagccactctgttttcctcattgatcaaattttcgtagtttcttaacatcaaccgcaattctttttctttcccttctccacatatcaattttctgtctttttttctcagattcttcacacatgtttaccgtgcattctgcatcctcgtttgcatatacctcctcttcaaataccactgtttcaatcatattcttttcactttcattttttagctttatttcttcttctcctgagctcatctcttcttttgaggaatcccagttttcttttgcttttgatactctcaatttttcttcttctgggctcaactcttcttttgaggagccacaggtttcattttcttttgtctttttctgactttttctcccttttcttctttgtccttgcttcgttgccaaattcatttccactgtttgttctttacctgattcgtccgtattttgtttctcctgttccttgtcctgttcttcttctttttcttctgttagattcatcgtattatttttaaaatctatcactacatgtttttctgccaattcgtcaactcctactatcatgtcatgtgacatgtttggcattattacacattgtagtgcatacatcttcttacccagtcgtaccattactcgtatgccttcatttatagttgccaatgtccgtttgtttgcgcccactaaatttaccctaggtattttgtaaattaaatttgttaagttaacttcttctattagttttctgttgaccaatgttatttcagatccagtgtctatcataattttaattggtttctcgttgataaatccatccacaaattttaaattaactccatttttcttttcgttgtttcttgccaatttaataaactccttggggttacaaaagattcctgtttgatttttggtttttagtgagcgccgtcgtgaaaagacgccggttgctcatcgttgtttatattttcgtcataatgtctctctccgtcatattcatctgtctgggtattatttacttctcttctattttctcttggtctgtcggatctgtttcggttttctcgatatccctgttcattttgtctaccattatttctgttttcttgatttgagcgtgtggtgtttctattctggtattctcgatttctgtcctcattccattgcctatttctttgttcataatttcctcttccgttgtctctattttcgttttcccttctgggattaaaatctcgtcttgtatagtccctcctattttgatttctatctctgtaatctgtgtttctcggggcctgtaatcttctcgcgaccttcttgattttctttctcttagacgtgattctcttatttgtaggaattggcataaactatctatgtctttgtagttttgcaatgtgatatggtcttccagcgtttcttcgaaatgtcttgcaatcagttcgactaattgttccgatgagtaattatattgtaaatgttttgcattattgtaaatttgcaaagcatatgtcctttctgatacacccatcctatcattgtatttcccattttgcaattccttgttaatttccaattgttggactttccccagaaataattcaaaaatttttgttcaaattgttgccaattgccgaattcttcttctttgctatcgaaccataggcttgcttcatatttgagatggtttctgatagtttcttttgctgtttcgaaatttccgatgtgctgtattttctttttcaggctatttatgaacggcactgggtgtaatcttcttacatccccgccaaaccttatcttcacgtcatctgtgctatgtataaccatttctcttctttctccgacattctgttgcgtattgatttccgcaatctttctttccacttcttctatgtctgcttgaatagcgttttgcaacttgttttccaaactttccatttcttttttctggcaattcgttatctccttcattttgattttgatttctttaatctctatctcttgttctcccatctcgttcttgatcattgtcaaacatccttttacttccttttcatacttttctatgcgttcctccattttcttgttgttctcttctattgcttgtttcatttttttgttgtgtttgatccattttttgatccaatttttgttgtgtttcctccattttttgttgtgtttcatccattttttgatccactttatctattttctttgatgtttc

SEQ ID NO: 975 - DNA, 6607 bp, Diabrotica virgifera
  SmartBlast Evalue=6E-79; Info=Pol polyprotein (Fragment) n=1 Tax=Drosophila buzzatii RepID=A1BPH1_DROBU
ggagttgcatcagttgtaatagtttatctattcctgataattcttgctgttctgatgccatgattgtcgtgtctaaaatatcttcttggtctgaatgttctttttgttttttgttgtctttgctttggcttcttgtcacagacatttgttttcaagaagtactgtccccgccaaatatgaaattttactagtatgttaccaagacgactttttctcacccaaatattataaattgtcaataaatatatcaaatgtaaatatcgtaaaaataaaatattaaatcagttatgtaaaatttgtacctaaagagatctaaaattttatgttatcaaatgtaagtatctcactttttaccacaggcatataaattttcaaataccggctttactctttctatccttcaaatttgccactagaaatactttacaatgctttccacgttggacgacagttgatgtgatcttgattattgatatgagataatattcttatatgtcatttaatttaatcaatgtattaatactaatctaattaatttaccagatcacatatcaatatgttttcaatctcagggcgaattataaaattaattacttacttacgtggcttctaagtatttcttaatggttcctaatcgggataggaaagaaaagagtaaaataataacacatatgggttacaattgtaatcaaaatattgtttattttatttaaatggcaatcactgcttaatatttgctatatcttattattcttaaacataacatttacacatgggaatcttatttccttttggtttccaattgaaagtttttattaacatttaactattatgatttattagcaacaattctatttaagtttgatgaagcttttctgatattattgattatgtttcttcaattttaaatgtggtatttaatacgaaaaacccatacattcatgtccaaacaaatgagactgacctttttctggtgaactgagaatgtcttcacacaagacccgtttcctgctatccttggctgcaatcaaaacctcgtcctggcttccagtaatgttctcctttgaaactagctcgtatagctctcgttcctgcttctgtcgtgatgctgtgttctacctttttcgaaactgcaatcagctaccgggaactcttggctcaaggaggttcttttactctcaacctggcctacctctcgttccacgatagatactccacactcacggaactacaccggctttctcactctccgtacactaccgtctactactggacttcacttctcgacagctcaaaacattctgatctctatttgtcattcattcccctactttctaaatatcccttccagattcacaaatcaaacttccaccaccaactctcattcgcagtattcctcaaaaccaatttttaatctttctaaatatgcttaatggatttcaaagaaaatagttaattcccattctaaaattactttctactatttacaaatttaatgacctattctctatttccacttagtcttatttagcatcggctaatgatcgatccttccgcgaacaacgataatgacctattatcgatttcacttgagtcttatttaatcacttcttaaaattaaatataacaatttgttgtatacaggttgttctaaatttatatgcccgtggttgagaaaattgaaaatattttatattaaattgaattttgtttataattatcaaaatttaattttcatatcaaatagaaatataacaaatccccgccttgtattcgataaaatttatctgcatttttaaataaattttctcgaggcaaaaccaactccctgtatatttccttactttaatctacgtcttatatcctaacttactatctacttcatgtaattctgtcttttattcgtgatatttgtatacatcgtgaatattataaattcctcggatcttttccgagttcctgtgcctcaactcataactatttatcccattttcattattcacgatgtacgggccttcgaaaacaggcatcaactttgcgcaaatgcccccaggaagatttgatactcgtaatgccctcacgagtactttttcacccttttggaaagtcactggtcttctttttctattttgttcctgtctttggatatatttttcgttgcttcgccgtaatcttctctgtacggtttcaatcacctgttgatattcttttggctcttggtcttcccatggccttatcggcagtacacccttcatgatgtattctggggtctcttttgttactgtgctcggaattgtatttagatacctttctatttccgccattttcctgtcccagtggcgatgttgaccatctgttgcaatgcgaagaaatttcgtcacttcctgtatgaatcgttccgaaggattactctgtggatgcctgatgctgacaaaatttgtctctattcctcgttctcgaagttgtcccttgaaacgatcatttcggaaatacgttgcattgtccagtagaatcttttttggtgttcctactatggctataaaattgtcgatttttcttaatatctcctccccctttgtggtgcggcaactatataattttacgtattttgaaaacacatccaccattaccagaatatgtttgttccttttagtggtcataattagatcgcttaacatatctattgctacaatgtctagtttgtttcgggcttcaatatttttggcaacattttcgtttttgaaattccgactcttatatttttgacatacatcgcacttctgggtaatttcctttgcaatgcggtaatcctgtcggctgatgtaattttccctaaaaacgagccaaacttttctgctaccgatatgcccattgtcctcatgtaatttctttattatcttttcggccaatgtctgtgtcactaaatatagttcctttccgtctattctcttaaaatatatgtcattttctacttccgctcttcttttctctctttcctctaggtcttcttggtttgtccttatctcatttaacgaatatatcccttcttcttgtattaatctatttagtcccacctgtagagtaattgtttccttttttcccgtgtcctcatcccgtgttagagcgtcggctattatgttgtcttttccttttatatatcggaactcaaaatcatactcctgtaataatagaatgcctctatgtattctattatttactaatctattcttcatgatatgtactaaagctgcatggtttgtttcgattgtgaattttgctcccaataagtaaaacctcaatttgtttacgcaatatagtacactggcaaactccaattctgtaacactatattttctctcatgtgtttttgtcactcgagatataaaacatatcggcacttcttggtcgttttgtatttgagacagaactcctgcaaatttttgtatggacgcatcagttcggagtataaaaggtaaattgtaaatggggtggtatattttcgttccttttgcgaattctcgttttaatgtttcgaaagcttcctcctgttcttctttccaattccattttattccttttttaagcaactttatcagagggatttccttttggctcaaatcgggaatcagttttttaaaataattaatcgtgccaagaaaacctctcaatgttttcaaattcgttggtcttgggtattcatctatgagcttgactctgtcttcggataatcttactgttttggtgtccaattgaaaacccaaataaatgacttctttttgaaaaaattgacatttttcaatgtttaatttcaatcccgctgtgtccaattcttccagaattatttctatgtgtttcagatgactctgagtatcttgtgaaaaaattaataaatcatcgatataatgaactatgaaatcttcgtggcgattcaaaatggtatgtagagctcggacgagtgcagcacaagcactctgcaatccaaacggcactaccttaaaccggtagacaataccatcaatagaaaaagcggtgtagtttctacacttttcagctaacggtatcaaccaaaaactgtgttttaagtcaattttcgaaaatatgtgtgacccggtgattcttccaaaaatggcctcgatgtttagaggtgattcatattgtgatacagtgtgctggttgatattcctggcatctaaacataatctcaattctccattgcttttctttactatcacaatcgggttaacatacggtgaatcacatctttcgatgatttgatcttccaacattttatttatttcttctttcacctcttgtcgatacttgtatggaatcgggtaagtctttgatcgaaaatttcccaagtttttcacctcaaatgaatgttcgtactttttagccactctgttttcctcattgatcaaattttcgtagtttcttaacatcaaccgcaattctttttctttcccttctccacatatcaattttctgtctttttttctcagattcttcacacatgtttaccgtgcattctgcatcctcgtttgcatatacctcctcttcaaataccactgtttcaatcatattcttttcactttcattttttagctttatttcttcttctcctgagctcgtctcttcttttgaggaatcccaggtttcctttgtttctgatactctcaaattttcttcttctgggctcaactcttcttttgaggagccacaggtttcattttcttttatctttttctgaccttttctcctttttcttctttgtccttgcttcgctgccaaattcatttccactgtttgttctttacctgattcgtccgtattttgtttctcatgttccttgtcctgttctttttctttttcttctgttagtttcatcgtattatttttaaaatctatcactacatgtttttctgccaattcgtcaactcctactatcatgtcatgtgacatgtttggcattattacacattgtagtgcatacatcttcttacccagtcgtaccattactcgtatgccttcatttatagttgccaatgtccgtttgtttgcgcccactaaatttaccctaggtattttgtaaattaaatttgttaagttaacttcttctattagttttctgttgaccaatgttatttcagatccagtgtctatcataattttaattggtttctcgttgataaatccatccacaaattttaaattaactccatttttcttttcgttgtttcttgccaatttaataaactccttggggttacaaaagattcctgtttgatttttggtttttagtgagcgccgtcgtgaaaagacgccggttgctcatcgttgtttatattttcgtcataatgtctctctccgtcatattcatctgtctgggtattatttacttctcttctattttctcttggtctgtcggatctgtttcggttttctcgatatccctgttcattttgtctaccattatttctgttttcttgatttgagcgtgtggtgtttctattctggtattctcgatttctgtcctcattccattgcctatttctttgttcataatttcctcttccgttgtctctattttcgttttcccttctgggattaaaatctcgtcttgtatagtccctcctattttgatttctatctctgtaatctgtgtttctcggggcctgtaatcttctcgcgaccttcttgattttctttctcttagacgtgattctcttatttgtaggaattggcataaactatctatgtctttgtagttttgcaatgtgatatggtcttccagcgtttcttcgaaatgtcttgcaatcagttcgactaattgttccgatgagtaattatattgtaaatgttttgcattattgtaaatttgcaaagcatatgtcctttctgatacacccatcctatcattgtatttcccattttgcaattccttgttaatttccaattgttggactttccccagaaataattcaaaaatttttgttcaaattgttgccaattgccgaattcttcttctttgctatcgaaccataggcttgcttcatatttgagatggtttctgatagtttcttttgctgtttcgaaatttccgatgtgctgtattttctttttcaggctatttatgaacggcactgggtgtaatcttcttacatccccgccaaaccttatcttcacgtcatctgtgctatgtataaccatttctcttctttctccgacattctgttgcgtattgatttccgcaatctttctttccacttcttctatgtctgcttgaatagcgttttgcaacttgttttccaaactttccatttcttttttctggcaattcgttatctccttcattttgattttgatttctttaatctctatctcttgttctcccatctcgttcttgatcattgtcaaacatccttttacttccttttcatacttttctatgcgttcctccattttcttgttgttctcttctattgcttgtttcatttttttgttgtgtttgatccattttttgatccaatttttgttgtgtttcctccattttttgttgtgtttcatccattttttgatccactttatctattttctttgatgtttc

SEQ ID NO: 976 - DNA, 6607 bp, Diabrotica virgifera
  SmartBlast Evalue=6E-79; Info=Pol polyprotein (Fragment) n=1 Tax=Drosophila buzzatii RepID=A1BPH1_DROBU
ggagttgcatcagttgtaatagtttatctattcctgataattcttgctgttctgatgccatgattgtcgtgtctaaaatatcttcttggtctgaatgttctttttgttttttgttgtctttgctttggcttcttgtcacagacatttgttttcaagaagtactgtccccgccaaatatgaaattttactagtatgttaccaagacgactttttctcacccaaatattataaattgtcaataaatatatcaaatgtaaatatcgtaaaaataaaatattaaatcagttatgtaaaatttgtacctaaagagatctaaaattttatgttatcaaatgtaagtatctcactttttaccacaggcatataaattttcaaataccggctttactctttctatccttcaaatttgccactagaaatactttacaatgctttccacgttggacgacagttgatgtgatcttgattattgatatgagataatattcttatatgtcatttaatttaatcaatgtattaatactaatctaattaatttaccagatcacatatcaatatgttttcaatctcagggctttttataaaattaattacttacttacgtggcttctaagtatttcttaatggttcctaatcgggataggaaagaaaagagtaaaataataacacatatgggttacaattgtaatcaaaatattgtttattttatttaaatggcaatcactgcttaatatttgctatatcttattattcttaaacataacatttacacatgggaatcttatttccttttggtttccaattgaaagtttttattaacatttaactattatgatttattagcaacaattctatttaagtttgatgaagcttttctgatattattgattatgtttcttcaattttaaatgtggtatttaatacgaaaaacccatacattcatgtccaaacaaatgagactgacctttttctggtgaactgagaatgtcttcacacaagacccgtttcctgctatccttggctgcaatcaaaacctcgtcctggcttccagtaatgttctcctttgaaactagctcgtatagctctcgttcctgcttctgtcgtgatgctgtgttctacctttttcgaaactgcaatcagctaccgggaactcttggctcaaggaggttcttttactctcaacctggcctacctctcgttccacgatagatactccacactcacggaactacaccggctttctcactctccgtacactaccgtctactactggacttcacttctcgacagctcaaaacattctgatctctatttgtcattcattcccctactttctaaatatcccttccagattcacaaatcaaacttccaccaccaactctcattcgcagtattcctcaaaaccaatttttaatctttctaaatatgcttaatggatttcaaagaaaatagttaattcccattctaaaattactttctactatttacaaatttaatgacctattctctatttccacttagtcttatttagcatcggctaatgatcgatccttccgcgaacaacgataatgacctattatcgatttcacttgagtcttatttaatcacttcttaaaattaaatataacaatttgttgtatacaggttgttctaaatttatatgcccgtggttgagaaaattgaaaatattttatattaaattgaattttgtttataattatcaaaatttaattttcatatcaaatagaaatataacaaatccccgccttgtattcgataaaatttatctgcatttttaaataaattttctcgaggcaaaaccaactccctgtatatttccttactttaatctacgtcttatatcctaacttactatctacttcatgtaattctgtcttttattcgtgatatttgtatacatcgtgaatattataaattcctcggatcttttccgagttcctgtgcctcaactcataactatttatcccattttcattattcacgatgtacgggccttcgaaaacaggcatcaactttgcgcaaatgcccccaggaagatttgatactcgtaatgccctcacgagtactttttcacccttttggaaagtcactggtcttctttttctattttgttcctgtctttggatatatttttcgttgcttcgccgtaatcttctctgtacggtttcaatcacctgttgatattcttttggctcttggtcttcccatggccttatcggcagtacacccttcatgatgtattctggggtctcttttgttactgtgctcggaattgtatttagatacctttctatttccgccattttcctgtcccagtggcgatgttgaccatctgttgcaatgcgaagaaatttcgtcacttcctgtatgaatcgttccgaaggattactctgtggatgcctgatgctgacaaaatttgtctctattcctcgttctcgaagttgtcccttgaaacgatcatttcggaaatacgttgcattgtccagtagaatcttttttggtgttcctactatggctataaaattgtcgatttttcttaatatctcctccccctttgtggtgcggcaactatataattttacgtattttgaaaacacatccaccattaccagaatatgtttgttccttttagtggtcataattagatcgcttaacatatctattgctacaatgtctagtttgtttcgggcttcaatatttttggcaacattttcgtttttgaaattccgactcttatatttttgacatacatcgcacttctgggtaatttcctttgcaatgcggtaatcctgtcggctgatgtaattttccctaaaaacgagccaaacttttctgctaccgatatgcccattgtcctcatgtaatttctttattatcttttcggccaatgtctgtgtcactaaatatagttcctttccgtctattctcttaaaatatatgtcattttctacttccgctcttcttttctctctttcctctaggtcttcttggtttgtccttatctcatttaacgaatatatcccttcttcttgtattaatctatttagtcccacctgtagagtaattgtttccttttttcccgtgtcctcatcccgtgttagagcgtcggctattatgttgtcttttccttttatatatcggaactcaaaatcatactcctgtaataatagaatgcctctatgtattctattatttactaatctattcttcatgatatgtactaaagctgcatggtttgtttcgattgtgaattttgctcccaataagtaaaacctcaatttgtttacgcaatatagtacactggcaaactccaattctgtaacactatattttctctcatgtgtttttgtcactcgagatataaaacatatcggcacttcttggtcgttttgtatttgagacagaactcctgcaaatttttgtatggacgcatcagttcggagtataaaaggtaaattgtaaatggggtggtatattttcgttccttttgcgaattctcgttttaatgtttcgaaagcttcctcctgttcttctttccaattccattttattccttttttaagcaactttatcagagggatttccttttggctcaaatcgggaatcagttttttaaaataattaatcgtgccaagaaaacctctcaatgttttcaaattcgttggtcttgggtattcatctatgagcttgactctgtcttcggataatcttactgttttggtgtccaattgaaaacccaaataaatgacttctttttgaaaaaattgacatttttcaatgtttaatttcaatcccgctgtgtccaattcttccagaattatttctatgtgtttcagatgactctgagtatcttgtgaaaaaattaataaatcatcgatataatgaactatgaaatcttcgtggcgattcaaaatggtatgtagagctcggacgagtgcagcacaagcactctgcaatccaaacggcactaccttaaaccggtagacaataccatcaatagaaaaagcggtgtagtttctacacttttcagctaacggtatcaaccaaaaactgtgttttaagtcaattttcgaaaatatgtgtgacccggtgattcttccaaaaatggcctcgatgtttagaggtgattcatattgtgatacagtgtgctggttgatattcctggcatctaaacataatctcaattctccattgcttttctttactatcacaatcgggttaacatacggtgaatcacatctttcgatgatttgatcttccaacattttatttatttcttctttcacctcttgtcgatacttgtatggaatcgggtaagtctttgatcgaaaatttcccaagtttttcacctcaaatgaatgttcgtactttttagccactctgttttcctcattgatcaaattttcgtagtttcttaacatcaaccgcaattctttttctttcccttctccacatatcaattttctgtctttttttctcagattcttcacacatgtttaccgtgcattctgcatcctcgtttgcatatacctcctcttcaaataccactgtttcaatcatattcttttcactttcattttttagctttatttcttcttctcctgagctcgtctcttcttttgaggaatcccaggtttcctttgtttctgatactctcaaattttcttcttctgggctcaactcttcttttgaggagccacaggtttcattttcttttatctttttctgaccttttctcctttttcttctttgtccttgcttcgctgccaaattcatttccactgtttgttctttacctgattcgtccgtattttgtttctcatgttccttgtcctgttctttttctttttcttctgttagtttcatcgtattatttttaaaatctatcactacatgtttttctgccaattcgtcaactcctactatcatgtcatgtgacatgtttggcattattacacattgtagtgcatacatcttcttacccagtcgtaccattactcgtatgccttcatttatagttgccaatgtccgtttgtttgcgcccactaaatttaccctaggtattttgtaaattaaatttgttaagttaacttcttctattagttttctgttgaccaatgttatttcagatccagtgtctatcataattttaattggtttctcgttgataaatccatccacaaattttaaattaactccatttttcttttcgttgtttcttgccaatttaataaactccttggggttacaaaagattcctgtttgatttttggtttttagtgagcgccgtcgtgaaaagacgccggttgctcatcgttgtttatattttcgtcataatgtctctctccgtcatattcatctgtctgggtattatttacttctcttctattttctcttggtctgtcggatctgtttcggttttctcgatatccctgttcattttgtctaccattatttctgttttcttgatttgagcgtgtggtgtttctattctggtattctcgatttctgtcctcattccattgcctatttctttgttcataatttcctcttccgttgtctctattttcgttttcccttctgggattaaaatctcgtcttgtatagtccctcctattttgatttctatctctgtaatctgtgtttctcggggcctgtaatcttctcgcgaccttcttgattttctttctcttagacgtgattctcttatttgtaggaattggcataaactatctatgtctttgtagttttgcaatgtgatatggtcttccagcgtttcttcgaaatgtcttgcaatcagttcgactaattgttccgatgagtaattatattgtaaatgttttgcattattgtaaatttgcaaagcatatgtcctttctgatacacccatcctatcattgtatttcccattttgcaattccttgttaatttccaattgttggactttccccagaaataattcaaaaatttttgttcaaattgttgccaattgccgaattcttcttctttgctatcgaaccataggcttgcttcatatttgagatggtttctgatagtttcttttgctgtttcgaaatttccgatgtgctgtattttctttttcaggctatttatgaacggcactgggtgtaatcttcttacatccccgccaaaccttatcttcacgtcatctgtgctatgtataaccatttctcttctttctccgacattctgttgcgtattgatttccgcaatctttctttccacttcttctatgtctgcttgaatagcgttttgcaacttgttttccaaactttccatttcttttttctggcaattcgttatctccttcattttgattttgatttctttaatctctatctcttgttctcccatctcgttcttgatcattgtcaaacatccttttacttccttttcatacttttctatgcgttcctccattttcttgttgttctcttctattgcttgtttcatttttttgttgtgtttgatccattttttgatccaatttttgttgtgtttcctccattttttgttgtgtttcatccattttttgatccactttatctattttctttgatgtttc

SEQ ID NO: 977 - DNA, 6513 bp, Diabrotica virgifera
  SmartBlast Evalue=5E-79; Info=Pol polyprotein (Fragment) n=1 Tax=Drosophila buzzatii RepID=A1BPH1_DROBU
ggagttgcatcagttgtaatagtttatctattcctgataattcttgctgttctgatgccatgattgtcgtgtctaaaatatcttcttggtctgaatgttctttttgttttttgttgtctttgctttggcttcttgtcacagacatttgttttcaagaagtactgtccccgccaaatatgaaattttactagtatgttaccaagacgactttttctcacccaaatattataaattgtcaataaatatatcaaatgtaaatatcgtaaaaataaaatattaaatcagttatgtaaaatttgtacctaaagagatctaaaattttatgttatcaaatgtaagtatctcactttttaccacaggcatataaattttcaaataccggctttactctttctatccttcaaatttgccactagaaatactttacaatgctttccacgttggacgacagttgatgtgatcttgattattgatatgagataatattcttatatgtcatttaatttaatcaatgtattaatactaatctaattaatttaccagatcacatatcaatatgttttcaatctcagggcgaattataaaattaattacttacttacgtggcttctaagtatttcttaatggttcctaatcgggataggaaagaaaagagtaaaataataacacatatgggttacaattgtaatcaaaatattgtttattttatttaaatggcaatcactgcttaatatttgctatatcttattattcttaaacataacatttacacatgggaatcttatttccttttggtttccaattgaaagtttttattaacatttaactattatgatttattagcaacaattctatttaagtttgatgaagcttttctgatattattgattatgtttcttcaattttaaatgtggtatttaatacgaaaaacccatacattcatgtccaaacaaatgagactgacctttttctggtgaactgagaatgtcttcacacaagacccgtttcctgctatccttggctgcaatcaaaacctcgtcctggcttccagtaatgttctcctttgaaactagctcgtatagctctcgttcctgcttctgtcgtgatgctgtgttctacctttttcgaaactgcaatcagctaccgggaactcttggctcaaggaggttcttttactctcaacctggcctacctctcgttccacgatagatactccacactcacggaactacaccggctttctcactctccgtacactaccgtctactactggacttcacttctcgacagctcaaaacattctgatctctatttgtcattcattcccctactttctaaatatcccttccagattcacaaatcaaacttccaccaccaactctcattcgcagtattcctcaaaaccaatttttaatctttctaaatatgcttaatggatttcaaagaaaatagttaattcccattctaaaattactttctactatttacaaatttaatgatctattatctacttccactaagtcttatttagcatcggctaatgatcgaaccttccgcgaacaacgataatgacctattatcgatttcacttgagtcttatttagcataggctaatgatcgaacctcccgcgaacaacgacaatggtacgcgccattcactttgttcattctaagcgcattgtcccgagtttcgtttaatcacttcttaaaattaaatataacaatttgttgtatacaggttgttctaaatttatatgcccgtggttgagaaaattgaaaatattttatattaaattgaattttgtttataattatcaaaatttaattttcatatcaaatagaaatataacaaatccccgccttgtattcgataaaatttatctgcatttttaaataaattttctcgaggcaaaaccaactccctgtatatttccttactttaatctacgtcttatatcctaacttactatctacttcatgtaattctgtcttttattcgtgatatttgtatacatcgtgaatattataaattcctcggatcttttccgagttcctgtgcctcaactcataactatttatcccattttcattattcacgatgtacgggccttcgaaaacaggcatcaactttgcgcaaatgcccccaggaagatttgatactcgtaatgccctcacgagtactttttcacccttttggaaagtcactggtcttctttttctattttgttcctgtctttggatatatttttcgttgcttcgccgtaatcttctctgtacggtttcaatcacctgttgatattcttttggctcttggtcttcccatggccttatcggcagtacacccttcatgatgtattctggggtctcttttgttactgtgctcggaattgtatttagatacctttctatttccgccattttcctgtcccagtggcgatgttgaccatctgttgcaatgcgaagaaatttcgtcacttcctgtatgaatcgttccgaaggattactctgtggatgcctgatgctgacaaaatttgtctctattcctcgttctcgaagttgtcccttgaaacgatcatttcggaaatacgttgcattgtccagtagaatcttttttggtgttcctactatggctataaaattgtcgatttttcttaatatctcctccccctttgtggtgcggcaactatataattttacgtattttgaaaacacatccaccattaccagaatatgtttgttccttttagtggtcataattagatcgcttaacatatctattgctacaatgtctagtttgtttcgggcttcaatatttttggcaacattttcgtttttgaaattccgactcttatatttttgacatacatcgcacttctgggtaatttcctttgcaatgcggtaatcctgtcggctgatgtaattttccctaaaaacgagccaaacttttctgctaccgatatgcccattgtcctcatgtaatttctttattatcttttcggccaatgtctgtgtcactaaatatagttcctttccgtctattctcttaaaatatatgtcattttctacttccgctcttcttttctctctttcctctaggtcttcttggtttgtccttatctcatttaacgaatatatcccttcttcttgtattaatctatttagtcccacctgtagagtaattgtttccttttttcccgtgtcctcatcccgtgttagagcgtcggctattatgttgtcttttccttttatatatcggaactcaaaatcatactcctgtaataatagaatgcctctatgtattctattatttactaatctattcttcatgatatgtactaaagctgcatggtttgtttcgattgtgaattttgctcccaataagtaaaacctcaatttgtttacgcaatatagtacactggcaaactccaattctgtaacactatattttctctcatgtgtttttgtcactcgagatataaaacatatcggcacttcttggtcgttttgtatttgagacagaactcctgcaaatttttgtatggacgcatcagttcggagtataaaaggtaaattgtaaatggggtggtatattttcgttccttttgcgaattctcgttttaatgtttcgaaagcttcctcctgttcttctttccaattccattttattccttttttaagcaactttatcagagggatttccttttggctcaaatcgggaatcagttttttaaaataattaatcgtgccaagaaaacctctcaatgttttcaaattcgttggtcttgggtattcatctatgagcttgactctgtcttcggataatcttactgttttggtgtccaattgaaaacccaaataaatgacttctttttgaaaaaattgacatttttcaatgtttaatttcaatcccgctgtgtccaattcttccagaattatttctatgtgtttcagatgactctgagtatcttgtgaaaaaattaataaatcatcgatataatgaactatgaaatcttcgtggcgattcaaaatggtatgtagagctcggacgagtgcagcacaagcactctgcaatccaaacggcactaccttaaaccggtagacaataccatcaatagaaaaagcggtgtagtttctacacttttcagctaacggtatcaaccaaaaactgtgttttaagtcaattttcgaaaatatgtgtgacccggtgattcttccaaaaatggcctcgatgtttagaggtgattcatattgtgatacagtgtgctggttgatattcctggcatctaaacataatctcaattctccattgcttttctttactatcacaatcgggttaacatacggtgaatcacatctttcgatgatttgatcttccaacattttatttatttcttctttcacctcttgtcgatacttgtatggaatcgggtaagtctttgatcgaaaatttcccaagtttttcacctcaaatgaatgttcgtactttttagccactctgttttcctcattgatcaaattttcgtagtttcttaacatcaaccgcaattctttttctttcccttctccacatatcaattttctgtctttttttctcagattcttcacacatgtttaccgtgcattctgcatcctcgtttgcatatacctcctcttcaaataccactgtttcaatcatattcttttcactttcattttttagctttatttcttcttctcctgagctcatctcttcttttgaggaatcccagttttcttttgcttttgatactctcaatttttcttcttctgggctcaactcttcttttgaggagccacaggtttcattttcttttgtctttttctgactttttctcccttttcttctttgtccttgcttcgttgccaaattcatttccactgtttgttctttacctgattcgtccgtattttgtttctcctgttccttgtcctgttcttcttctttttcttctgttagattcatcgtattatttttaaaatctatcactacatgtttttctgccaattcgtcaactcctactatcatgtcatgtgacatgtttggcattattacacattgtagtgcatacatcttcttacccagtcgtaccattactcgtatgccttcatttatagttgccaatgtccgtttgtttgcgcccactaaatttaccctaggtattttgtaaattaaatttgttaagttaacttcttctattagttttctgttgaccaatgttatttcagatccagtgtctatcataattttaattggtttctcgttgataaatccatccacaaattttaaattaactccatttttcttttcgttgtttcttgccaatttaataaactccttggggttacaaaagattcctgtttgatttttggtttttagtgagcgccgtcgtgaaaagacgccggttgctcatcgttgtttatattttcgtcataatgtctctctccgtcatattcatctgtctgggtattatttacttctcttctattttctcttggtctgtcggatctgtttcggttttctcgatatccctgttcattttgtctaccattatttctgttttcttgatttgagcgtgtggtgtttctattctggtattctcgatttctgtcctcattccattgcctatttctttgttcataatttcctcttccgttgtctctattttcgttttcccttctgggattaaaatctcgtcttgtatagtccctcctattttgatttctatctctgtaatctgtgtttctcggggcctgtaatcttctcgcgaccttcttgattttctttctcttagacgtgattctcttatttgtaggaattggcataaactatctatgtctttgtagttttgcaatgtgatatggtcttccagcgtttcttcgaaatgtcttgcaatcagttcgactaattgttccgatgagtaattatattgtaaatgttttgcattattgtaaatttgcaaagcatatgtcctttctgatacacccatcctatcattgtatttcccattttgcaattccttgttaatttccaattgttggactttccccagaaataattcaaaaatttttgttcaaattgttgccaattgccgaattcttcttctttgctatcgaaccataggcttgcttcatatttgagatggtttctgatagtttcttttgctgtttcgaaatttccgatgtgctgtattttctttttcaggctatttatgaacggcactgggtgtaatcttcttacatccccgccaaaccttatcttcacgtcatctgtgctatgtataaccatttctcttctttctccgacattctgttgcgtcctgttttcggtgacttgtttttctatttctgtgattcttttttccacttcttctctgtctacttgaatagcattttccaacttattttccaaattttctagttcctttttctggccattcgttaactcctttattttatcttgaattttcatttcttgttcttgcatgtgatctttaa

SEQ ID NO: 978 - DNA, 3236 bp, Diabrotica virgifera
gtgttcccgtctttatcttaacccacactcccattatcgataaccatggtattttgccggacgaatggggagcaatgataggatgaccagggcgaagccgtaaagttattcctgcatctgagaagctctttttaaaagttaaggcgtgaagacgttaaatcgtatgtgtacacatcgctcgtttgctggtttgtcgattgcttttatccgacatggttgtatttaaaatttttcggtgttctagttctattgttccctcgaaaccctcgaagaggctctccgtctagctgtttgtttgctggtacggtaacgacattatgccttctccccgctgatgttggccgttcagctgtcggtgttataacattaagaattggacttcaccaatatcagaccaataccaatggcttagagtatattatacgtttgtttttatttattaaatcgtacaatattactaaagcgttgattcgtagactaaaaccttgttttcgctccatgtacagttcgacaagtcgaaaactggcgcctcaagtcaagtttttgtagaataaatgtggcaaatgaaataaatttttcaagcaaagcctgcataaatacgaacaattgttatttttagttgatacacaatttaacatatagaaattcaatgctaaatcacaaaaagcttcataaaaatcagtgttttacatgtttttactcaaatcagttataatttaataaaaaactgcatctatcttcaattaaacgatctccagataaaaattattcaacaaatagattttttgcaagcaaaatttgtcaaaaaaactgatgttactgctatgacagtatttaatttggagttgacctatcttgtctcaaaagtcgccaaattcttaattggatttagatctaggtgataaggtggaagctttcatggtaaagtcatggccctgatcttaaacatcttcaacataatcagtatcttctgagttatctccaaatgcaccaaatacaccaatacaaatataattttggcaaatacttttgtccactcttgcacagcttaaattgataaaaaactcatcagataaagctgtaacatcgtggaatctgaagttggcatattttacttggaaagctgtccaattttcaattggatgtaaatctgggtaataaggtgcaagtcttcatgttaaaatcatcacagacatcttccaaacaaaatcaatatcttgtgcgtcatttcctaagtcaattaattttgatccaaaaatgcattaaatactttttttttggacagaaactgtcttcaagagtttggcaaatactttttccatgtaactaatttgtcaaaaagttgatcagataaaactgaaagctgaaagaagctcagaccaaatctaaattcatttaacgttagatctgggtgacaaggtggacgtttcatggtaaaaatttaaaactggtacatatttctaagttttagaactcgcttgttagtttttaataaaaaacaacatttacaaaacaattaaaacaaaaaagtatttttccacctacctctaccgaaagtatacttttccggacctgattgtagggagcaaagttgtacttttcctccctagggaggaaaagtaaaagtgacgtcatggtatttcattcatgaaatataacttattgacgccctgtacaatatctattttctattacgtaagtatctatacattttaacgtttatttataaaacactctgtattttgcagaatggtaaaaaacagtaaattgttattctgatttaacaatgtttacattaataatttgacttatatttgacagttgacagttatattgtacctacttgttagttttagttctaataaattttgttggttagttacataaataaattaagtaaaaatgaaaaaatgacttgttatttgaggaaggtggaaaaaccatatgtataacatgggagtaaagtgccttttcctcccttgaatgattactgccctccgctacgcgtcgggcagtaaacttcattctcgggaggaaaagtagcactttcctcccttgttatacaaatagctatatttgtcagtcagtcttacatttatacgaaaagatgataaaaatactcttatgctttatttgaatgtctaaaagtcacgaaatgcaaagtggcaacaaacgctccagttttacagtcttttttatgactccagtggcgtagcaaaaggatattaatttacattcagtgattcgttttgaagattatattttttacgcctctttttactgaataatagttattttacaatatatatgggtctggtatcgatgaattccacaaaattagtatttactcagtgtgagttgttagctattagtaaacagttctgtatgctgttgaaatgcacgaaacatatagaaggggagatttttgggcttatttcgttatagtattttatacaataatgatgctatttgaatgtatcatataccgaactagttgatataaagaaaatacttaaaaaaatttaagagttaaatagttgaaaagcagtcaaaactttatatttctgtattaaataagatttgtgatattactaattcctagggacagtacaatttcactagttactataattccgggaatagtagaatcgaaaagagagatgtgtttagttttacacgtacgctacagggtatagaagatttatgttttacgttatgttacgctgtgatcattagccgaataaatatgttcgaagcgacaaagattccttctatgtaataatctctgccgatatatagaggatatgacccagttaacgaaagtaaacacactgagcaacgaaacattatttaaaaaatcattagaagtgcatagatttttataccgtcaatatttttcattacagcatagttttagctaatttttgcattactttacagataattacatacaacttttttcgtttgtctgcagttttactgtattcttttccaataagctacaggtctatagttcgtttcaaatgttagaatcagtatggttgtatattgcaagcaggtttgccatacttcgcttattctgtgaattgtcataaataaattgtccttttagacggagaggcagcgccgagaaatctctctgaatttgctaaggctagttttttcacagttgattaccgtgattgtagagagaaacattactgcggtcggtcaagcgaaacgtagaacaggtggta

SEQ ID NO: 979 - DNA, 3200 bp, Diabrotica virgifera
  SmartBlast Evalue=3E-29; Info=E3 ubiquitin-protein ligase SIAH1 n=4 Tax=Apocrita RepID=E2BIC8_9HYME
ttttccacctacctctaccgaaagtatacttttccggacctgattgtagggagcaaagttgtacttttcctccctagggaggaaaatatttttcctccctagggaggaaaagtaaaagtgacgtcatggtatttcattcatgaaatataacttattgacgccctgtacaatatctattttctattacgtaagtatctatacattttaacgtttatttataaaacacctgtattttgcagaatggtaaaaaacagtaaattgttattttgatttaacaatgtttacattaataatttgacttatatttgacagttgacagttatattgtacctacttgttgttttagttctaataaattttgttggttagttacataaataaattaagtaaaaatgaaaaaatgacttgttatttgaggaaggtggaaaaaccatatgtataacatgggagtaaagtgccttttcctcccttgaatgattactgccctccgctacgcgtcgggcagtaaacttcattctcgggaggaaaagtagcactttcctcccttgttatacaaatagctatttccaaggcttgtcatgtatcgcttactgcattttaatttttattgaatattttcggttagtattgcagaaatttgaattgatttgatacatttatgttttctcgttatattttgttagtaattaaaagatgcgcacttgccccagagatttatcacatgaggcaagtgcgttttttgtgtcaggtagagatggtcagaaattacgcccgaaagacggagagaggtttgctctattcagcagaagcccttaacagtgccttaagggatataagaaatcagaatttcactgtcaagggagcatcgtccttatacagtgccccagtgacaaaattatgggatcacttaagtggaagaacaggtgcgaaggtatcagaacaaggtcgatatactgatattccattcgcagaagaaaagcaatcttatcttaatttatatacaacataaattaagataaattgtacaatttttgcccttaaattaagtaatttttcattttgtggcgagttagtcgacccttctgaagttattattttgtttttaacattatgcttattattaatttttttttcagaactgtgtgccgaaaaacctagcaactaagtacacttaccccgtaatgcaattcaaggaaaatatataaaactacgcccagaagacgcagttacctcaaactgacggggcaagtgcgctatggcgatatgtaaggaaaaaaatcatgactactaatcgtgaaatgtcacaagatttgggatcttttttaaataaagctcattgtcaaagtacttcgtgcacgtacctcgatttggcagaagtaatccaattgaagcagtgatacaattaaaatcaaatatgaataaaagggtgtgccccaccttaccctaatgaaacaagaaatggaatatcatggttagttattctagtatctaatggttaacaaatacaaaatgcttaaatctaatggataacaaatacaaaaataaaatacaaacttaaaaatatttagcctttgacgattctgattcgtaagttaatagtatcagaataaaaaccaataatttgttcaagataaattttaacacatttgccatccttgaagcgttcatctgcagatgaaattgctgaaactaaacccacattaaagcattttctctttaatccacctaaatcgattacatcggcctcaaatctatactctttagcatctgtggatcgtccaattatcctgacagacaaataaagcttttgctcgtcatacttataatcaaattggaaaatcttcttgtcatatttgattacataacaactcttcgtgtcttttttattaaaaggtatagtgacttgatcggattttaaaacgacttcattgtgattattatcgatatggtcaagtactctggaatgactgccttgccagtcacagttggtggtgtcttttagcgggcaaatgaatggtccaaattcacagcaagtttcatgatctcgtatttcagttgaaatgcaggaatacgtacagccagctttatgatacttacaaggatacgttaaatgctctgtcattttttctagagtaaagttcctggtatcatggacaggtactttgcaaagaccacaaatttcaacttttttcttacatggttcacagtaactatggccgttggcgcattggtatataggtggaagcatataatctaaacaaacaggacactccaaattcgcaagaagtgcccagatgatatttggattttgtttaatatcagctttttcttctattggaatttcttctacttttgttgtaggctcctctgccttcactatttcaatagttacggtgacagagtctggatcttgaagtttttgtttaacattttcaattgttaaatgagtagtatttagccgttgttcactgcttgtatttttctgagcgcatgtaaagaaaaagtttttattgccgctgacaatccttaagaaatagttaaaggtatcagatttttcggtgacatttatatgttcaacagagcaggagaatacacctttcctggcatcaacttcttttttaacattaaatacttcattgccaaagggaagaagtagacattcttctatggagcaaagaaaattaatttcaaagctaggctctttcagcaacagagttgaatgatcagtggagaaatgtttgacaatgtcagtacgaggtcctgtccaagtgcaattggaataatttttagatggacaatcgaacattctaaattcgcagaacagttcatgttgctcgagtatagccggcacaaggttatctttacaaccagacttagcaaatctacacgcaaatggaaaaaattgagctatactttcataggcttcatctcgcacaaacatgtcgtcctctcctattttacatctaccacatacggcgccggtaccatcatttttggtgtaagttggaaacacagaaagataattgcggcatcttatgcacacaagtgttttcaatacatcagctggtataggtaagcttgacgtcatgtttaccctcttttttgtattaatcaccaaatattaagtaattgtttttttcaacacaattttttaattattattctccaacttgatgaaacatgaaaattgaaaagacaaa

SEQ ID NO: 980 - DNA, 3207 bp, Diabrotica virgifera
gtaaactatgttacaaccaactgtagttaaaaaagtaataatttataaaattcaaattacggggtgtctctaattttatgctcggcagtgtataagaacataacctaaaaggctcatttcagttatatatttattaatttatcgattgcttttatccgacatggttgtatttaaaatttttcggtgttctagttctattgttccctcgaaaccctcgaagaggctctccgtctagctgtttgtttgctggtacggtaacgacattatgccttctccccgctgatgttggccgttcagctgtcggtgttataacattaagaattggacttcaccaatatcagaccaataccaatggcttagagtatattatacgtttgtttttatttattaaatcgtacaatattactaaagcgttgattcgtagactaaaaccttgttttcgctccatgtacagttcgacaagtcgaaaactggcgcctcaagtcaagtttttgtagaataaatgtggcaaatgaaataaatttttcaagcaaagcctgcataaatacgaacaattgttatttttagttgatacacaatttaacatatagaaattcaatgctaaatcacaaaaagcttcataaaaatcagtgttttacatgtttttactcaaatcagttataatttaataaaaaactgcatctatcttcaattaaacgatctccagataaaaattattcaacaaatagattttttgcaagcaaaatttgtcaaaaaaactgatgttactgctatgacagtatttaatttggagttgacctatcttgtctcaaaagtcgccaaattcttaattggatttagatctaggtgataaggtggaagctttcatggtaaagtcatggccctgatcttaaacatcttcaacataatcagtatcttctgagttatctccaaatgcaccaaatacaccaatacaaatataattttggcaaatacttttgtccactcttgcacagcttaaattgataaaaaactcatcagataaagctgtaacatcgtggaatctgaagttggcatattttacttggaaagctgtccaattttcaattggatgtaaatctgggtaataaggtgcaagtcttcatgttaaaatcatcacagacatcttccaaacaaaatcaatatcttgtgcgtcatttcctaagtcaattaattttgatccaaaaatgcattaaatactttttttttggacagaaactgtcttcaagagtttggcaaatactttttccatgtaactaatttgtcaaaaagttgatcagataaaactgaaagctgaaagaagctcagaccaaatctaaattcatttaacgttagatctgggtgacaaggtggacgtttcatggtaaaaatttaaaactggtacatatttctaagttttagaactcgcttgttagtttttaataaaaaacaacatttacaaaacaattaaaacaaaaaagtatttttccacctacctctaccgaaagtatacttttccggacctgattgtagggagcaaagttgtacttttcctccctagggaggaaaatatttttcctccctagggaggaaaagtaaaagtgacgtcatggtatttcattcatgaaatataacttattgacgccctgtacaatatctattttctattacgtaagtatctatacattttaacgtttatttataaaacacctgtattttgcagaatggtaaaaaacagtaaattgttattttgatttaacaatgtttacattaataatttgacttatatttgacagttgacagttatattgtacctacttgttgttttagttctaataaattttgttggttagttacataaataaattaagtaaaaatgaaaaaatgacttgttatttgaggaaggtggaaaaaccatatgtataacatgggagtaaagtgccttttcctcccttgaatgattactgccctccgctacgcgtcgggcagtaaacttcattctcgggaggaaaagtagcactttcctcccttgttatacaaatagctatatttgtcagtcagtcttacatttatacgaaaagatgataaaaatactcttatgctttatttgaatgtctaaaagtcacgaaatgcaaagtggcaacaaacgctccagttttacagtcttttttatgactccagtggcgtagcaaaaggatattaatttacattcagtgattcgttttgaagattatattttttacgcctctttttactgaataatagttattttacaatatatatgggtctggtatcgatgaattccacaaaattagtatttactcagtgtgagttgttagctattagtaaacagttctgtatgctgttgaaatgcacgaaacatatagaaggggagatttttgggcttatttcgttatagtattttatacaataatgatgctatttgaatgtatcatataccgaactagttgatataaagaaaatacttaaaaaaatttaagagttaaatagttgaaaagcagtcaaaactttatatttctgtattaaataagatttgtgatattactaattcctagggacagtacaatttcactagttactataattccgggaatagtagaatcgaaaagagagatgtgtttagttttacacgtacgctacagggtatagaagatttatgttttacgttatgttacgctgtgatcattagccgaataaatatgttcgaagcgacaaagattccttctatgtaataatctctgccgatatatagaggatatgacccagttaacgaaagtaaacacactgagcaacgaaacattatttaaaaaatcattagaagtgcatagatttttataccgtcaatatttttcattacagcatagttttagctaatttttgcattactttacagataattacatacaacttttttcgtttgtctgcagttttactgtattcttttccaataagctacaggtctatagttcgtttcaaatgttagaatcagtatggttgtatattgcaagcaggtttgccatacttcgcttattctgtgaattgtcataaataaattgtccttttagacggagaggcagcgccgagaaatctctctgaatttgctaaggctagttttttcacagttgattaccgtgattgtagagagaaacattactgcggtcggtcaagcgaaacgtagaacaggtggta

SEQ ID NO: 981 - DNA, 3177 bp, Diabrotica virgifera
  SmartBlast Evalue=3E-29; Info=E3 ubiquitin-protein ligase SIAH1 n=4 Tax=Apocrita RepID=E2BIC8_9HYME
ttttccacctacctctaccgaaagtatacttttccggacctgattgtagggagcaaagttgtacttttcctccctagggaggaaaagtaaaagtgacgtcatggtatttcattcatgaaatataacttattgacgccctgtacaatatctattttctattacgtaagtatctatacattttaacgtttatttataaaacactctgtattttgcagaatggtaaaaaacagtaaattgttattctgatttaacaatgtttacattaataatttgacttatatttgacagttgacagttatattgtacctacttgttagttttagttctaataaattttgttggttagttacataaataaattaagtaaaaatgaaaaaatgacttgttatttgaggaaggtggaaaaaccatatgtataacatgggagtaaagtgccttttcctcccttgaatgattactgccctccgctacgcgtcgggcagtaaacttcattctcgggaggaaaagtagcactttcctcccttgttatacaaatagctatttccaaggcttgtcatgtatcgcttactgcattttaatttttattgaatattttcggttagtattgcagaaatttgaattgatttgatacatttatgttttctcgttatattttgttagtaattaaaagatgcgcacttgccccagagatttatcacatgaggcaagtgcgttttttgtgtcaggtagagatggtcagaaattacgcccgaaagacggagagaggtttgctctattcagcagaagcccttaacagtgccttaagggatataagaaatcagaatttcactgtcaagggagcatcgtccttatacagtgccccagtgacaaaattatgggatcacttaagtggaagaacaggtgcgaaggtatcagaacaaggtcgatatactgatattccattcgcagaagaaaagcaatcttatcttaatttatatacaacataaattaagataaattgtacaatttttgcccttaaattaagtaatttttcattttgtggcgagttagtcgacccttctgaagttattattttgtttttaacattatgcttattattaatttttttttcagaactgtgtgccgaaaaacctagcaactaagtacacttaccccgtaatgcaattcaaggaaaatatataaaactacgcccagaagacgcagttacctcaaactgacggggcaagtgcgctatggcgatatgtaaggaaaaaaatcatgactactaatcgtgaaatgtcacaagatttgggatcttttttaaataaagctcattgtcaaagtacttcgtgcacgtacctcgatttggcagaagtaatccaattgaagcagtgatacaattaaaatcaaatatgaataaaagggtgtgccccaccttaccctaatgaaacaagaaatggaatatcatggttagttattctagtatctaatggttaacaaatacaaaatgcttaaatctaatggataacaaatacaaaaataaaatacaaacttaaaaatatttagcctttgacgattctgattcgtaagttaatagtatcagaataaaaaccaataatttgttcaagataaattttaacacatttgccatccttgaagcgttcatctgcagatgaaattgctgaaactaaacccacattaaagcattttctctttaatccacctaaatcgattacatcggcctcaaatctatactctttagcatctgtggatcgtccaattatcctgacagacaaataaagcttttgctcgtcatacttataatcaaattggaaaatcttcttgtcatatttgattacataacaactcttcgtgtcttttttattaaaaggtatagtgacttgatcggattttaaaacgacttcattgtgattattatcgatatggtcaagtactctggaatgactgccttgccagtcacagttggtggtgtcttttagcgggcaaatgaatggtccaaattcacagcaagtttcatgatctcgtatttcagttgaaatgcaggaatacgtacagccagctttatgatacttacaaggatacgttaaatgctctgtcattttttctagagtaaagttcctggtatcatggacaggtactttgcaaagaccacaaatttcaacttttttcttacatggttcacagtaactatggccgttggcgcattggtatataggtggaagcatataatctaaacaaacaggacactccaaattcgcaagaagtgcccagatgatatttggattttgtttaatatcagctttttcttctattggaatttcttctacttttgttgtaggctcctctgccttcactatttcaatagttacggtgacagagtctggatcttgaagtttttgtttaacattttcaattgttaaatgagtagtatttagccgttgttcactgcttgtatttttctgagcgcatgtaaagaaaaagtttttattgccgctgacaatccttaagaaatagttaaaggtatcagatttttcggtgacatttatatgttcaacagagcaggagaatacacctttcctggcatcaacttcttttttaacattaaatacttcattgccaaagggaagaagtagacattcttctatggagcaaagaaaattaatttcaaagctaggctctttcagcaacagagttgaatgatcagtggagaaatgtttgacaatgtcagtacgaggtcctgtccaagtgcaattggaataatttttagatggacaatcgaacattctaaattcgcagaacagttcatgttgctcgagtatagccggcacaaggttatctttacaaccagacttagcaaatctacacgcaaatggaaaaaattgagctatactttcataggcttcatctcgcacaaacatgtcgtcctctcctattttacatctaccacatacggcgccggtaccatcatttttggtgtaagttggaaacacagaaagataattgcggcatcttatgcacacaagtgttttcaatacatcagctggtataggtaagcttgacgtcatgtttaccctcttttttgtattaatcaccaaatattaagtaattgtttttttcaacacaattttttaattattattctccaacttgatgaaacatgaaaattgaaaagacaaa

SEQ ID NO: 982 - DNA, 3184 bp, Diabrotica virgifera
gtaaactatgttacaaccaactgtagttaaaaaagtaataatttataaaattcaaattacggggtgtctctaattttatgctcggcagtgtataagaacataacctaaaaggctcatttcagttatatatttattaatttatcgattgcttttatccgacatggttgtatttaaaatttttcggtgttctagttctattgttccctcgaaaccctcgaagaggctctccgtctagctgtttgtttgctggtacggtaacgacattatgccttctccccgctgatgttggccgttcagctgtcggtgttataacattaagaattggacttcaccaatatcagaccaataccaatggcttagagtatattatacgtttgtttttatttattaaatcgtacaatattactaaagcgttgattcgtagactaaaaccttgttttcgctccatgtacagttcgacaagtcgaaaactggcgcctcaagtcaagtttttgtagaataaatgtggcaaatgaaataaatttttcaagcaaagcctgcataaatacgaacaattgttatttttagttgatacacaatttaacatatagaaattcaatgctaaatcacaaaaagcttcataaaaatcagtgttttacatgtttttactcaaatcagttataatttaataaaaaactgcatctatcttcaattaaacgatctccagataaaaattattcaacaaatagattttttgcaagcaaaatttgtcaaaaaaactgatgttactgctatgacagtatttaatttggagttgacctatcttgtctcaaaagtcgccaaattcttaattggatttagatctaggtgataaggtggaagctttcatggtaaagtcatggccctgatcttaaacatcttcaacataatcagtatcttctgagttatctccaaatgcaccaaatacaccaatacaaatataattttggcaaatacttttgtccactcttgcacagcttaaattgataaaaaactcatcagataaagctgtaacatcgtggaatctgaagttggcatattttacttggaaagctgtccaattttcaattggatgtaaatctgggtaataaggtgcaagtcttcatgttaaaatcatcacagacatcttccaaacaaaatcaatatcttgtgcgtcatttcctaagtcaattaattttgatccaaaaatgcattaaatactttttttttggacagaaactgtcttcaagagtttggcaaatactttttccatgtaactaatttgtcaaaaagttgatcagataaaactgaaagctgaaagaagctcagaccaaatctaaattcatttaacgttagatctgggtgacaaggtggacgtttcatggtaaaaatttaaaactggtacatatttctaagttttagaactcgcttgttagtttttaataaaaaacaacatttacaaaacaattaaaacaaaaaagtatttttccacctacctctaccgaaagtatacttttccggacctgattgtagggagcaaagttgtacttttcctccctagggaggaaaagtaaaagtgacgtcatggtatttcattcatgaaatataacttattgacgccctgtacaatatctattttctattacgtaagtatctatacattttaacgtttatttataaaacactctgtattttgcagaatggtaaaaaacagtaaattgttattctgatttaacaatgtttacattaataatttgacttatatttgacagttgacagttatattgtacctacttgttagttttagttctaataaattttgttggttagttacataaataaattaagtaaaaatgaaaaaatgacttgttatttgaggaaggtggaaaaaccatatgtataacatgggagtaaagtgccttttcctcccttgaatgattactgccctccgctacgcgtcgggcagtaaacttcattctcgggaggaaaagtagcactttcctcccttgttatacaaatagctatatttgtcagtcagtcttacatttatacgaaaagatgataaaaatactcttatgctttatttgaatgtctaaaagtcacgaaatgcaaagtggcaacaaacgctccagttttacagtcttttttatgactccagtggcgtagcaaaaggatattaatttacattcagtgattcgttttgaagattatattttttacgcctctttttactgaataatagttattttacaatatatatgggtctggtatcgatgaattccacaaaattagtatttactcagtgtgagttgttagctattagtaaacagttctgtatgctgttgaaatgcacgaaacatatagaaggggagatttttgggcttatttcgttatagtattttatacaataatgatgctatttgaatgtatcatataccgaactagttgatataaagaaaatacttaaaaaaatttaagagttaaatagttgaaaagcagtcaaaactttatatttctgtattaaataagatttgtgatattactaattcctagggacagtacaatttcactagttactataattccgggaatagtagaatcgaaaagagagatgtgtttagttttacacgtacgctacagggtatagaagatttatgttttacgttatgttacgctgtgatcattagccgaataaatatgttcgaagcgacaaagattccttctatgtaataatctctgccgatatatagaggatatgacccagttaacgaaagtaaacacactgagcaacgaaacattatttaaaaaatcattagaagtgcatagatttttataccgtcaatatttttcattacagcatagttttagctaatttttgcattactttacagataattacatacaacttttttcgtttgtctgcagttttactgtattcttttccaataagctacaggtctatagttcgtttcaaatgttagaatcagtatggttgtatattgcaagcaggtttgccatacttcgcttattctgtgaattgtcataaataaattgtccttttagacggagaggcagcgccgagaaatctctctgaatttgctaaggctagttttttcacagttgattaccgtgattgtagagagaaacattactgcggtcggtcaagcgaaacgtagaacaggtggta

SEQ ID NO: 983 - DNA, 3047 bp, Diabrotica virgifera
cttcatttgtaattgtaaaatatatacaaatatacaaggtagtataacaaaaaagagtactctagaagtgtttgtttcaaaacctccttacaaatttagacaaatccaaaatggatactttaaaatttgtcaacacaactctaggtatagaaaatagttttacaatgatttttaatatatattttccaccctgtacgtataattttcaaatgtatatataatatgcaagtatataaatatatatacctattatgatcacacaatttgagtcaatttttttcttttagagatcacagaagtggagctggaaaattcagctactttatttgttttacatttataaaagttaaaactaaggcaatagccacaattattggaatgtggttttatttttacacattttaaagccccaagccagttcgtggacgtggcatgttcgttatcatatatttttttaggttagatatttctttgagattgattcatggttcataaacattttttctgtgggtactttcacattaatttgttgtgggatcgtcgttcccatcataaaattatgataactcctcggacacctgtttctaggtctacccgtcatcagagaggctcgtaagaagactgaactgaattaaaacacgccgattggttggcaattatacctattaaaataatagtagaggagccttggatgctaaatttgcagttactaaagcgtcatggggacctgctggattgcgaagattaggttataaaaccaaaaagagtcaagttgtattttccattttagtaatgatttccaatttttaatttaattttccatttccaaaaatcgttgtttccgattatggcgacatctacccataattagaaaaaatgtctcgaataaaaattccttatttttacataaggaatgcaaatctgcaaataaaaaaatgggcgttcccatttaagacttttaatcccccaccccacctacgtgggggtcaggggtgtcattcgacagatttttgaaaaatattgaacacgtattattcaattttttgatctgatgttcatttcgcgaaatattcgcttttttcctttacactgttcctcttgtacttaactgaacttttcttaatctgacgttttcgagtttttctaatatttttttacgggctgcccccaacgcacgcccctgcattgaagagtccatattttatatggtaggggtacatttacagggtacaagatttcttcccatgtgattttctgacgctctcgagtaactcgcaaaatcccccttggggccccctgccataatatataccaacatgcatttcctctaacgaggaaagatgaagtgagtgtcgatagaaattaaggtaaactaggttatgcttgttttcattaggatttttcagtgcgtcacaaatgatagaaaaaaggtaagtccgtgataatatacatttataacatttattctaacatgacattttagttaaatctgacagttgtcacattttatttgcaatttggcacaaaaacaaatcaattgtgtttattgcatttataaaatagtattttccaccgacctctaccgaaagtatacttttccggacctgattgtagggagcaaagttgtacttttcctccctagggaggaaaagtaaaagtgacgtcatggtatttcattcatgaaatataacttattgacgccctgtacaatatctattttctattacgtaagtatctatacattttaacgtttatttataaaacaccctgtattttgcagaatggtaaaaaactagtaaattgttattttgatttaacaatgtttacattaataatttgacttatatttgacagttgacagttatattgtacctacttgttagttttagttttaataaattttgttggttagttacataaataaagtaaaaatgaaaaaatgacttgttatttgaggaaggtggaaaaaccatatgtataacatgggagtagtaaagtgccttttcctcccttgaatgatttcctcgggaggaaaagtagcactttcctcccttgttatacaaatagctatttctttgatttgtatagccttataaattgtacagattatattcgtagatatattatataattcgtaaatatttttttttttcgattatagcgccatctattgataactagaataaatgttataaatgttaccgacgaaatgtaatcaccgacgtgcgttttttttttctgtcacatacaatttaatgcgttagaaaagaaatcgaaaaactgtgacgcactgaaaggtgctcataagaaaaagaataaagatgtcttctgagtggtaatttctgaggaagccacactttggctaaatatgttattcgtaagtcaatataactccgaatgagacaactgaggctctgttatgaatcaaaacgtagaaacactagaacaatggactaaaagttactgtaaggggtaaaaatgaactagaataactaataaaatctcaaacaatgctacaaaattggaatacaaacgccaataggtcgttaacaaaaaaaaaccgactaagaattaagaataaacctttaaactatagtaatacatacagtttttaggttatgttaggttaaaaatagctgtagcgttaattattgttcaaaaaataaagttttcgttatggagcgtaagacactacatacattatgtaacatgaatcaatctcaacaaccagaatccgaaatttaaccactatatttttgatttttttaaacatatgctttgtgttgtacataacagtgaacacttctataaaaacccgtccacaaactaccatacaaaatcagtgataacaatttgagacattccagtcatataccttaaatttgtacgatttttaaattccgaaaatattgtcaacaattatcactttatatttcctagaatggaaaaattaaagctgcccttttctggtgactgaggcactggtagacttaaactctaagaaaaaaacaaatggactacaaaagttacatggttggatggagata

SEQ ID NO: 984 - DNA, 3015 bp, Diabrotica virgifera
gtgttcccgtctttatcttaacccacactcccattatcgataaccatggtattttgccggacgaatggggagcaatgataggatgaccagggcgaagccgtaaagttattcctgcatctgagaagctctttttaaaagttaaggcgtgaagacgttaaatcgtatgtgtacacatcgctcgtttgctggtttgtcgattgcttttatccgacatggttgtatttaaaatttttcggtgttctagttctattgttccctcgaaaccctcgaagaggctctccgtctagctgtttgtttgctggtacggtaacgacattatgccttctccccgctgatgttggccgttcagctgtcggtgttataacattaagaattggacttcaccaatatcagaccaataccaatggcttagagtatattatacgtttgtttttatttattaaatcgtacaatattactaaagcgttgattcgtagactaaaaccttgttttcgctccatgtacagttcgacaagtcgaaaactggcgcctcaagtcaagtttttgtagaataaatgtggcaaatgaaataaatttttcaagcaaagcctgcataaatacgaacaattgttatttttagttgatacacaatttaacatatagaaattcaatgctaaatcacaaaaagcttcataaaaatcagtgttttacatgtttttactcaaatcagttataatttaataaaaaactgcatctatcttcaattaaacgatctccagataaaaattattcaacaaatagattttttgcaagcaaaatttgtcaaaaaaactgatgttactgctatgacagtatttaatttggagttgacctatcttgtctcaaaagtcgccaaattcttaattggatttagatctaggtgataaggtggaagctttcatggtaaagtcatggccctgatcttaaacatcttcaacataatcagtatcttctgagttatctccaaatgcaccaaatacaccaatacaaatataattttggcaaatacttttgtccactcttgcacagcttaaattgataaaaaactcatcagataaagctgtaacatcgtggaatctgaagttggcatattttacttggaaagctgtccaattttcaattggatgtaaatctgggtaataaggtgcaagtcttcatgttaaaatcatcacagacatcttccaaacaaaatcaatatcttgtgcgtcatttcctaagtcaattaattttgatccaaaaatgcattaaatactttttttttggacagaaactgtcttcaagagtttggcaaatactttttccatgtaactaatttgtcaaaaagttgatcagataaaactgaaagctgaaagaagctcagaccaaatctaaattcatttaacgttagatctgggtgacaaggtggacgtttcatggtaaaaatttaaaactggtacatatttctaagttttagaactcgcttgttagtttttaataaaaaacaacatttacaaaacaattaaaacaaaaaagtatttttccacctacctctaccgaaagtatacttttccggacctgattgtagggagcaaagttgtacttttcctccctagggaggaaaagtaaaagtgacgtcatggtatttcattcatgaaatataacttattgacgccctgtacaatatctattttctattacgtaagtatctatacattttaacgtttatttataaaacaccctgtattttgcagaatggtaaaaaactagtaaattgttattttgatttaacaatgtttacattaataatttgacttatatttgacagttgacagttatattgtacctacttgttagttttagttttaataaattttgttggttagttacataaataaagtaaaaatgaaaaaatgacttgttatttgaggaaggtggaaaaaccatatgtataacatgggagtagtaaagtgccttttcctcccttgaatgatttcctcgggaggaaaagtagcactttcctcccttgttatacaaatagctatttctttgatttgtatagccttataaattgtacagattatattcgtagatatattatataattcgtaaatatttttttttttcgattatagcgccatctattgataactagaataaatgttataaatgttaccgacgaaatgtaatcaccgacgtgcgttttttttttctgtcacatacaatttaatgcgttagaaaagaaatcgaaaaactgtgacgcactgaaaggtgctcataagaaaaagaataaagatgtcttctgagtggtaatttctgaggaagccacactttggctaaatatgttattcgtaagtcaatataactccgaatgagacaactgaggctctgttatgaatcaaaacgtagaaacactagaacaatggactaaaagttactgtaaggggtaaaaatgaactagaataactaataaaatctcaaacaatgctacaaaattggaatacaaacgccaataggtcgttaacaaaaaaaaaccgactaagaattaagaataaacctttaaactatagtaatacatacagtttttaggttatgttaggttaaaaatagctgtagcgttaattattgttcaaaaaataaagttttcgttatggagcgtaagacactacatacattatgtaacatgaatcaatctcaacaaccagaatccgaaatttaaccactatatttttgatttttttaaacatatgctttgtgttgtacataacagtgaacacttctataaaaacccgtccacaaactaccatacaaaatcagtgataacaatttgagacattccagtcatataccttaaatttgtacgatttttaaattccgaaaatattgtcaacaattatcactttatatttcctagaatggaaaaattaaagctgcccttttctggtgactgaggcactggtagacttaaactctaagaaaaaaacaaatggactacaaaagttacatggttggatggagata

SEQ ID NO: 985 - DNA, 2963 bp, Diabrotica virgifera
gtaaactatgttacaaccaactgtagttaaaaaagtaataatttataaaattcaaattacggggtgtctctaattttatgctcggcagtgtataagaacataacctaaaaggctcatttcagttatatatttattaatttatcgattgcttttatccgacatggttgtatttaaaatttttcggtgttctagttctattgttccctcgaaaccctcgaagaggctctccgtctagctgtttgtttgctggtacggtaacgacattatgccttctccccgctgatgttggccgttcagctgtcggtgttataacattaagaattggacttcaccaatatcagaccaataccaatggcttagagtatattatacgtttgtttttatttattaaatcgtacaatattactaaagcgttgattcgtagactaaaaccttgttttcgctccatgtacagttcgacaagtcgaaaactggcgcctcaagtcaagtttttgtagaataaatgtggcaaatgaaataaatttttcaagcaaagcctgcataaatacgaacaattgttatttttagttgatacacaatttaacatatagaaattcaatgctaaatcacaaaaagcttcataaaaatcagtgttttacatgtttttactcaaatcagttataatttaataaaaaactgcatctatcttcaattaaacgatctccagataaaaattattcaacaaatagattttttgcaagcaaaatttgtcaaaaaaactgatgttactgctatgacagtatttaatttggagttgacctatcttgtctcaaaagtcgccaaattcttaattggatttagatctaggtgataaggtggaagctttcatggtaaagtcatggccctgatcttaaacatcttcaacataatcagtatcttctgagttatctccaaatgcaccaaatacaccaatacaaatataattttggcaaatacttttgtccactcttgcacagcttaaattgataaaaaactcatcagataaagctgtaacatcgtggaatctgaagttggcatattttacttggaaagctgtccaattttcaattggatgtaaatctgggtaataaggtgcaagtcttcatgttaaaatcatcacagacatcttccaaacaaaatcaatatcttgtgcgtcatttcctaagtcaattaattttgatccaaaaatgcattaaatactttttttttggacagaaactgtcttcaagagtttggcaaatactttttccatgtaactaatttgtcaaaaagttgatcagataaaactgaaagctgaaagaagctcagaccaaatctaaattcatttaacgttagatctgggtgacaaggtggacgtttcatggtaaaaatttaaaactggtacatatttctaagttttagaactcgcttgttagtttttaataaaaaacaacatttacaaaacaattaaaacaaaaaagtatttttccacctacctctaccgaaagtatacttttccggacctgattgtagggagcaaagttgtacttttcctccctagggaggaaaagtaaaagtgacgtcatggtatttcattcatgaaatataacttattgacgccctgtacaatatctattttctattacgtaagtatctatacattttaacgtttatttataaaacaccctgtattttgcagaatggtaaaaaactagtaaattgttattttgatttaacaatgtttacattaataatttgacttatatttgacagttgacagttatattgtacctacttgttagttttagttttaataaattttgttggttagttacataaataaagtaaaaatgaaaaaatgacttgttatttgaggaaggtggaaaaaccatatgtataacatgggagtagtaaagtgccttttcctcccttgaatgatttcctcgggaggaaaagtagcactttcctcccttgttatacaaatagctatttctttgatttgtatagccttataaattgtacagattatattcgtagatatattatataattcgtaaatatttttttttttcgattatagcgccatctattgataactagaataaatgttataaatgttaccgacgaaatgtaatcaccgacgtgcgttttttttttctgtcacatacaatttaatgcgttagaaaagaaatcgaaaaactgtgacgcactgaaaggtgctcataagaaaaagaataaagatgtcttctgagtggtaatttctgaggaagccacactttggctaaatatgttattcgtaagtcaatataactccgaatgagacaactgaggctctgttatgaatcaaaacgtagaaacactagaacaatggactaaaagttactgtaaggggtaaaaatgaactagaataactaataaaatctcaaacaatgctacaaaattggaatacaaacgccaataggtcgttaacaaaaaaaaaccgactaagaattaagaataaacctttaaactatagtaatacatacagtttttaggttatgttaggttaaaaatagctgtagcgttaattattgttcaaaaaataaagttttcgttatggagcgtaagacactacatacattatgtaacatgaatcaatctcaacaaccagaatccgaaatttaaccactatatttttgatttttttaaacatatgctttgtgttgtacataacagtgaacacttctataaaaacccgtccacaaactaccatacaaaatcagtgataacaatttgagacattccagtcatataccttaaatttgtacgatttttaaattccgaaaatattgtcaacaattatcactttatatttcctagaatggaaaaattaaagctgcccttttctggtgactgaggcactggtagacttaaactctaagaaaaaaacaaatggactacaaaagttacatggttggatggagata

SEQ ID NO: 986 - DNA, 2110 bp, Diabrotica virgifera
cttcatttgtaattgtaaaatatatacaaatatacaaggtagtataacaaaaaagagtactctagaagtgtttgtttcaaaacctccttacaaatttagacaaatccaaaatggatactttaaaatttgtcaacacaactctaggtatagaaaatagttttacaatgatttttaatatatattttccaccctgtacgtataattttcaaatgtatatataatatgcaagtatataaatatatatacctattatgatcacacaatttgagtcaatttttttcttttagagatcacagaagtggagctggaaaattcagctactttatttgttttacatttataaaagttaaaactaaggcaatagccacaattattggaatgtggttttatttttacacattttaaagccccaagccagttcgtggacgtggcatgttcgttatcatatatttttttaggttagatatttctttgagattgattcatggttcataaacattttttctgtgggtactttcacattaatttgttgtgggatcgtcgttcccatcataaaattatgataactcctcggacacctgtttctaggtctacccgtcatcagagaggctcgtaagaagactgaactgaattaaaacacgccgattggttggcaattatacctattaaaataatagtagaggagccttggatgctaaatttgcagttactaaagcgtcatggggacctgctggattgcgaagattaggttataaaaccaaaaagagtcaagttgtattttccattttagtaatgatttccaatttttaatttaattttccatttccaaaaatcgttgtttccgattatggcgacatctacccataattagaaaaaatgtctcgaataaaaattccttatttttacataaggaatgcaaatctgcaaataaaaaaatgggcgttcccatttaagacttttaatcccccaccccacctacgtgggggtcaggggtgtcattcgacagatttttgaaaaatattgaacacgtattattcaattttttgatctgatgttcatttcgcgaaatattcgcttttttcctttacactgttcctcttgtacttaactgaacttttcttaatctgacgttttcgagtttttctaatatttttttacgggctgcccccaacgcacgcccctgcattgaagagtccatattttatatggtaggggtacatttacagggtacaagatttcttcccatgtgattttctgacgctctcgagtaactcgcaaaatcccccttggggccccctgccataatatataccaacatgcatttcctctaacgaggaaagatgaagtgagtgtcgatagaaattaaggtaaactaggttatgcttgttttcattaggatttttcagtgcgtcacaaatgatagaaaaaaggtaagtccgtgataatatacatttataacatttattctaacatgacattttagttaaatctgacagttgtcacattttatttgcaatttggcacaaaaacaaatcaattgtgtttattgcatttataaaatagtattttccaccgacctctaccgaaagtatacttttccggacctgattgtagggagcaaagttgtacttttcctccctagggaggaaaagtaaaagtgacgtcatggtatttcattcatgaaatataacttattgacgccctgtacaatatctattttctattacgtaagtatctatacattttaacgtttatttataaaacactctgtattttgcagaatggtaaaaaacagtaaattgttattctgatttaacaatgtttacattaataatttgacttatatttgacagttgacagttatattgtacctacttgttagttttagttctaataaattttgttggttagttacataaataaattaagtaaaaatgaaaaaatgacttgttatttgaggaaggtggaaaaaccatatgtataacatgggagtaaagtgccttttcctcccttgaatgattactgccctccgctacgcgtcgggcagtaaacttcattctcgggaggaaaagtagcactttcctcccttgttatacaaatagctatattt

SEQ ID NO: 987 - DNA, 2101 bp, Diabrotica virgifera
gtgttcccgtctttatcttaacccacactcccattatcgataaccatggtattttgccggacgaatggggagcaatgataggatgaccagggcgaagccgtaaagttattcctgcatctgagaagctctttttaaaagttaaggcgtgaagacgttaaatcgtatgtgtacacatcgctcgtttgctggtttgtcgattgcttttatccgacatggttgtatttaaaatttttcggtgttctagttctattgttccctcgaaaccctcgaagaggctctccgtctagctgtttgtttgctggtacggtaacgacattatgccttctccccgctgatgttggccgttcagctgtcggtgttataacattaagaattggacttcaccaatatcagaccaataccaatggcttagagtatattatacgtttgtttttatttattaaatcgtacaatattactaaagcgttgattcgtagactaaaaccttgttttcgctccatgtacagttcgacaagtcgaaaactggcgcctcaagtcaagtttttgtagaataaatgtggcaaatgaaataaatttttcaagcaaagcctgcataaatacgaacaattgttatttttagttgatacacaatttaacatatagaaattcaatgctaaatcacaaaaagcttcataaaaatcagtgttttacatgtttttactcaaatcagttataatttaataaaaaactgcatctatcttcaattaaacgatctccagataaaaattattcaacaaatagattttttgcaagcaaaatttgtcaaaaaaactgatgttactgctatgacagtatttaatttggagttgacctatcttgtctcaaaagtcgccaaattcttaattggatttagatctaggtgataaggtggaagctttcatggtaaagtcatggccctgatcttaaacatcttcaacataatcagtatcttctgagttatctccaaatgcaccaaatacaccaatacaaatataattttggcaaatacttttgtccactcttgcacagcttaaattgataaaaaactcatcagataaagctgtaacatcgtggaatctgaagttggcatattttacttggaaagctgtccaattttcaattggatgtaaatctgggtaataaggtgcaagtcttcatgttaaaatcatcacagacatcttccaaacaaaatcaatatcttgtgcgtcatttcctaagtcaattaattttgatccaaaaatgcattaaatactttttttttggacagaaactgtcttcaagagtttggcaaatactttttccatgtaactaatttgtcaaaaagttgatcagataaaactgaaagctgaaagaagctcagaccaaatctaaattcatttaacgttagatctgggtgacaaggtggacgtttcatggtaaaaatttaaaactggtacatatttctaagttttagaactcgcttgttagtttttaataaaaaacaacatttacaaaacaattaaaacaaaaaagtatttttccacctacctctaccgaaagtatacttttccggacctgattgtagggagcaaagttgtacttttcctccctagggaggaaaatatttttcctccctagggaggaaaagtaaaagtgacgtcatggtatttcattcatgaaatataacttattgacgccctgtacaatatctattttctattacgtaagtatctatacattttaacgtttatttataaaacacctgtattttgcagaatggtaaaaaacagtaaattgttattttgatttaacaatgtttacattaataatttgacttatatttgacagttgacagttatattgtacctacttgttgttttagttctaataaattttgttggttagttacataaataaattaagtaaaaatgaaaaaatgacttgttatttgaggaaggtggaaaaaccatatgtataacatgggagtaaagtgccttttcctcccttgaatgattactgccctccgctacgcgtcgggcagtaaacttcattctcgggaggaaaagtagcactttcctcccttgttatacaaatagctatattt

SEQ ID NO: 988 - DNA, 4742 bp, Diabrotica virgifera
  SmartBlast Evalue=5E-29; Info=E3 ubiquitin-protein ligase SIAH1 n=4 Tax=Apocrita RepID=E2BIC8_9HYME
cttcatttgtaattgtaaaatatatacaaatatacaaggtagtataacaaaaaagagtactctagaagtgtttgtttcaaaacctccttacaaatttagacaaatccaaaatggatactttaaaatttgtcaacacaactctaggtatagaaaatagttttacaatgatttttaatatatattttccaccctgtacgtataattttcaaatgtatatataatatgcaagtatataaatatatatacctattatgatcacacaatttgagtcaatttttttcttttagagatcacagaagtggagctggaaaattcagctactttatttgttttacatttataaaagttaaaactaaggcaatagccacaattattggaatgtggttttatttttacacattttaaagccccaagccagttcgtggacgtggcatgttcgttatcatatatttttttaggttagatatttctttgagattgattcatggttcataaacattttttctgtgggtactttcacattaatttgttgtgggatcgtcgttcccatcataaaattatgataactcctcggacacctgtttctaggtctacccgtcatcagagaggctcgtaagaagactgaactgaattaaaacacgccgattggttggcaattatacctattaaaataatagtagaggagccttggatgctaaatttgcagttactaaagcgtcatggggacctgctggattgcgaagattaggttataaaaccaaaaagagtcaagttgtattttccattttagtaatgatttccaatttttaatttaattttccatttccaaaaatcgttgtttccgattatggcgacatctacccataattagaaaaaatgtctcgaataaaaattccttatttttacataaggaatgcaaatctgcaaataaaaaaatgggcgttcccatttaagacttttaatcccccaccccacctacgtgggggtcaggggtgtcattcgacagatttttgaaaaatattgaacacgtattattcaattttttgatctgatgttcatttcgcgaaatattcgcttttttcctttacactgttcctcttgtacttaactgaacttttcttaatctgacgttttcgagtttttctaatatttttttacgggctgcccccaacgcacgcccctgcattgaagagtccatattttatatggtaggggtacatttacagggtacaagatttcttcccatgtgattttctgacgctctcgagtaactcgcaaaatcccccttggggccccctgccataatatataccaacatgcatttcctctaacgaggaaagatgaagtgagtgtcgatagaaattaaggtaaactaggttatgcttgttttcattaggatttttcagtgcgtcacaaatgatagaaaaaaggtaagtccgtgataatatacatttataacatttattctaacatgacattttagttaaatctgacagttgtcacattttatttgcaatttggcacaaaaacaaatcaattgtgtttattgcatttataaaatagtattttccaccgacctctaccgaaagtatacttttccggacctgattgtagggagcaaagttgtacttttcctccctagggaggaaaagtaaaagtgacgtcatggtatttcattcatgaaatataacttattgacgccctgtacaatatctattttctattacgtaagtatctatacattttaacgtttatttataaaacactctgtattttgcagaatggtaaaaaacagtaaattgttattctgatttaacaatgtttacattaataatttgacttatatttgacagttgacagttatattgtacctacttgttagttttagttctaataaattttgttggttagttacataaataaattaagtaaaaatgaaaaaatgacttgttatttgaggaaggtggaaaaaccatatgtataacatgggagtaaagtgccttttcctcccttgaatgattactgccctccgctacgcgtcgggcagtaaacttcattctcgggaggaaaagtagcactttcctcccttgttatacaaatagctatttccaaggcttgtcatgtatcgcttactgcattttaatttttattgaatattttcggttagtattgcagaaatttgaattgatttgatacatttatgttttctcgttatattttgttagtaattaaaagatgcgcacttgccccagagatttatcacatgaggcaagtgcgttttttgtgtcaggtagagatggtcagaaattacgcccgaaagacggagagaggtttgctctattcagcagaagcccttaacagtgccttaagggatataagaaatcagaatttcactgtcaagggagcatcgtccttatacagtgccccagtgacaaaattatgggatcacttaagtggaagaacaggtgcgaaggtatcagaacaaggtcgatatactgatattccattcgcagaagaaaagcaatcttatcttaatttatatacaacataaattaagataaattgtacaatttttgcccttaaattaagtaatttttcattttgtggcgagttagtcgacccttctgaagttattattttgtttttaacattatgcttattattaatttttttttcagaactgtgtgccgaaaaacctagcaactaagtacacttaccccgtaatgcaattcaaggaaaatatataaaactacgcccagaagacgcagttacctcaaactgacggggcaagtgcgctatggcgatatgtaaggaaaaaaatcatgactactaatcgtgaaatgtcacaagatttgggatcttttttaaataaagctcattgtcaaagtacttcgtgcacgtacctcgatttggcagaagtaatccaattgaagcagtgatacaattaaaatcaaatatgaataaaagggtgtgccccaccttaccctaatgaaacaagaaatggaatatcatggttagttattctagtatctaatggttaacaaatacaaaatgcttaaatctaatggataacaaatacaaaaataaaatacaaacttaaaaatatttagcctttgacgattctgattcgtaagttaatagtatcagaataaaaaccaataatttgttcaagataaattttaacacatttgccatccttgaagcgttcatctgcagatgaaattgctgaaactaaacccacattaaagcattttctctttaatccacctaaatcgattacatcggcctcaaatctatactctttagcatctgtggatcgtccaattatcctgacagacaaataaagcttttgctcgtcatacttataatcaaattggaaaatcttcttgtcatatttgattacataacaactcttcgtgtcttttttattaaaaggtatagtgacttgatcggattttaaaacgacttcattgtgattattatcgatatggtcaagtactctggaatgactgccttgccagtcacagttggtggtgtcttttagcgggcaaatgaatggtccaaattcacagcaagtttcatgatctcgtatttcagttgaaatgcaggaatacgtacagccagctttatgatacttacaaggatacgttaaatgctctgtcattttttctagagtaaagttcctggtatcatggacaggtactttgcaaagaccacaaatttcaacttttttcttacatggttcacagtaactatggccgttggcgcattggtatataggtggaagcatataatctaaacaaacaggacactccaaattcgcaagaagtgcccagatgatatttggattttgtttaatatcagctttttcttctattggaatttcttctacttttgttgtaggctcctctgccttcactatttcaatagttacggtgacagagtctggatcttgaagtttttgtttaacattttcaattgttaaatgagtagtatttagccgttgttcactgcttgtatttttctgagcgcatgtaaagaaaaagtttttattgccgctgacaatccttaagaaatagttaaaggtatcagatttttcggtgacatttatatgttcaacagagcaggagaatacacctttcctggcatcaacttcttttttaacattaaatacttcattgccaaagggaagaagtagacattcttctatggagcaaagaaaattaatttcaaagctaggctctttcagcaacagagttgaatgatcagtggagaaatgtttgacaatgtcagtacgaggtcctgtccaagtgcaattggaataatttttagatggacaatcgaacattctaaattcgcagaacagttcatgttgctcgagtatagccggcacaaggttatctttacaaccagacttagcaaatctacacgcaaatggaaaaaattgagctatactttcataggcttcatctcgcacaaacatgtcgtcctctcctattttacatctaccacatacggcgccggtaccatcatttttggtgtaagttggaaacacagaaagataattgcggcatcttatgcacacaagtgttttcaatacatcagctggtataggtaagcttgacgtcatgtttaccctcttttttgtattaatcaccaaatattaagtaattgtttttttcaacacaattttttaattattattctccaacttgatgaaacatgaaaattgaaaagacaaa

SEQ ID NO: 989 - DNA, 2078 bp, Diabrotica virgifera
gtgttcccgtctttatcttaacccacactcccattatcgataaccatggtattttgccggacgaatggggagcaatgataggatgaccagggcgaagccgtaaagttattcctgcatctgagaagctctttttaaaagttaaggcgtgaagacgttaaatcgtatgtgtacacatcgctcgtttgctggtttgtcgattgcttttatccgacatggttgtatttaaaatttttcggtgttctagttctattgttccctcgaaaccctcgaagaggctctccgtctagctgtttgtttgctggtacggtaacgacattatgccttctccccgctgatgttggccgttcagctgtcggtgttataacattaagaattggacttcaccaatatcagaccaataccaatggcttagagtatattatacgtttgtttttatttattaaatcgtacaatattactaaagcgttgattcgtagactaaaaccttgttttcgctccatgtacagttcgacaagtcgaaaactggcgcctcaagtcaagtttttgtagaataaatgtggcaaatgaaataaatttttcaagcaaagcctgcataaatacgaacaattgttatttttagttgatacacaatttaacatatagaaattcaatgctaaatcacaaaaagcttcataaaaatcagtgttttacatgtttttactcaaatcagttataatttaataaaaaactgcatctatcttcaattaaacgatctccagataaaaattattcaacaaatagattttttgcaagcaaaatttgtcaaaaaaactgatgttactgctatgacagtatttaatttggagttgacctatcttgtctcaaaagtcgccaaattcttaattggatttagatctaggtgataaggtggaagctttcatggtaaagtcatggccctgatcttaaacatcttcaacataatcagtatcttctgagttatctccaaatgcaccaaatacaccaatacaaatataattttggcaaatacttttgtccactcttgcacagcttaaattgataaaaaactcatcagataaagctgtaacatcgtggaatctgaagttggcatattttacttggaaagctgtccaattttcaattggatgtaaatctgggtaataaggtgcaagtcttcatgttaaaatcatcacagacatcttccaaacaaaatcaatatcttgtgcgtcatttcctaagtcaattaattttgatccaaaaatgcattaaatactttttttttggacagaaactgtcttcaagagtttggcaaatactttttccatgtaactaatttgtcaaaaagttgatcagataaaactgaaagctgaaagaagctcagaccaaatctaaattcatttaacgttagatctgggtgacaaggtggacgtttcatggtaaaaatttaaaactggtacatatttctaagttttagaactcgcttgttagtttttaataaaaaacaacatttacaaaacaattaaaacaaaaaagtatttttccacctacctctaccgaaagtatacttttccggacctgattgtagggagcaaagttgtacttttcctccctagggaggaaaagtaaaagtgacgtcatggtatttcattcatgaaatataacttattgacgccctgtacaatatctattttctattacgtaagtatctatacattttaacgtttatttataaaacactctgtattttgcagaatggtaaaaaacagtaaattgttattctgatttaacaatgtttacattaataatttgacttatatttgacagttgacagttatattgtacctacttgttagttttagttctaataaattttgttggttagttacataaataaattaagtaaaaatgaaaaaatgacttgttatttgaggaaggtggaaaaaccatatgtataacatgggagtaaagtgccttttcctcccttgaatgattactgccctccgctacgcgtcgggcagtaaacttcattctcgggaggaaaagtagcactttcctcccttgttatacaaatagctatattt

SEQ ID NO: 990 - DNA, 2049 bp, Diabrotica virgifera
gtaaactatgttacaaccaactgtagttaaaaaagtaataatttataaaattcaaattacggggtgtctctaattttatgctcggcagtgtataagaacataacctaaaaggctcatttcagttatatatttattaatttatcgattgcttttatccgacatggttgtatttaaaatttttcggtgttctagttctattgttccctcgaaaccctcgaagaggctctccgtctagctgtttgtttgctggtacggtaacgacattatgccttctccccgctgatgttggccgttcagctgtcggtgttataacattaagaattggacttcaccaatatcagaccaataccaatggcttagagtatattatacgtttgtttttatttattaaatcgtacaatattactaaagcgttgattcgtagactaaaaccttgttttcgctccatgtacagttcgacaagtcgaaaactggcgcctcaagtcaagtttttgtagaataaatgtggcaaatgaaataaatttttcaagcaaagcctgcataaatacgaacaattgttatttttagttgatacacaatttaacatatagaaattcaatgctaaatcacaaaaagcttcataaaaatcagtgttttacatgtttttactcaaatcagttataatttaataaaaaactgcatctatcttcaattaaacgatctccagataaaaattattcaacaaatagattttttgcaagcaaaatttgtcaaaaaaactgatgttactgctatgacagtatttaatttggagttgacctatcttgtctcaaaagtcgccaaattcttaattggatttagatctaggtgataaggtggaagctttcatggtaaagtcatggccctgatcttaaacatcttcaacataatcagtatcttctgagttatctccaaatgcaccaaatacaccaatacaaatataattttggcaaatacttttgtccactcttgcacagcttaaattgataaaaaactcatcagataaagctgtaacatcgtggaatctgaagttggcatattttacttggaaagctgtccaattttcaattggatgtaaatctgggtaataaggtgcaagtcttcatgttaaaatcatcacagacatcttccaaacaaaatcaatatcttgtgcgtcatttcctaagtcaattaattttgatccaaaaatgcattaaatactttttttttggacagaaactgtcttcaagagtttggcaaatactttttccatgtaactaatttgtcaaaaagttgatcagataaaactgaaagctgaaagaagctcagaccaaatctaaattcatttaacgttagatctgggtgacaaggtggacgtttcatggtaaaaatttaaaactggtacatatttctaagttttagaactcgcttgttagtttttaataaaaaacaacatttacaaaacaattaaaacaaaaaagtatttttccacctacctctaccgaaagtatacttttccggacctgattgtagggagcaaagttgtacttttcctccctagggaggaaaatatttttcctccctagggaggaaaagtaaaagtgacgtcatggtatttcattcatgaaatataacttattgacgccctgtacaatatctattttctattacgtaagtatctatacattttaacgtttatttataaaacacctgtattttgcagaatggtaaaaaacagtaaattgttattttgatttaacaatgtttacattaataatttgacttatatttgacagttgacagttatattgtacctacttgttgttttagttctaataaattttgttggttagttacataaataaattaagtaaaaatgaaaaaatgacttgttatttgaggaaggtggaaaaaccatatgtataacatgggagtaaagtgccttttcctcccttgaatgattactgccctccgctacgcgtcgggcagtaaacttcattctcgggaggaaaagtagcactttcctcccttgttatacaaatagctatattt

SEQ ID NO: 991 - DNA, 2026 bp, Diabrotica virgifera
gtaaactatgttacaaccaactgtagttaaaaaagtaataatttataaaattcaaattacggggtgtctctaattttatgctcggcagtgtataagaacataacctaaaaggctcatttcagttatatatttattaatttatcgattgcttttatccgacatggttgtatttaaaatttttcggtgttctagttctattgttccctcgaaaccctcgaagaggctctccgtctagctgtttgtttgctggtacggtaacgacattatgccttctccccgctgatgttggccgttcagctgtcggtgttataacattaagaattggacttcaccaatatcagaccaataccaatggcttagagtatattatacgtttgtttttatttattaaatcgtacaatattactaaagcgttgattcgtagactaaaaccttgttttcgctccatgtacagttcgacaagtcgaaaactggcgcctcaagtcaagtttttgtagaataaatgtggcaaatgaaataaatttttcaagcaaagcctgcataaatacgaacaattgttatttttagttgatacacaatttaacatatagaaattcaatgctaaatcacaaaaagcttcataaaaatcagtgttttacatgtttttactcaaatcagttataatttaataaaaaactgcatctatcttcaattaaacgatctccagataaaaattattcaacaaatagattttttgcaagcaaaatttgtcaaaaaaactgatgttactgctatgacagtatttaatttggagttgacctatcttgtctcaaaagtcgccaaattcttaattggatttagatctaggtgataaggtggaagctttcatggtaaagtcatggccctgatcttaaacatcttcaacataatcagtatcttctgagttatctccaaatgcaccaaatacaccaatacaaatataattttggcaaatacttttgtccactcttgcacagcttaaattgataaaaaactcatcagataaagctgtaacatcgtggaatctgaagttggcatattttacttggaaagctgtccaattttcaattggatgtaaatctgggtaataaggtgcaagtcttcatgttaaaatcatcacagacatcttccaaacaaaatcaatatcttgtgcgtcatttcctaagtcaattaattttgatccaaaaatgcattaaatactttttttttggacagaaactgtcttcaagagtttggcaaatactttttccatgtaactaatttgtcaaaaagttgatcagataaaactgaaagctgaaagaagctcagaccaaatctaaattcatttaacgttagatctgggtgacaaggtggacgtttcatggtaaaaatttaaaactggtacatatttctaagttttagaactcgcttgttagtttttaataaaaaacaacatttacaaaacaattaaaacaaaaaagtatttttccacctacctctaccgaaagtatacttttccggacctgattgtagggagcaaagttgtacttttcctccctagggaggaaaagtaaaagtgacgtcatggtatttcattcatgaaatataacttattgacgccctgtacaatatctattttctattacgtaagtatctatacattttaacgtttatttataaaacactctgtattttgcagaatggtaaaaaacagtaaattgttattctgatttaacaatgtttacattaataatttgacttatatttgacagttgacagttatattgtacctacttgttagttttagttctaataaattttgttggttagttacataaataaattaagtaaaaatgaaaaaatgacttgttatttgaggaaggtggaaaaaccatatgtataacatgggagtaaagtgccttttcctcccttgaatgattactgccctccgctacgcgtcgggcagtaaacttcattctcgggaggaaaagtagcactttcctcccttgttatacaaatagctatattt

SEQ ID NO: 992 - DNA, 1984 bp, Diabrotica virgifera
ctgttataaaaatacatataaatctaacaaatgtttggttcttatgactacgtatctaatgattagggtaaggtgggtttcaactaaataaaacttcttgtaacgtgaagttcagtatggaacggatttcaaatttagccgcaagtattaaacgaaagagctacacatgtgagtggcaacgtcgttaatcttacgacatagtagcacacgttttgttggtagttacgtttgaggttatacaaagagcaggaaagggttttttccacctacctctaccgaaagtatacttttccggacctgattgtagggagcaaagttgtacttttcctccctagggaggaaaatatttttcctccctagggaggaaaagtaaaagtgacgtcatggtatttcattcatgaaatataacttattgacgccctgtacaatatctattttctattacgtaagtatctatacattttaacgtttatttataaaacacctgtattttgcagaatggtaaaaaacagtaaattgttattttgatttaacaatgtttacattaataatttgacttatatttgacagttgacagttatattgtacctacttgttgttttagttctaataaattttgttggttagttacataaataaattaagtaaaaatgaaaaaatgacttgttatttgaggaaggtggaaaaaccatatgtataacatgggagtaaagtgccttttcctcccttgaatgattactgccctccgctacgcgtcgggcagtaaacttcattctcgggaggaaaagtagcactttcctcccttgttatacaaatagctatatttgtcagtcagtcttacatttatacgaaaagatgataaaaatactcttatgctttatttgaatgtctaaaagtcacgaaatgcaaagtggcaacaaacgctccagttttacagtcttttttatgactccagtggcgtagcaaaaggatattaatttacattcagtgattcgttttgaagattatattttttacgcctctttttactgaataatagttattttacaatatatatgggtctggtatcgatgaattccacaaaattagtatttactcagtgtgagttgttagctattagtaaacagttctgtatgctgttgaaatgcacgaaacatatagaaggggagatttttgggcttatttcgttatagtattttatacaataatgatgctatttgaatgtatcatataccgaactagttgatataaagaaaatacttaaaaaaatttaagagttaaatagttgaaaagcagtcaaaactttatatttctgtattaaataagatttgtgatattactaattcctagggacagtacaatttcactagttactataattccgggaatagtagaatcgaaaagagagatgtgtttagttttacacgtacgctacagggtatagaagatttatgttttacgttatgttacgctgtgatcattagccgaataaatatgttcgaagcgacaaagattccttctatgtaataatctctgccgatatatagaggatatgacccagttaacgaaagtaaacacactgagcaacgaaacattatttaaaaaatcattagaagtgcatagatttttataccgtcaatatttttcattacagcatagttttagctaatttttgcattactttacagataattacatacaacttttttcgtttgtctgcagttttactgtattcttttccaataagctacaggtctatagttcgtttcaaatgttagaatcagtatggttgtatattgcaagcaggtttgccatacttcgcttattctgtgaattgtcataaataaattgtccttttagacggagaggcagcgccgagaaatctctctgaatttgctaaggctagttttttcacagttgattaccgtgattgtagagagaaacattactgcggtcggtcaagcgaaacgtagaacaggtggta

SEQ ID NO: 993 - DNA, 1961 bp, Diabrotica virgifera
ctgttataaaaatacatataaatctaacaaatgtttggttcttatgactacgtatctaatgattagggtaaggtgggtttcaactaaataaaacttcttgtaacgtgaagttcagtatggaacggatttcaaatttagccgcaagtattaaacgaaagagctacacatgtgagtggcaacgtcgttaatcttacgacatagtagcacacgttttgttggtagttacgtttgaggttatacaaagagcaggaaagggttttttccacctacctctaccgaaagtatacttttccggacctgattgtagggagcaaagttgtacttttcctccctagggaggaaaagtaaaagtgacgtcatggtatttcattcatgaaatataacttattgacgccctgtacaatatctattttctattacgtaagtatctatacattttaacgtttatttataaaacactctgtattttgcagaatggtaaaaaacagtaaattgttattctgatttaacaatgtttacattaataatttgacttatatttgacagttgacagttatattgtacctacttgttagttttagttctaataaattttgttggttagttacataaataaattaagtaaaaatgaaaaaatgacttgttatttgaggaaggtggaaaaaccatatgtataacatgggagtaaagtgccttttcctcccttgaatgattactgccctccgctacgcgtcgggcagtaaacttcattctcgggaggaaaagtagcactttcctcccttgttatacaaatagctatatttgtcagtcagtcttacatttatacgaaaagatgataaaaatactcttatgctttatttgaatgtctaaaagtcacgaaatgcaaagtggcaacaaacgctccagttttacagtcttttttatgactccagtggcgtagcaaaaggatattaatttacattcagtgattcgttttgaagattatattttttacgcctctttttactgaataatagttattttacaatatatatgggtctggtatcgatgaattccacaaaattagtatttactcagtgtgagttgttagctattagtaaacagttctgtatgctgttgaaatgcacgaaacatatagaaggggagatttttgggcttatttcgttatagtattttatacaataatgatgctatttgaatgtatcatataccgaactagttgatataaagaaaatacttaaaaaaatttaagagttaaatagttgaaaagcagtcaaaactttatatttctgtattaaataagatttgtgatattactaattcctagggacagtacaatttcactagttactataattccgggaatagtagaatcgaaaagagagatgtgtttagttttacacgtacgctacagggtatagaagatttatgttttacgttatgttacgctgtgatcattagccgaataaatatgttcgaagcgacaaagattccttctatgtaataatctctgccgatatatagaggatatgacccagttaacgaaagtaaacacactgagcaacgaaacattatttaaaaaatcattagaagtgcatagatttttataccgtcaatatttttcattacagcatagttttagctaatttttgcattactttacagataattacatacaacttttttcgtttgtctgcagttttactgtattcttttccaataagctacaggtctatagttcgtttcaaatgttagaatcagtatggttgtatattgcaagcaggtttgccatacttcgcttattctgtgaattgtcataaataaattgtccttttagacggagaggcagcgccgagaaatctctctgaatttgctaaggctagttttttcacagttgattaccgtgattgtagagagaaacattactgcggtcggtcaagcgaaacgtagaacaggtggta

SEQ ID NO: 994 - DNA, 1726 bp, Diabrotica virgifera
ttttccacctacctctaccgaaagtatacttttccggacctgattgtagggagcaaagttgtacttttcctccctagggaggaaaatatttttcctccctagggaggaaaagtaaaagtgacgtcatggtatttcattcatgaaatataacttattgacgccctgtacaatatctattttctattacgtaagtatctatacattttaacgtttatttataaaacacctgtattttgcagaatggtaaaaaacagtaaattgttattttgatttaacaatgtttacattaataatttgacttatatttgacagttgacagttatattgtacctacttgttgttttagttctaataaattttgttggttagttacataaataaattaagtaaaaatgaaaaaatgacttgttatttgaggaaggtggaaaaaccatatgtataacatgggagtaaagtgccttttcctcccttgaatgattactgccctccgctacgcgtcgggcagtaaacttcattctcgggaggaaaagtagcactttcctcccttgttatacaaatagctatatttgtcagtcagtcttacatttatacgaaaagatgataaaaatactcttatgctttatttgaatgtctaaaagtcacgaaatgcaaagtggcaacaaacgctccagttttacagtcttttttatgactccagtggcgtagcaaaaggatattaatttacattcagtgattcgttttgaagattatattttttacgcctctttttactgaataatagttattttacaatatatatgggtctggtatcgatgaattccacaaaattagtatttactcagtgtgagttgttagctattagtaaacagttctgtatgctgttgaaatgcacgaaacatatagaaggggagatttttgggcttatttcgttatagtattttatacaataatgatgctatttgaatgtatcatataccgaactagttgatataaagaaaatacttaaaaaaatttaagagttaaatagttgaaaagcagtcaaaactttatatttctgtattaaataagatttgtgatattactaattcctagggacagtacaatttcactagttactataattccgggaatagtagaatcgaaaagagagatgtgtttagttttacacgtacgctacagggtatagaagatttatgttttacgttatgttacgctgtgatcattagccgaataaatatgttcgaagcgacaaagattccttctatgtaataatctctgccgatatatagaggatatgacccagttaacgaaagtaaacacactgagcaacgaaacattatttaaaaaatcattagaagtgcatagatttttataccgtcaatatttttcattacagcatagttttagctaatttttgcattactttacagataattacatacaacttttttcgtttgtctgcagttttactgtattcttttccaataagctacaggtctatagttcgtttcaaatgttagaatcagtatggttgtatattgcaagcaggtttgccatacttcgcttattctgtgaattgtcataaataaattgtccttttagacggagaggcagcgccgagaaatctctctgaatttgctaaggctagttttttcacagttgattaccgtgattgtagagagaaacattactgcggtcggtcaagcgaaacgtagaacaggtggta

SEQ ID NO: 995 - DNA, 1740 bp, Diabrotica virgifera
ctgttataaaaatacatataaatctaacaaatgtttggttcttatgactacgtatctaatgattagggtaaggtgggtttcaactaaataaaacttcttgtaacgtgaagttcagtatggaacggatttcaaatttagccgcaagtattaaacgaaagagctacacatgtgagtggcaacgtcgttaatcttacgacatagtagcacacgttttgttggtagttacgtttgaggttatacaaagagcaggaaagggttttttccacctacctctaccgaaagtatacttttccggacctgattgtagggagcaaagttgtacttttcctccctagggaggaaaagtaaaagtgacgtcatggtatttcattcatgaaatataacttattgacgccctgtacaatatctattttctattacgtaagtatctatacattttaacgtttatttataaaacaccctgtattttgcagaatggtaaaaaactagtaaattgttattttgatttaacaatgtttacattaataatttgacttatatttgacagttgacagttatattgtacctacttgttagttttagttttaataaattttgttggttagttacataaataaagtaaaaatgaaaaaatgacttgttatttgaggaaggtggaaaaaccatatgtataacatgggagtagtaaagtgccttttcctcccttgaatgatttcctcgggaggaaaagtagcactttcctcccttgttatacaaatagctatttctttgatttgtatagccttataaattgtacagattatattcgtagatatattatataattcgtaaatatttttttttttcgattatagcgccatctattgataactagaataaatgttataaatgttaccgacgaaatgtaatcaccgacgtgcgttttttttttctgtcacatacaatttaatgcgttagaaaagaaatcgaaaaactgtgacgcactgaaaggtgctcataagaaaaagaataaagatgtcttctgagtggtaatttctgaggaagccacactttggctaaatatgttattcgtaagtcaatataactccgaatgagacaactgaggctctgttatgaatcaaaacgtagaaacactagaacaatggactaaaagttactgtaaggggtaaaaatgaactagaataactaataaaatctcaaacaatgctacaaaattggaatacaaacgccaataggtcgttaacaaaaaaaaaccgactaagaattaagaataaacctttaaactatagtaatacatacagtttttaggttatgttaggttaaaaatagctgtagcgttaattattgttcaaaaaataaagttttcgttatggagcgtaagacactacatacattatgtaacatgaatcaatctcaacaaccagaatccgaaatttaaccactatatttttgatttttttaaacatatgctttgtgttgtacataacagtgaacacttctataaaaacccgtccacaaactaccatacaaaatcagtgataacaatttgagacattccagtcatataccttaaatttgtacgatttttaaattccgaaaatattgtcaacaattatcactttatatttcctagaatggaaaaattaaagctgcccttttctggtgactgaggcactggtagacttaaactctaagaaaaaaacaaatggactacaaaagttacatggttggatggagata

SEQ ID NO: 996 - DNA, 1703 bp, Diabrotica virgifera
ttttccacctacctctaccgaaagtatacttttccggacctgattgtagggagcaaagttgtacttttcctccctagggaggaaaagtaaaagtgacgtcatggtatttcattcatgaaatataacttattgacgccctgtacaatatctattttctattacgtaagtatctatacattttaacgtttatttataaaacactctgtattttgcagaatggtaaaaaacagtaaattgttattctgatttaacaatgtttacattaataatttgacttatatttgacagttgacagttatattgtacctacttgttagttttagttctaataaattttgttggttagttacataaataaattaagtaaaaatgaaaaaatgacttgttatttgaggaaggtggaaaaaccatatgtataacatgggagtaaagtgccttttcctcccttgaatgattactgccctccgctacgcgtcgggcagtaaacttcattctcgggaggaaaagtagcactttcctcccttgttatacaaatagctatatttgtcagtcagtcttacatttatacgaaaagatgataaaaatactcttatgctttatttgaatgtctaaaagtcacgaaatgcaaagtggcaacaaacgctccagttttacagtcttttttatgactccagtggcgtagcaaaaggatattaatttacattcagtgattcgttttgaagattatattttttacgcctctttttactgaataatagttattttacaatatatatgggtctggtatcgatgaattccacaaaattagtatttactcagtgtgagttgttagctattagtaaacagttctgtatgctgttgaaatgcacgaaacatatagaaggggagatttttgggcttatttcgttatagtattttatacaataatgatgctatttgaatgtatcatataccgaactagttgatataaagaaaatacttaaaaaaatttaagagttaaatagttgaaaagcagtcaaaactttatatttctgtattaaataagatttgtgatattactaattcctagggacagtacaatttcactagttactataattccgggaatagtagaatcgaaaagagagatgtgtttagttttacacgtacgctacagggtatagaagatttatgttttacgttatgttacgctgtgatcattagccgaataaatatgttcgaagcgacaaagattccttctatgtaataatctctgccgatatatagaggatatgacccagttaacgaaagtaaacacactgagcaacgaaacattatttaaaaaatcattagaagtgcatagatttttataccgtcaatatttttcattacagcatagttttagctaatttttgcattactttacagataattacatacaacttttttcgtttgtctgcagttttactgtattcttttccaataagctacaggtctatagttcgtttcaaatgttagaatcagtatggttgtatattgcaagcaggtttgccatacttcgcttattctgtgaattgtcataaataaattgtccttttagacggagaggcagcgccgagaaatctctctgaatttgctaaggctagttttttcacagttgattaccgtgattgtagagagaaacattactgcggtcggtcaagcgaaacgtagaacaggtggta

SEQ ID NO: 997 - DNA, 1482 bp, Diabrotica virgifera
ttttccacctacctctaccgaaagtatacttttccggacctgattgtagggagcaaagttgtacttttcctccctagggaggaaaagtaaaagtgacgtcatggtatttcattcatgaaatataacttattgacgccctgtacaatatctattttctattacgtaagtatctatacattttaacgtttatttataaaacaccctgtattttgcagaatggtaaaaaactagtaaattgttattttgatttaacaatgtttacattaataatttgacttatatttgacagttgacagttatattgtacctacttgttagttttagttttaataaattttgttggttagttacataaataaagtaaaaatgaaaaaatgacttgttatttgaggaaggtggaaaaaccatatgtataacatgggagtagtaaagtgccttttcctcccttgaatgatttcctcgggaggaaaagtagcactttcctcccttgttatacaaatagctatttctttgatttgtatagccttataaattgtacagattatattcgtagatatattatataattcgtaaatatttttttttttcgattatagcgccatctattgataactagaataaatgttataaatgttaccgacgaaatgtaatcaccgacgtgcgttttttttttctgtcacatacaatttaatgcgttagaaaagaaatcgaaaaactgtgacgcactgaaaggtgctcataagaaaaagaataaagatgtcttctgagtggtaatttctgaggaagccacactttggctaaatatgttattcgtaagtcaatataactccgaatgagacaactgaggctctgttatgaatcaaaacgtagaaacactagaacaatggactaaaagttactgtaaggggtaaaaatgaactagaataactaataaaatctcaaacaatgctacaaaattggaatacaaacgccaataggtcgttaacaaaaaaaaaccgactaagaattaagaataaacctttaaactatagtaatacatacagtttttaggttatgttaggttaaaaatagctgtagcgttaattattgttcaaaaaataaagttttcgttatggagcgtaagacactacatacattatgtaacatgaatcaatctcaacaaccagaatccgaaatttaaccactatatttttgatttttttaaacatatgctttgtgttgtacataacagtgaacacttctataaaaacccgtccacaaactaccatacaaaatcagtgataacaatttgagacattccagtcatataccttaaatttgtacgatttttaaattccgaaaatattgtcaacaattatcactttatatttcctagaatggaaaaattaaagctgcccttttctggtgactgaggcactggtagacttaaactctaagaaaaaaacaaatggactacaaaagttacatggttggatggagata

SEQ ID NO: 998 - DNA, 826 bp, Diabrotica virgifera
ctgttataaaaatacatataaatctaacaaatgtttggttcttatgactacgtatctaatgattagggtaaggtgggtttcaactaaataaaacttcttgtaacgtgaagttcagtatggaacggatttcaaatttagccgcaagtattaaacgaaagagctacacatgtgagtggcaacgtcgttaatcttacgacatagtagcacacgttttgttggtagttacgtttgaggttatacaaagagcaggaaagggttttttccacctacctctaccgaaagtatacttttccggacctgattgtagggagcaaagttgtacttttcctccctagggaggaaaatatttttcctccctagggaggaaaagtaaaagtgacgtcatggtatttcattcatgaaatataacttattgacgccctgtacaatatctattttctattacgtaagtatctatacattttaacgtttatttataaaacacctgtattttgcagaatggtaaaaaacagtaaattgttattttgatttaacaatgtttacattaataatttgacttatatttgacagttgacagttatattgtacctacttgttgttttagttctaataaattttgttggttagttacataaataaattaagtaaaaatgaaaaaatgacttgttatttgaggaaggtggaaaaaccatatgtataacatgggagtaaagtgccttttcctcccttgaatgattactgccctccgctacgcgtcgggcagtaaacttcattctcgggaggaaaagtagcactttcctcccttgttatacaaatagctatattt

SEQ ID NO: 999 - DNA, 4733 bp, Diabrotica virgifera
  SmartBlast Evalue=5E-29; Info=E3 ubiquitin-protein ligase SIAH1 n=4 Tax=Apocrita RepID=E2BIC8_9HYME
gtgttcccgtctttatcttaacccacactcccattatcgataaccatggtattttgccggacgaatggggagcaatgataggatgaccagggcgaagccgtaaagttattcctgcatctgagaagctctttttaaaagttaaggcgtgaagacgttaaatcgtatgtgtacacatcgctcgtttgctggtttgtcgattgcttttatccgacatggttgtatttaaaatttttcggtgttctagttctattgttccctcgaaaccctcgaagaggctctccgtctagctgtttgtttgctggtacggtaacgacattatgccttctccccgctgatgttggccgttcagctgtcggtgttataacattaagaattggacttcaccaatatcagaccaataccaatggcttagagtatattatacgtttgtttttatttattaaatcgtacaatattactaaagcgttgattcgtagactaaaaccttgttttcgctccatgtacagttcgacaagtcgaaaactggcgcctcaagtcaagtttttgtagaataaatgtggcaaatgaaataaatttttcaagcaaagcctgcataaatacgaacaattgttatttttagttgatacacaatttaacatatagaaattcaatgctaaatcacaaaaagcttcataaaaatcagtgttttacatgtttttactcaaatcagttataatttaataaaaaactgcatctatcttcaattaaacgatctccagataaaaattattcaacaaatagattttttgcaagcaaaatttgtcaaaaaaactgatgttactgctatgacagtatttaatttggagttgacctatcttgtctcaaaagtcgccaaattcttaattggatttagatctaggtgataaggtggaagctttcatggtaaagtcatggccctgatcttaaacatcttcaacataatcagtatcttctgagttatctccaaatgcaccaaatacaccaatacaaatataattttggcaaatacttttgtccactcttgcacagcttaaattgataaaaaactcatcagataaagctgtaacatcgtggaatctgaagttggcatattttacttggaaagctgtccaattttcaattggatgtaaatctgggtaataaggtgcaagtcttcatgttaaaatcatcacagacatcttccaaacaaaatcaatatcttgtgcgtcatttcctaagtcaattaattttgatccaaaaatgcattaaatactttttttttggacagaaactgtcttcaagagtttggcaaatactttttccatgtaactaatttgtcaaaaagttgatcagataaaactgaaagctgaaagaagctcagaccaaatctaaattcatttaacgttagatctgggtgacaaggtggacgtttcatggtaaaaatttaaaactggtacatatttctaagttttagaactcgcttgttagtttttaataaaaaacaacatttacaaaacaattaaaacaaaaaagtatttttccacctacctctaccgaaagtatacttttccggacctgattgtagggagcaaagttgtacttttcctccctagggaggaaaatatttttcctccctagggaggaaaagtaaaagtgacgtcatggtatttcattcatgaaatataacttattgacgccctgtacaatatctattttctattacgtaagtatctatacattttaacgtttatttataaaacacctgtattttgcagaatggtaaaaaacagtaaattgttattttgatttaacaatgtttacattaataatttgacttatatttgacagttgacagttatattgtacctacttgttgttttagttctaataaattttgttggttagttacataaataaattaagtaaaaatgaaaaaatgacttgttatttgaggaaggtggaaaaaccatatgtataacatgggagtaaagtgccttttcctcccttgaatgattactgccctccgctacgcgtcgggcagtaaacttcattctcgggaggaaaagtagcactttcctcccttgttatacaaatagctatttccaaggcttgtcatgtatcgcttactgcattttaatttttattgaatattttcggttagtattgcagaaatttgaattgatttgatacatttatgttttctcgttatattttgttagtaattaaaagatgcgcacttgccccagagatttatcacatgaggcaagtgcgttttttgtgtcaggtagagatggtcagaaattacgcccgaaagacggagagaggtttgctctattcagcagaagcccttaacagtgccttaagggatataagaaatcagaatttcactgtcaagggagcatcgtccttatacagtgccccagtgacaaaattatgggatcacttaagtggaagaacaggtgcgaaggtatcagaacaaggtcgatatactgatattccattcgcagaagaaaagcaatcttatcttaatttatatacaacataaattaagataaattgtacaatttttgcccttaaattaagtaatttttcattttgtggcgagttagtcgacccttctgaagttattattttgtttttaacattatgcttattattaatttttttttcagaactgtgtgccgaaaaacctagcaactaagtacacttaccccgtaatgcaattcaaggaaaatatataaaactacgcccagaagacgcagttacctcaaactgacggggcaagtgcgctatggcgatatgtaaggaaaaaaatcatgactactaatcgtgaaatgtcacaagatttgggatcttttttaaataaagctcattgtcaaagtacttcgtgcacgtacctcgatttggcagaagtaatccaattgaagcagtgatacaattaaaatcaaatatgaataaaagggtgtgccccaccttaccctaatgaaacaagaaatggaatatcatggttagttattctagtatctaatggttaacaaatacaaaatgcttaaatctaatggataacaaatacaaaaataaaatacaaacttaaaaatatttagcctttgacgattctgattcgtaagttaatagtatcagaataaaaaccaataatttgttcaagataaattttaacacatttgccatccttgaagcgttcatctgcagatgaaattgctgaaactaaacccacattaaagcattttctctttaatccacctaaatcgattacatcggcctcaaatctatactctttagcatctgtggatcgtccaattatcctgacagacaaataaagcttttgctcgtcatacttataatcaaattggaaaatcttcttgtcatatttgattacataacaactcttcgtgtcttttttattaaaaggtatagtgacttgatcggattttaaaacgacttcattgtgattattatcgatatggtcaagtactctggaatgactgccttgccagtcacagttggtggtgtcttttagcgggcaaatgaatggtccaaattcacagcaagtttcatgatctcgtatttcagttgaaatgcaggaatacgtacagccagctttatgatacttacaaggatacgttaaatgctctgtcattttttctagagtaaagttcctggtatcatggacaggtactttgcaaagaccacaaatttcaacttttttcttacatggttcacagtaactatggccgttggcgcattggtatataggtggaagcatataatctaaacaaacaggacactccaaattcgcaagaagtgcccagatgatatttggattttgtttaatatcagctttttcttctattggaatttcttctacttttgttgtaggctcctctgccttcactatttcaatagttacggtgacagagtctggatcttgaagtttttgtttaacattttcaattgttaaatgagtagtatttagccgttgttcactgcttgtatttttctgagcgcatgtaaagaaaaagtttttattgccgctgacaatccttaagaaatagttaaaggtatcagatttttcggtgacatttatatgttcaacagagcaggagaatacacctttcctggcatcaacttcttttttaacattaaatacttcattgccaaagggaagaagtagacattcttctatggagcaaagaaaattaatttcaaagctaggctctttcagcaacagagttgaatgatcagtggagaaatgtttgacaatgtcagtacgaggtcctgtccaagtgcaattggaataatttttagatggacaatcgaacattctaaattcgcagaacagttcatgttgctcgagtatagccggcacaaggttatctttacaaccagacttagcaaatctacacgcaaatggaaaaaattgagctatactttcataggcttcatctcgcacaaacatgtcgtcctctcctattttacatctaccacatacggcgccggtaccatcatttttggtgtaagttggaaacacagaaagataattgcggcatcttatgcacacaagtgttttcaatacatcagctggtataggtaagcttgacgtcatgtttaccctcttttttgtattaatcaccaaatattaagtaattgtttttttcaacacaattttttaattattattctccaacttgatgaaacatgaaaattgaaaagacaaa

SEQ ID NO: 1000 - DNA, 803 bp, Diabrotica virgifera
ctgttataaaaatacatataaatctaacaaatgtttggttcttatgactacgtatctaatgattagggtaaggtgggtttcaactaaataaaacttcttgtaacgtgaagttcagtatggaacggatttcaaatttagccgcaagtattaaacgaaagagctacacatgtgagtggcaacgtcgttaatcttacgacatagtagcacacgttttgttggtagttacgtttgaggttatacaaagagcaggaaagggttttttccacctacctctaccgaaagtatacttttccggacctgattgtagggagcaaagttgtacttttcctccctagggaggaaaagtaaaagtgacgtcatggtatttcattcatgaaatataacttattgacgccctgtacaatatctattttctattacgtaagtatctatacattttaacgtttatttataaaacactctgtattttgcagaatggtaaaaaacagtaaattgttattctgatttaacaatgtttacattaataatttgacttatatttgacagttgacagttatattgtacctacttgttagttttagttctaataaattttgttggttagttacataaataaattaagtaaaaatgaaaaaatgacttgttatttgaggaaggtggaaaaaccatatgtataacatgggagtaaagtgccttttcctcccttgaatgattactgccctccgctacgcgtcgggcagtaaacttcattctcgggaggaaaagtagcactttcctcccttgttatacaaatagctatattt

SEQ ID NO: 1001 - DNA, 4710 bp, Diabrotica virgifera
  SmartBlast Evalue=5E-29; Info=E3 ubiquitin-protein ligase SIAH1 n=4 Tax=Apocrita RepID=E2BIC8_9HYME
gtgttcccgtctttatcttaacccacactcccattatcgataaccatggtattttgccggacgaatggggagcaatgataggatgaccagggcgaagccgtaaagttattcctgcatctgagaagctctttttaaaagttaaggcgtgaagacgttaaatcgtatgtgtacacatcgctcgtttgctggtttgtcgattgcttttatccgacatggttgtatttaaaatttttcggtgttctagttctattgttccctcgaaaccctcgaagaggctctccgtctagctgtttgtttgctggtacggtaacgacattatgccttctccccgctgatgttggccgttcagctgtcggtgttataacattaagaattggacttcaccaatatcagaccaataccaatggcttagagtatattatacgtttgtttttatttattaaatcgtacaatattactaaagcgttgattcgtagactaaaaccttgttttcgctccatgtacagttcgacaagtcgaaaactggcgcctcaagtcaagtttttgtagaataaatgtggcaaatgaaataaatttttcaagcaaagcctgcataaatacgaacaattgttatttttagttgatacacaatttaacatatagaaattcaatgctaaatcacaaaaagcttcataaaaatcagtgttttacatgtttttactcaaatcagttataatttaataaaaaactgcatctatcttcaattaaacgatctccagataaaaattattcaacaaatagattttttgcaagcaaaatttgtcaaaaaaactgatgttactgctatgacagtatttaatttggagttgacctatcttgtctcaaaagtcgccaaattcttaattggatttagatctaggtgataaggtggaagctttcatggtaaagtcatggccctgatcttaaacatcttcaacataatcagtatcttctgagttatctccaaatgcaccaaatacaccaatacaaatataattttggcaaatacttttgtccactcttgcacagcttaaattgataaaaaactcatcagataaagctgtaacatcgtggaatctgaagttggcatattttacttggaaagctgtccaattttcaattggatgtaaatctgggtaataaggtgcaagtcttcatgttaaaatcatcacagacatcttccaaacaaaatcaatatcttgtgcgtcatttcctaagtcaattaattttgatccaaaaatgcattaaatactttttttttggacagaaactgtcttcaagagtttggcaaatactttttccatgtaactaatttgtcaaaaagttgatcagataaaactgaaagctgaaagaagctcagaccaaatctaaattcatttaacgttagatctgggtgacaaggtggacgtttcatggtaaaaatttaaaactggtacatatttctaagttttagaactcgcttgttagtttttaataaaaaacaacatttacaaaacaattaaaacaaaaaagtatttttccacctacctctaccgaaagtatacttttccggacctgattgtagggagcaaagttgtacttttcctccctagggaggaaaagtaaaagtgacgtcatggtatttcattcatgaaatataacttattgacgccctgtacaatatctattttctattacgtaagtatctatacattttaacgtttatttataaaacactctgtattttgcagaatggtaaaaaacagtaaattgttattctgatttaacaatgtttacattaataatttgacttatatttgacagttgacagttatattgtacctacttgttagttttagttctaataaattttgttggttagttacataaataaattaagtaaaaatgaaaaaatgacttgttatttgaggaaggtggaaaaaccatatgtataacatgggagtaaagtgccttttcctcccttgaatgattactgccctccgctacgcgtcgggcagtaaacttcattctcgggaggaaaagtagcactttcctcccttgttatacaaatagctatttccaaggcttgtcatgtatcgcttactgcattttaatttttattgaatattttcggttagtattgcagaaatttgaattgatttgatacatttatgttttctcgttatattttgttagtaattaaaagatgcgcacttgccccagagatttatcacatgaggcaagtgcgttttttgtgtcaggtagagatggtcagaaattacgcccgaaagacggagagaggtttgctctattcagcagaagcccttaacagtgccttaagggatataagaaatcagaatttcactgtcaagggagcatcgtccttatacagtgccccagtgacaaaattatgggatcacttaagtggaagaacaggtgcgaaggtatcagaacaaggtcgatatactgatattccattcgcagaagaaaagcaatcttatcttaatttatatacaacataaattaagataaattgtacaatttttgcccttaaattaagtaatttttcattttgtggcgagttagtcgacccttctgaagttattattttgtttttaacattatgcttattattaatttttttttcagaactgtgtgccgaaaaacctagcaactaagtacacttaccccgtaatgcaattcaaggaaaatatataaaactacgcccagaagacgcagttacctcaaactgacggggcaagtgcgctatggcgatatgtaaggaaaaaaatcatgactactaatcgtgaaatgtcacaagatttgggatcttttttaaataaagctcattgtcaaagtacttcgtgcacgtacctcgatttggcagaagtaatccaattgaagcagtgatacaattaaaatcaaatatgaataaaagggtgtgccccaccttaccctaatgaaacaagaaatggaatatcatggttagttattctagtatctaatggttaacaaatacaaaatgcttaaatctaatggataacaaatacaaaaataaaatacaaacttaaaaatatttagcctttgacgattctgattcgtaagttaatagtatcagaataaaaaccaataatttgttcaagataaattttaacacatttgccatccttgaagcgttcatctgcagatgaaattgctgaaactaaacccacattaaagcattttctctttaatccacctaaatcgattacatcggcctcaaatctatactctttagcatctgtggatcgtccaattatcctgacagacaaataaagcttttgctcgtcatacttataatcaaattggaaaatcttcttgtcatatttgattacataacaactcttcgtgtcttttttattaaaaggtatagtgacttgatcggattttaaaacgacttcattgtgattattatcgatatggtcaagtactctggaatgactgccttgccagtcacagttggtggtgtcttttagcgggcaaatgaatggtccaaattcacagcaagtttcatgatctcgtatttcagttgaaatgcaggaatacgtacagccagctttatgatacttacaaggatacgttaaatgctctgtcattttttctagagtaaagttcctggtatcatggacaggtactttgcaaagaccacaaatttcaacttttttcttacatggttcacagtaactatggccgttggcgcattggtatataggtggaagcatataatctaaacaaacaggacactccaaattcgcaagaagtgcccagatgatatttggattttgtttaatatcagctttttcttctattggaatttcttctacttttgttgtaggctcctctgccttcactatttcaatagttacggtgacagagtctggatcttgaagtttttgtttaacattttcaattgttaaatgagtagtatttagccgttgttcactgcttgtatttttctgagcgcatgtaaagaaaaagtttttattgccgctgacaatccttaagaaatagttaaaggtatcagatttttcggtgacatttatatgttcaacagagcaggagaatacacctttcctggcatcaacttcttttttaacattaaatacttcattgccaaagggaagaagtagacattcttctatggagcaaagaaaattaatttcaaagctaggctctttcagcaacagagttgaatgatcagtggagaaatgtttgacaatgtcagtacgaggtcctgtccaagtgcaattggaataatttttagatggacaatcgaacattctaaattcgcagaacagttcatgttgctcgagtatagccggcacaaggttatctttacaaccagacttagcaaatctacacgcaaatggaaaaaattgagctatactttcataggcttcatctcgcacaaacatgtcgtcctctcctattttacatctaccacatacggcgccggtaccatcatttttggtgtaagttggaaacacagaaagataattgcggcatcttatgcacacaagtgttttcaatacatcagctggtataggtaagcttgacgtcatgtttaccctcttttttgtattaatcaccaaatattaagtaattgtttttttcaacacaattttttaattattattctccaacttgatgaaacatgaaaattgaaaagacaaa

SEQ ID NO: 1002 - DNA, 4681 bp, Diabrotica virgifera
  SmartBlast Evalue=5E-29; Info=E3 ubiquitin-protein ligase SIAH1 n=4 Tax=Apocrita RepID=E2BIC8_9HYME
gtaaactatgttacaaccaactgtagttaaaaaagtaataatttataaaattcaaattacggggtgtctctaattttatgctcggcagtgtataagaacataacctaaaaggctcatttcagttatatatttattaatttatcgattgcttttatccgacatggttgtatttaaaatttttcggtgttctagttctattgttccctcgaaaccctcgaagaggctctccgtctagctgtttgtttgctggtacggtaacgacattatgccttctccccgctgatgttggccgttcagctgtcggtgttataacattaagaattggacttcaccaatatcagaccaataccaatggcttagagtatattatacgtttgtttttatttattaaatcgtacaatattactaaagcgttgattcgtagactaaaaccttgttttcgctccatgtacagttcgacaagtcgaaaactggcgcctcaagtcaagtttttgtagaataaatgtggcaaatgaaataaatttttcaagcaaagcctgcataaatacgaacaattgttatttttagttgatacacaatttaacatatagaaattcaatgctaaatcacaaaaagcttcataaaaatcagtgttttacatgtttttactcaaatcagttataatttaataaaaaactgcatctatcttcaattaaacgatctccagataaaaattattcaacaaatagattttttgcaagcaaaatttgtcaaaaaaactgatgttactgctatgacagtatttaatttggagttgacctatcttgtctcaaaagtcgccaaattcttaattggatttagatctaggtgataaggtggaagctttcatggtaaagtcatggccctgatcttaaacatcttcaacataatcagtatcttctgagttatctccaaatgcaccaaatacaccaatacaaatataattttggcaaatacttttgtccactcttgcacagcttaaattgataaaaaactcatcagataaagctgtaacatcgtggaatctgaagttggcatattttacttggaaagctgtccaattttcaattggatgtaaatctgggtaataaggtgcaagtcttcatgttaaaatcatcacagacatcttccaaacaaaatcaatatcttgtgcgtcatttcctaagtcaattaattttgatccaaaaatgcattaaatactttttttttggacagaaactgtcttcaagagtttggcaaatactttttccatgtaactaatttgtcaaaaagttgatcagataaaactgaaagctgaaagaagctcagaccaaatctaaattcatttaacgttagatctgggtgacaaggtggacgtttcatggtaaaaatttaaaactggtacatatttctaagttttagaactcgcttgttagtttttaataaaaaacaacatttacaaaacaattaaaacaaaaaagtatttttccacctacctctaccgaaagtatacttttccggacctgattgtagggagcaaagttgtacttttcctccctagggaggaaaatatttttcctccctagggaggaaaagtaaaagtgacgtcatggtatttcattcatgaaatataacttattgacgccctgtacaatatctattttctattacgtaagtatctatacattttaacgtttatttataaaacacctgtattttgcagaatggtaaaaaacagtaaattgttattttgatttaacaatgtttacattaataatttgacttatatttgacagttgacagttatattgtacctacttgttgttttagttctaataaattttgttggttagttacataaataaattaagtaaaaatgaaaaaatgacttgttatttgaggaaggtggaaaaaccatatgtataacatgggagtaaagtgccttttcctcccttgaatgattactgccctccgctacgcgtcgggcagtaaacttcattctcgggaggaaaagtagcactttcctcccttgttatacaaatagctatttccaaggcttgtcatgtatcgcttactgcattttaatttttattgaatattttcggttagtattgcagaaatttgaattgatttgatacatttatgttttctcgttatattttgttagtaattaaaagatgcgcacttgccccagagatttatcacatgaggcaagtgcgttttttgtgtcaggtagagatggtcagaaattacgcccgaaagacggagagaggtttgctctattcagcagaagcccttaacagtgccttaagggatataagaaatcagaatttcactgtcaagggagcatcgtccttatacagtgccccagtgacaaaattatgggatcacttaagtggaagaacaggtgcgaaggtatcagaacaaggtcgatatactgatattccattcgcagaagaaaagcaatcttatcttaatttatatacaacataaattaagataaattgtacaatttttgcccttaaattaagtaatttttcattttgtggcgagttagtcgacccttctgaagttattattttgtttttaacattatgcttattattaatttttttttcagaactgtgtgccgaaaaacctagcaactaagtacacttaccccgtaatgcaattcaaggaaaatatataaaactacgcccagaagacgcagttacctcaaactgacggggcaagtgcgctatggcgatatgtaaggaaaaaaatcatgactactaatcgtgaaatgtcacaagatttgggatcttttttaaataaagctcattgtcaaagtacttcgtgcacgtacctcgatttggcagaagtaatccaattgaagcagtgatacaattaaaatcaaatatgaataaaagggtgtgccccaccttaccctaatgaaacaagaaatggaatatcatggttagttattctagtatctaatggttaacaaatacaaaatgcttaaatctaatggataacaaatacaaaaataaaatacaaacttaaaaatatttagcctttgacgattctgattcgtaagttaatagtatcagaataaaaaccaataatttgttcaagataaattttaacacatttgccatccttgaagcgttcatctgcagatgaaattgctgaaactaaacccacattaaagcattttctctttaatccacctaaatcgattacatcggcctcaaatctatactctttagcatctgtggatcgtccaattatcctgacagacaaataaagcttttgctcgtcatacttataatcaaattggaaaatcttcttgtcatatttgattacataacaactcttcgtgtcttttttattaaaaggtatagtgacttgatcggattttaaaacgacttcattgtgattattatcgatatggtcaagtactctggaatgactgccttgccagtcacagttggtggtgtcttttagcgggcaaatgaatggtccaaattcacagcaagtttcatgatctcgtatttcagttgaaatgcaggaatacgtacagccagctttatgatacttacaaggatacgttaaatgctctgtcattttttctagagtaaagttcctggtatcatggacaggtactttgcaaagaccacaaatttcaacttttttcttacatggttcacagtaactatggccgttggcgcattggtatataggtggaagcatataatctaaacaaacaggacactccaaattcgcaagaagtgcccagatgatatttggattttgtttaatatcagctttttcttctattggaatttcttctacttttgttgtaggctcctctgccttcactatttcaatagttacggtgacagagtctggatcttgaagtttttgtttaacattttcaattgttaaatgagtagtatttagccgttgttcactgcttgtatttttctgagcgcatgtaaagaaaaagtttttattgccgctgacaatccttaagaaatagttaaaggtatcagatttttcggtgacatttatatgttcaacagagcaggagaatacacctttcctggcatcaacttcttttttaacattaaatacttcattgccaaagggaagaagtagacattcttctatggagcaaagaaaattaatttcaaagctaggctctttcagcaacagagttgaatgatcagtggagaaatgtttgacaatgtcagtacgaggtcctgtccaagtgcaattggaataatttttagatggacaatcgaacattctaaattcgcagaacagttcatgttgctcgagtatagccggcacaaggttatctttacaaccagacttagcaaatctacacgcaaatggaaaaaattgagctatactttcataggcttcatctcgcacaaacatgtcgtcctctcctattttacatctaccacatacggcgccggtaccatcatttttggtgtaagttggaaacacagaaagataattgcggcatcttatgcacacaagtgttttcaatacatcagctggtataggtaagcttgacgtcatgtttaccctcttttttgtattaatcaccaaatattaagtaattgtttttttcaacacaattttttaattattattctccaacttgatgaaacatgaaaattgaaaagacaaa

SEQ ID NO: 1003 - DNA, 4658 bp, Diabrotica virgifera
  SmartBlast Evalue=5E-29; Info=E3 ubiquitin-protein ligase SIAH1 n=4 Tax=Apocrita RepID=E2BIC8_9HYME
gtaaactatgttacaaccaactgtagttaaaaaagtaataatttataaaattcaaattacggggtgtctctaattttatgctcggcagtgtataagaacataacctaaaaggctcatttcagttatatatttattaatttatcgattgcttttatccgacatggttgtatttaaaatttttcggtgttctagttctattgttccctcgaaaccctcgaagaggctctccgtctagctgtttgtttgctggtacggtaacgacattatgccttctccccgctgatgttggccgttcagctgtcggtgttataacattaagaattggacttcaccaatatcagaccaataccaatggcttagagtatattatacgtttgtttttatttattaaatcgtacaatattactaaagcgttgattcgtagactaaaaccttgttttcgctccatgtacagttcgacaagtcgaaaactggcgcctcaagtcaagtttttgtagaataaatgtggcaaatgaaataaatttttcaagcaaagcctgcataaatacgaacaattgttatttttagttgatacacaatttaacatatagaaattcaatgctaaatcacaaaaagcttcataaaaatcagtgttttacatgtttttactcaaatcagttataatttaataaaaaactgcatctatcttcaattaaacgatctccagataaaaattattcaacaaatagattttttgcaagcaaaatttgtcaaaaaaactgatgttactgctatgacagtatttaatttggagttgacctatcttgtctcaaaagtcgccaaattcttaattggatttagatctaggtgataaggtggaagctttcatggtaaagtcatggccctgatcttaaacatcttcaacataatcagtatcttctgagttatctccaaatgcaccaaatacaccaatacaaatataattttggcaaatacttttgtccactcttgcacagcttaaattgataaaaaactcatcagataaagctgtaacatcgtggaatctgaagttggcatattttacttggaaagctgtccaattttcaattggatgtaaatctgggtaataaggtgcaagtcttcatgttaaaatcatcacagacatcttccaaacaaaatcaatatcttgtgcgtcatttcctaagtcaattaattttgatccaaaaatgcattaaatactttttttttggacagaaactgtcttcaagagtttggcaaatactttttccatgtaactaatttgtcaaaaagttgatcagataaaactgaaagctgaaagaagctcagaccaaatctaaattcatttaacgttagatctgggtgacaaggtggacgtttcatggtaaaaatttaaaactggtacatatttctaagttttagaactcgcttgttagtttttaataaaaaacaacatttacaaaacaattaaaacaaaaaagtatttttccacctacctctaccgaaagtatacttttccggacctgattgtagggagcaaagttgtacttttcctccctagggaggaaaagtaaaagtgacgtcatggtatttcattcatgaaatataacttattgacgccctgtacaatatctattttctattacgtaagtatctatacattttaacgtttatttataaaacactctgtattttgcagaatggtaaaaaacagtaaattgttattctgatttaacaatgtttacattaataatttgacttatatttgacagttgacagttatattgtacctacttgttagttttagttctaataaattttgttggttagttacataaataaattaagtaaaaatgaaaaaatgacttgttatttgaggaaggtggaaaaaccatatgtataacatgggagtaaagtgccttttcctcccttgaatgattactgccctccgctacgcgtcgggcagtaaacttcattctcgggaggaaaagtagcactttcctcccttgttatacaaatagctatttccaaggcttgtcatgtatcgcttactgcattttaatttttattgaatattttcggttagtattgcagaaatttgaattgatttgatacatttatgttttctcgttatattttgttagtaattaaaagatgcgcacttgccccagagatttatcacatgaggcaagtgcgttttttgtgtcaggtagagatggtcagaaattacgcccgaaagacggagagaggtttgctctattcagcagaagcccttaacagtgccttaagggatataagaaatcagaatttcactgtcaagggagcatcgtccttatacagtgccccagtgacaaaattatgggatcacttaagtggaagaacaggtgcgaaggtatcagaacaaggtcgatatactgatattccattcgcagaagaaaagcaatcttatcttaatttatatacaacataaattaagataaattgtacaatttttgcccttaaattaagtaatttttcattttgtggcgagttagtcgacccttctgaagttattattttgtttttaacattatgcttattattaatttttttttcagaactgtgtgccgaaaaacctagcaactaagtacacttaccccgtaatgcaattcaaggaaaatatataaaactacgcccagaagacgcagttacctcaaactgacggggcaagtgcgctatggcgatatgtaaggaaaaaaatcatgactactaatcgtgaaatgtcacaagatttgggatcttttttaaataaagctcattgtcaaagtacttcgtgcacgtacctcgatttggcagaagtaatccaattgaagcagtgatacaattaaaatcaaatatgaataaaagggtgtgccccaccttaccctaatgaaacaagaaatggaatatcatggttagttattctagtatctaatggttaacaaatacaaaatgcttaaatctaatggataacaaatacaaaaataaaatacaaacttaaaaatatttagcctttgacgattctgattcgtaagttaatagtatcagaataaaaaccaataatttgttcaagataaattttaacacatttgccatccttgaagcgttcatctgcagatgaaattgctgaaactaaacccacattaaagcattttctctttaatccacctaaatcgattacatcggcctcaaatctatactctttagcatctgtggatcgtccaattatcctgacagacaaataaagcttttgctcgtcatacttataatcaaattggaaaatcttcttgtcatatttgattacataacaactcttcgtgtcttttttattaaaaggtatagtgacttgatcggattttaaaacgacttcattgtgattattatcgatatggtcaagtactctggaatgactgccttgccagtcacagttggtggtgtcttttagcgggcaaatgaatggtccaaattcacagcaagtttcatgatctcgtatttcagttgaaatgcaggaatacgtacagccagctttatgatacttacaaggatacgttaaatgctctgtcattttttctagagtaaagttcctggtatcatggacaggtactttgcaaagaccacaaatttcaacttttttcttacatggttcacagtaactatggccgttggcgcattggtatataggtggaagcatataatctaaacaaacaggacactccaaattcgcaagaagtgcccagatgatatttggattttgtttaatatcagctttttcttctattggaatttcttctacttttgttgtaggctcctctgccttcactatttcaatagttacggtgacagagtctggatcttgaagtttttgtttaacattttcaattgttaaatgagtagtatttagccgttgttcactgcttgtatttttctgagcgcatgtaaagaaaaagtttttattgccgctgacaatccttaagaaatagttaaaggtatcagatttttcggtgacatttatatgttcaacagagcaggagaatacacctttcctggcatcaacttcttttttaacattaaatacttcattgccaaagggaagaagtagacattcttctatggagcaaagaaaattaatttcaaagctaggctctttcagcaacagagttgaatgatcagtggagaaatgtttgacaatgtcagtacgaggtcctgtccaagtgcaattggaataatttttagatggacaatcgaacattctaaattcgcagaacagttcatgttgctcgagtatagccggcacaaggttatctttacaaccagacttagcaaatctacacgcaaatggaaaaaattgagctatactttcataggcttcatctcgcacaaacatgtcgtcctctcctattttacatctaccacatacggcgccggtaccatcatttttggtgtaagttggaaacacagaaagataattgcggcatcttatgcacacaagtgttttcaatacatcagctggtataggtaagcttgacgtcatgtttaccctcttttttgtattaatcaccaaatattaagtaattgtttttttcaacacaattttttaattattattctccaacttgatgaaacatgaaaattgaaaagacaaa

SEQ ID NO: 1004 - DNA, 3458 bp, Diabrotica virgifera
  SmartBlast Evalue=3E-29; Info=E3 ubiquitin-protein ligase SIAH1 n=4 Tax=Apocrita RepID=E2BIC8_9HYME
ctgttataaaaatacatataaatctaacaaatgtttggttcttatgactacgtatctaatgattagggtaaggtgggtttcaactaaataaaacttcttgtaacgtgaagttcagtatggaacggatttcaaatttagccgcaagtattaaacgaaagagctacacatgtgagtggcaacgtcgttaatcttacgacatagtagcacacgttttgttggtagttacgtttgaggttatacaaagagcaggaaagggttttttccacctacctctaccgaaagtatacttttccggacctgattgtagggagcaaagttgtacttttcctccctagggaggaaaatatttttcctccctagggaggaaaagtaaaagtgacgtcatggtatttcattcatgaaatataacttattgacgccctgtacaatatctattttctattacgtaagtatctatacattttaacgtttatttataaaacacctgtattttgcagaatggtaaaaaacagtaaattgttattttgatttaacaatgtttacattaataatttgacttatatttgacagttgacagttatattgtacctacttgttgttttagttctaataaattttgttggttagttacataaataaattaagtaaaaatgaaaaaatgacttgttatttgaggaaggtggaaaaaccatatgtataacatgggagtaaagtgccttttcctcccttgaatgattactgccctccgctacgcgtcgggcagtaaacttcattctcgggaggaaaagtagcactttcctcccttgttatacaaatagctatttccaaggcttgtcatgtatcgcttactgcattttaatttttattgaatattttcggttagtattgcagaaatttgaattgatttgatacatttatgttttctcgttatattttgttagtaattaaaagatgcgcacttgccccagagatttatcacatgaggcaagtgcgttttttgtgtcaggtagagatggtcagaaattacgcccgaaagacggagagaggtttgctctattcagcagaagcccttaacagtgccttaagggatataagaaatcagaatttcactgtcaagggagcatcgtccttatacagtgccccagtgacaaaattatgggatcacttaagtggaagaacaggtgcgaaggtatcagaacaaggtcgatatactgatattccattcgcagaagaaaagcaatcttatcttaatttatatacaacataaattaagataaattgtacaatttttgcccttaaattaagtaatttttcattttgtggcgagttagtcgacccttctgaagttattattttgtttttaacattatgcttattattaatttttttttcagaactgtgtgccgaaaaacctagcaactaagtacacttaccccgtaatgcaattcaaggaaaatatataaaactacgcccagaagacgcagttacctcaaactgacggggcaagtgcgctatggcgatatgtaaggaaaaaaatcatgactactaatcgtgaaatgtcacaagatttgggatcttttttaaataaagctcattgtcaaagtacttcgtgcacgtacctcgatttggcagaagtaatccaattgaagcagtgatacaattaaaatcaaatatgaataaaagggtgtgccccaccttaccctaatgaaacaagaaatggaatatcatggttagttattctagtatctaatggttaacaaatacaaaatgcttaaatctaatggataacaaatacaaaaataaaatacaaacttaaaaatatttagcctttgacgattctgattcgtaagttaatagtatcagaataaaaaccaataatttgttcaagataaattttaacacatttgccatccttgaagcgttcatctgcagatgaaattgctgaaactaaacccacattaaagcattttctctttaatccacctaaatcgattacatcggcctcaaatctatactctttagcatctgtggatcgtccaattatcctgacagacaaataaagcttttgctcgtcatacttataatcaaattggaaaatcttcttgtcatatttgattacataacaactcttcgtgtcttttttattaaaaggtatagtgacttgatcggattttaaaacgacttcattgtgattattatcgatatggtcaagtactctggaatgactgccttgccagtcacagttggtggtgtcttttagcgggcaaatgaatggtccaaattcacagcaagtttcatgatctcgtatttcagttgaaatgcaggaatacgtacagccagctttatgatacttacaaggatacgttaaatgctctgtcattttttctagagtaaagttcctggtatcatggacaggtactttgcaaagaccacaaatttcaacttttttcttacatggttcacagtaactatggccgttggcgcattggtatataggtggaagcatataatctaaacaaacaggacactccaaattcgcaagaagtgcccagatgatatttggattttgtttaatatcagctttttcttctattggaatttcttctacttttgttgtaggctcctctgccttcactatttcaatagttacggtgacagagtctggatcttgaagtttttgtttaacattttcaattgttaaatgagtagtatttagccgttgttcactgcttgtatttttctgagcgcatgtaaagaaaaagtttttattgccgctgacaatccttaagaaatagttaaaggtatcagatttttcggtgacatttatatgttcaacagagcaggagaatacacctttcctggcatcaacttcttttttaacattaaatacttcattgccaaagggaagaagtagacattcttctatggagcaaagaaaattaatttcaaagctaggctctttcagcaacagagttgaatgatcagtggagaaatgtttgacaatgtcagtacgaggtcctgtccaagtgcaattggaataatttttagatggacaatcgaacattctaaattcgcagaacagttcatgttgctcgagtatagccggcacaaggttatctttacaaccagacttagcaaatctacacgcaaatggaaaaaattgagctatactttcataggcttcatctcgcacaaacatgtcgtcctctcctattttacatctaccacatacggcgccggtaccatcatttttggtgtaagttggaaacacagaaagataattgcggcatcttatgcacacaagtgttttcaatacatcagctggtataggtaagcttgacgtcatgtttaccctcttttttgtattaatcaccaaatattaagtaattgtttttttcaacacaattttttaattattattctccaacttgatgaaacatgaaaattgaaaagacaaa

SEQ ID NO: 1005 - DNA, 3435 bp, Diabrotica virgifera
  SmartBlast Evalue=3E-29; Info=E3 ubiquitin-protein ligase SIAH1 n=4 Tax=Apocrita RepID=E2BIC8_9HYME
ctgttataaaaatacatataaatctaacaaatgtttggttcttatgactacgtatctaatgattagggtaaggtgggtttcaactaaataaaacttcttgtaacgtgaagttcagtatggaacggatttcaaatttagccgcaagtattaaacgaaagagctacacatgtgagtggcaacgtcgttaatcttacgacatagtagcacacgttttgttggtagttacgtttgaggttatacaaagagcaggaaagggttttttccacctacctctaccgaaagtatacttttccggacctgattgtagggagcaaagttgtacttttcctccctagggaggaaaagtaaaagtgacgtcatggtatttcattcatgaaatataacttattgacgccctgtacaatatctattttctattacgtaagtatctatacattttaacgtttatttataaaacactctgtattttgcagaatggtaaaaaacagtaaattgttattctgatttaacaatgtttacattaataatttgacttatatttgacagttgacagttatattgtacctacttgttagttttagttctaataaattttgttggttagttacataaataaattaagtaaaaatgaaaaaatgacttgttatttgaggaaggtggaaaaaccatatgtataacatgggagtaaagtgccttttcctcccttgaatgattactgccctccgctacgcgtcgggcagtaaacttcattctcgggaggaaaagtagcactttcctcccttgttatacaaatagctatttccaaggcttgtcatgtatcgcttactgcattttaatttttattgaatattttcggttagtattgcagaaatttgaattgatttgatacatttatgttttctcgttatattttgttagtaattaaaagatgcgcacttgccccagagatttatcacatgaggcaagtgcgttttttgtgtcaggtagagatggtcagaaattacgcccgaaagacggagagaggtttgctctattcagcagaagcccttaacagtgccttaagggatataagaaatcagaatttcactgtcaagggagcatcgtccttatacagtgccccagtgacaaaattatgggatcacttaagtggaagaacaggtgcgaaggtatcagaacaaggtcgatatactgatattccattcgcagaagaaaagcaatcttatcttaatttatatacaacataaattaagataaattgtacaatttttgcccttaaattaagtaatttttcattttgtggcgagttagtcgacccttctgaagttattattttgtttttaacattatgcttattattaatttttttttcagaactgtgtgccgaaaaacctagcaactaagtacacttaccccgtaatgcaattcaaggaaaatatataaaactacgcccagaagacgcagttacctcaaactgacggggcaagtgcgctatggcgatatgtaaggaaaaaaatcatgactactaatcgtgaaatgtcacaagatttgggatcttttttaaataaagctcattgtcaaagtacttcgtgcacgtacctcgatttggcagaagtaatccaattgaagcagtgatacaattaaaatcaaatatgaataaaagggtgtgccccaccttaccctaatgaaacaagaaatggaatatcatggttagttattctagtatctaatggttaacaaatacaaaatgcttaaatctaatggataacaaatacaaaaataaaatacaaacttaaaaatatttagcctttgacgattctgattcgtaagttaatagtatcagaataaaaaccaataatttgttcaagataaattttaacacatttgccatccttgaagcgttcatctgcagatgaaattgctgaaactaaacccacattaaagcattttctctttaatccacctaaatcgattacatcggcctcaaatctatactctttagcatctgtggatcgtccaattatcctgacagacaaataaagcttttgctcgtcatacttataatcaaattggaaaatcttcttgtcatatttgattacataacaactcttcgtgtcttttttattaaaaggtatagtgacttgatcggattttaaaacgacttcattgtgattattatcgatatggtcaagtactctggaatgactgccttgccagtcacagttggtggtgtcttttagcgggcaaatgaatggtccaaattcacagcaagtttcatgatctcgtatttcagttgaaatgcaggaatacgtacagccagctttatgatacttacaaggatacgttaaatgctctgtcattttttctagagtaaagttcctggtatcatggacaggtactttgcaaagaccacaaatttcaacttttttcttacatggttcacagtaactatggccgttggcgcattggtatataggtggaagcatataatctaaacaaacaggacactccaaattcgcaagaagtgcccagatgatatttggattttgtttaatatcagctttttcttctattggaatttcttctacttttgttgtaggctcctctgccttcactatttcaatagttacggtgacagagtctggatcttgaagtttttgtttaacattttcaattgttaaatgagtagtatttagccgttgttcactgcttgtatttttctgagcgcatgtaaagaaaaagtttttattgccgctgacaatccttaagaaatagttaaaggtatcagatttttcggtgacatttatatgttcaacagagcaggagaatacacctttcctggcatcaacttcttttttaacattaaatacttcattgccaaagggaagaagtagacattcttctatggagcaaagaaaattaatttcaaagctaggctctttcagcaacagagttgaatgatcagtggagaaatgtttgacaatgtcagtacgaggtcctgtccaagtgcaattggaataatttttagatggacaatcgaacattctaaattcgcagaacagttcatgttgctcgagtatagccggcacaaggttatctttacaaccagacttagcaaatctacacgcaaatggaaaaaattgagctatactttcataggcttcatctcgcacaaacatgtcgtcctctcctattttacatctaccacatacggcgccggtaccatcatttttggtgtaagttggaaacacagaaagataattgcggcatcttatgcacacaagtgttttcaatacatcagctggtataggtaagcttgacgtcatgtttaccctcttttttgtattaatcaccaaatattaagtaattgtttttttcaacacaattttttaattattattctccaacttgatgaaacatgaaaattgaaaagacaaa

SEQ ID NO: 1006 - DNA, 3268 bp, Diabrotica virgifera
cttcatttgtaattgtaaaatatatacaaatatacaaggtagtataacaaaaaagagtactctagaagtgtttgtttcaaaacctccttacaaatttagacaaatccaaaatggatactttaaaatttgtcaacacaactctaggtatagaaaatagttttacaatgatttttaatatatattttccaccctgtacgtataattttcaaatgtatatataatatgcaagtatataaatatatatacctattatgatcacacaatttgagtcaatttttttcttttagagatcacagaagtggagctggaaaattcagctactttatttgttttacatttataaaagttaaaactaaggcaatagccacaattattggaatgtggttttatttttacacattttaaagccccaagccagttcgtggacgtggcatgttcgttatcatatatttttttaggttagatatttctttgagattgattcatggttcataaacattttttctgtgggtactttcacattaatttgttgtgggatcgtcgttcccatcataaaattatgataactcctcggacacctgtttctaggtctacccgtcatcagagaggctcgtaagaagactgaactgaattaaaacacgccgattggttggcaattatacctattaaaataatagtagaggagccttggatgctaaatttgcagttactaaagcgtcatggggacctgctggattgcgaagattaggttataaaaccaaaaagagtcaagttgtattttccattttagtaatgatttccaatttttaatttaattttccatttccaaaaatcgttgtttccgattatggcgacatctacccataattagaaaaaatgtctcgaataaaaattccttatttttacataaggaatgcaaatctgcaaataaaaaaatgggcgttcccatttaagacttttaatcccccaccccacctacgtgggggtcaggggtgtcattcgacagatttttgaaaaatattgaacacgtattattcaattttttgatctgatgttcatttcgcgaaatattcgcttttttcctttacactgttcctcttgtacttaactgaacttttcttaatctgacgttttcgagtttttctaatatttttttacgggctgcccccaacgcacgcccctgcattgaagagtccatattttatatggtaggggtacatttacagggtacaagatttcttcccatgtgattttctgacgctctcgagtaactcgcaaaatcccccttggggccccctgccataatatataccaacatgcatttcctctaacgaggaaagatgaagtgagtgtcgatagaaattaaggtaaactaggttatgcttgttttcattaggatttttcagtgcgtcacaaatgatagaaaaaaggtaagtccgtgataatatacatttataacatttattctaacatgacattttagttaaatctgacagttgtcacattttatttgcaatttggcacaaaaacaaatcaattgtgtttattgcatttataaaatagtattttccaccgacctctaccgaaagtatacttttccggacctgattgtagggagcaaagttgtacttttcctccctagggaggaaaagtaaaagtgacgtcatggtatttcattcatgaaatataacttattgacgccctgtacaatatctattttctattacgtaagtatctatacattttaacgtttatttataaaacactctgtattttgcagaatggtaaaaaacagtaaattgttattctgatttaacaatgtttacattaataatttgacttatatttgacagttgacagttatattgtacctacttgttagttttagttctaataaattttgttggttagttacataaataaattaagtaaaaatgaaaaaatgacttgttatttgaggaaggtggaaaaaccatatgtataacatgggagtaaagtgccttttcctcccttgaatgattactgccctccgctacgcgtcgggcagtaaacttcattctcgggaggaaaagtagcactttcctcccttgttatacaaatagctatatttgtcagtcagtcttacatttatacgaaaagatgataaaaatactcttatgctttatttgaatgtctaaaagtcacgaaatgcaaagtggcaacaaacgctccagttttacagtcttttttatgactccagtggcgtagcaaaaggatattaatttacattcagtgattcgttttgaagattatattttttacgcctctttttactgaataatagttattttacaatatatatgggtctggtatcgatgaattccacaaaattagtatttactcagtgtgagttgttagctattagtaaacagttctgtatgctgttgaaatgcacgaaacatatagaaggggagatttttgggcttatttcgttatagtattttatacaataatgatgctatttgaatgtatcatataccgaactagttgatataaagaaaatacttaaaaaaatttaagagttaaatagttgaaaagcagtcaaaactttatatttctgtattaaataagatttgtgatattactaattcctagggacagtacaatttcactagttactataattccgggaatagtagaatcgaaaagagagatgtgtttagttttacacgtacgctacagggtatagaagatttatgttttacgttatgttacgctgtgatcattagccgaataaatatgttcgaagcgacaaagattccttctatgtaataatctctgccgatatatagaggatatgacccagttaacgaaagtaaacacactgagcaacgaaacattatttaaaaaatcattagaagtgcatagatttttataccgtcaatatttttcattacagcatagttttagctaatttttgcattactttacagataattacatacaacttttttcgtttgtctgcagttttactgtattcttttccaataagctacaggtctatagttcgtttcaaatgttagaatcagtatggttgtatattgcaagcaggtttgccatacttcgcttattctgtgaattgtcataaataaattgtccttttagacggagaggcagcgccgagaaatctctctgaatttgctaaggctagttttttcacagttgattaccgtgattgtagagagaaacattactgcggtcggtcaagcgaaacgtagaacaggtggta

SEQ ID NO: 1007 - DNA, 3259 bp, Diabrotica virgifera
gtgttcccgtctttatcttaacccacactcccattatcgataaccatggtattttgccggacgaatggggagcaatgataggatgaccagggcgaagccgtaaagttattcctgcatctgagaagctctttttaaaagttaaggcgtgaagacgttaaatcgtatgtgtacacatcgctcgtttgctggtttgtcgattgcttttatccgacatggttgtatttaaaatttttcggtgttctagttctattgttccctcgaaaccctcgaagaggctctccgtctagctgtttgtttgctggtacggtaacgacattatgccttctccccgctgatgttggccgttcagctgtcggtgttataacattaagaattggacttcaccaatatcagaccaataccaatggcttagagtatattatacgtttgtttttatttattaaatcgtacaatattactaaagcgttgattcgtagactaaaaccttgttttcgctccatgtacagttcgacaagtcgaaaactggcgcctcaagtcaagtttttgtagaataaatgtggcaaatgaaataaatttttcaagcaaagcctgcataaatacgaacaattgttatttttagttgatacacaatttaacatatagaaattcaatgctaaatcacaaaaagcttcataaaaatcagtgttttacatgtttttactcaaatcagttataatttaataaaaaactgcatctatcttcaattaaacgatctccagataaaaattattcaacaaatagattttttgcaagcaaaatttgtcaaaaaaactgatgttactgctatgacagtatttaatttggagttgacctatcttgtctcaaaagtcgccaaattcttaattggatttagatctaggtgataaggtggaagctttcatggtaaagtcatggccctgatcttaaacatcttcaacataatcagtatcttctgagttatctccaaatgcaccaaatacaccaatacaaatataattttggcaaatacttttgtccactcttgcacagcttaaattgataaaaaactcatcagataaagctgtaacatcgtggaatctgaagttggcatattttacttggaaagctgtccaattttcaattggatgtaaatctgggtaataaggtgcaagtcttcatgttaaaatcatcacagacatcttccaaacaaaatcaatatcttgtgcgtcatttcctaagtcaattaattttgatccaaaaatgcattaaatactttttttttggacagaaactgtcttcaagagtttggcaaatactttttccatgtaactaatttgtcaaaaagttgatcagataaaactgaaagctgaaagaagctcagaccaaatctaaattcatttaacgttagatctgggtgacaaggtggacgtttcatggtaaaaatttaaaactggtacatatttctaagttttagaactcgcttgttagtttttaataaaaaacaacatttacaaaacaattaaaacaaaaaagtatttttccacctacctctaccgaaagtatacttttccggacctgattgtagggagcaaagttgtacttttcctccctagggaggaaaatatttttcctccctagggaggaaaagtaaaagtgacgtcatggtatttcattcatgaaatataacttattgacgccctgtacaatatctattttctattacgtaagtatctatacattttaacgtttatttataaaacacctgtattttgcagaatggtaaaaaacagtaaattgttattttgatttaacaatgtttacattaataatttgacttatatttgacagttgacagttatattgtacctacttgttgttttagttctaataaattttgttggttagttacataaataaattaagtaaaaatgaaaaaatgacttgttatttgaggaaggtggaaaaaccatatgtataacatgggagtaaagtgccttttcctcccttgaatgattactgccctccgctacgcgtcgggcagtaaacttcattctcgggaggaaaagtagcactttcctcccttgttatacaaatagctatatttgtcagtcagtcttacatttatacgaaaagatgataaaaatactcttatgctttatttgaatgtctaaaagtcacgaaatgcaaagtggcaacaaacgctccagttttacagtcttttttatgactccagtggcgtagcaaaaggatattaatttacattcagtgattcgttttgaagattatattttttacgcctctttttactgaataatagttattttacaatatatatgggtctggtatcgatgaattccacaaaattagtatttactcagtgtgagttgttagctattagtaaacagttctgtatgctgttgaaatgcacgaaacatatagaaggggagatttttgggcttatttcgttatagtattttatacaataatgatgctatttgaatgtatcatataccgaactagttgatataaagaaaatacttaaaaaaatttaagagttaaatagttgaaaagcagtcaaaactttatatttctgtattaaataagatttgtgatattactaattcctagggacagtacaatttcactagttactataattccgggaatagtagaatcgaaaagagagatgtgtttagttttacacgtacgctacagggtatagaagatttatgttttacgttatgttacgctgtgatcattagccgaataaatatgttcgaagcgacaaagattccttctatgtaataatctctgccgatatatagaggatatgacccagttaacgaaagtaaacacactgagcaacgaaacattatttaaaaaatcattagaagtgcatagatttttataccgtcaatatttttcattacagcatagttttagctaatttttgcattactttacagataattacatacaacttttttcgtttgtctgcagttttactgtattcttttccaataagctacaggtctatagttcgtttcaaatgttagaatcagtatggttgtatattgcaagcaggtttgccatacttcgcttattctgtgaattgtcataaataaattgtccttttagacggagaggcagcgccgagaaatctctctgaatttgctaaggctagttttttcacagttgattaccgtgattgtagagagaaacattactgcggtcggtcaagcgaaacgtagaacaggtggta

SEQ ID NO: 1008 - DNA, 4612 bp, Diabrotica virgifera
  SmartBlast Evalue=1E-118; Info=Croquemort n=1 Tax=Tribolium castaneum RepID=D2A0J8_TRICA
attagcaataacggcaattcattcattcatgaagagtaggaaaatgttttagaatggcctaaatggaccataggtactaattggaactatttctgacctcaggtcatcaatatagcatcagttcacacgagagtttgaatgtttctcgaggttgcgtcatttgttttaaagtgcgtactcacatgataaataatattacctcttcattaaaataaaggatgtccccgaaaatagtgcgttcctttaaggtatggatataatacacaatgtagaagaaaaactcctataacattttttctaaatttaaccgtttccaaaaatgattcattgttcgccatataagcgaacttttattttcataaaattaactaatttgtcatcactgtacaagaactgtttgtgatttagtttgaaacaaaacaagaatttgtttgtttgtttaggatgaagacagggtttaatgtgaatacttatggctaaaatgctgcaactatttttgaattgtgattgtctatgtttagatttttgtatacatagttgtcagatttcaatttgcataccaaaatgtattttggttttttagccaaacggttgcatttagaaagaaatgttataagacttttttgctctacatggtgccttctacctatacctttaaggaacgcactattttcggggacaccctgcacattgttttagctgttaaatattatgtacagttgtcgtcactgaatagtttacatcttcatttttacactgtaatacctactgtaaaatcgcaatgtcatacggatatgctaaatgtcaaagggtttgtcaaaaatttcgcgcgtatttaaaaaattaaataacaagctattaaaaaacaagagctaattcctaaatttcatttattaattttcattttgttacattttataaaatagatttattttgttatggtttttaatttaatcaacttattctgggttcgccactggtaacgttacttcgacgtaaaaagtgtgtttaaacgaggtaaaaattcaaaaaaatcggtaactagataagggtgtaaactattcaatgaccggagatgtacagtcacaatcactgaatagtttacaactttatttttatattgtaatactgtaaaatcgcagtgtcgtacggatttactaactgtcaaattgcttgtcaaaaattttagtgtgtattgaaaaataaaataagaagttattaaaagcgtccaaaatgccgttttaatttaaattttaactcaattttattttaaaaaatttattttattttttaaattttaatcaacctattctgggtccgccactggtaacgtcactttgacgtaaaaggtgcgtttaaacgaggtaaaaattcaaaaaattggccactggatattaaagggtgtaaactattcagtgattgtgactgtacataatctgatgcaacctatataaacctcagagttgtaaacctcggagatgcaaaatataaacctcgaaaacgattgtctcggtttagtcaacagatattctgaataagcacattctttctttttatcttggtgcacaatttcaatataaatttacgaagtacgtcgatttgattggtcaaaatggcaatctcaaattagctggttaagagggaggctactatacaatcaaaggtaacaaacatttaagtaagtgctaaatttgtgtcaaaatagtaactggcatgaggtatttcattggaaattgtattgttaagtacctcaagataaagaaatgatcgagtttggtaaaggagacaaagggtatattaaaattcaaacaatataatattcggtaggtatatgaagaaaatggtaacgttaaaaattatgttcagagatgaagaaataagatatatagataaatagataagaagaaaaagatagataaataagaaaaagggacagatgatttaaaaaagataacagttctaagctggaggaatcccactgaaaatacaaaggactgtaattcaattataaattactaaaatcaattttttgaaaattaaaaacaatggaagatttatattatttaataacttatggaagactttagaaggattgctggaaatcacctacaggacagggtaagaagtgaggaatcagacgcatatgtggggtagacaatataaatacctgggtaaagaacagaaaagaagagtggaatcaacacataagcaggatgtctgaatcaaggatagtaagactcgccagggacaagtcaccattgggcagaagaagtacatgacgcccaaggaaaagattgaatgacaatttaggaacagaatgaaaggcatcattgaagaaaaacaggcagtactgcctatataaaaagaaaagaagaagaagaaaaacaatgtttttacgtatacatagtttttaacacgatttttcatcaagtaacagtcgataatatatgtatagaaaaaaatacatacaaaacctaagatgcaaaaaaattgttaaatcaacatgagcttaccaaaaagtaataaaagaaatgctatacaaatagcttaagaacaatacattggaagacgacgagatatttgttaaaaaatgataagtaaaataaaaacactaaacgtaaatgggaatatcaaatttgggacataaatgtataactattagccagtgattattattattatgttgttggtatatcatgaaaacaacatttttaaaagttgcttgttataacgccatattctaaccagtctagtaatatatcctaatgaaataaccaaaatgaccacaaataattttaaatgttcggaacttaagtacttttcctaaaagtatcattatactaatttctacaacagctgctcaggtattgaccaacaaatactataaaaaatttctaataaaaatctaaatcacacaaaaaagtcaatttaccactattaaaaatcgaaaggtcatattaggcctaacataatttaaaaagttttaatcaagcgtaaccgtccagtgtgttaccctttatcatatatcctattagctgaaaaatattaattattaggttatgtatttgaatttagtaggagttcatcctcactgtcgtgccagcctctcctgaaggttatcacgattccaatgatggcgatgagaactcctatgcctagtaaaccataccctgtgtaggcaccgataggggtgagtaacaagactcctttaacggaatcgactaggtcaccggtaagatcggcttgttgagaaaaccaaaacatgggcataactgtcgatttaacattttcaagaattttaatgtgtttcactttttccattttgaggttgagttgaatctgggctctgacagtaaggggtaatcctgtttctggttctaaagctaagaacatttcgtgttgcgtcttatttggttctaaaccttcgatatctgctaaaaaggcgggatctgcttcataaaagtgagggaatgaaactaaagctggagctccatatttgcaaagtgagacatttctgacacccgagagctggtgagtgactcctttacccttaaaacaacccatttcaggatatttggtaccattatcgaaaactttatcggttccaacaaatttgtgccctttcattccttggtattcatagtcgcctctccaatctaattcgattgaactacacaaatcgtttgaaaaaattttaacagtttttttgtcgtgaggaggataccatagttccccttgagtaccttccacttctccacacgtcccttcataataaggcacacgagattcataattccaatttctaactaggcctagagtatcaattgaattagctccattgtccatgttccacattccatcgtatggagctgagtcgtttctgtctacaaaccacccaaattttttaaagggtatcttcaaaccggttatatttaatttttggactagcttaagcaaaggatcgtcgtaaccctcaaaagtgaattcttctacagtcttggtaacagtcaaattgatcttgtattcttccaagaaaaagtctactcctataagtactatgtagtttttgtccttaactaagctggctatcgatgccacaataggattgaaagtcgtgatttgatcagtaagatctcccacggatctttctggtacaaacttccacgtccttctgttgtaaaaggaaattgtggaattatcattaattgtgacattgtccctaacgtggtgttcgtggtaagtataaggcccacattcatcgaagtgcggcttgatagaggaattcctttggtactcttcggaattggtccaattgaaaaaataaaatgagagatagatcggtattggtgtttccttccacatgccgtaggcatttgtgtcctttgaggataaaccaagttcataattcatgactttcttgacaatcattgcccaaaatattgaaaaaaacaaaccgaagattataaacgcggtagcgacaccaaaagttgtccattttttacaggatggcgaacaccgacagcagcccatattgtagtactattcacttaattaaacaaaggcaacaacatttacataaaatatcctttgtattatgacctaacacaattaa

SEQ ID NO: 1009 - DNA, 4631 bp, Diabrotica virgifera
  SmartBlast Evalue=1E-118; Info=Croquemort n=1 Tax=Tribolium castaneum RepID=D2A0J8_TRICA
caacgtatgggatggataagtgctgaaggcccggcagttttttctcatacagaaaaaataacactaataaggtacaaaaaatattcttgagaacacaatgttgccatcagtgatccagggaggattacacaataacaacttcatcttccaacagaacaattggctgattcatatcagtagaattgttccagaatagttaaagaaactcatgttaatgttcttccgtggacttcccggagttcagaccttaccaccatcgaaaatgtgtgggtagagtagacagacatttaaatgaaagaatcttaggctcactaacggcctgtaaatgtgtatgatagatgactcctcgccttcaataacagccgaatttaagctaagctgtgaaagtatcaacgagactccatgataaagacatctaaaaactgcaaccctaccggaacatatcgacaaggtgaacgatatgattttggaagattcgcatacaaacgatattaaagagttggccacatcttccgacagaaattgaacatgacgaatctttacacaaaatgggtaccacttgcgctcactgaacatcacaaacccattcgcatggcactttctgaatagtatttggcgttttaagaaagacaaaagtggctatttgcgtcaatattttgaaaatacatagactacatgcctaaaatcaaacagcatcttacgtagtgaatatacgtcggttcttcagctctaaagaaggcgaaaatgccagtgccgtaagatctaagtctaaaatctacaacttggcatcattgtaatatcaattatacagggtgtcgtcactgaatagtttacatcttcatttttacactgtaatacctactgtaaaatcgcaatgtcatacggatatgctaaatgtcaaagggtttgtcaaaaatttcgcgcgtatttaaaaaattaaataacaagctattaaaaaacaagagctaattcctaaatttcatttattaattttcattttgttacattttataaaatagatttattttgttatggtttttaatttaatcaacttattctgggttcgccactggtaacgttacttcgacgtaaaaagtgtgtttaaacgaggtaaaaattcaaaaaaatcggtaactagataagggtgtaaactattcaatgaccggagatgtacagtcacaatcactgaatagtttacaactttatttttatattgtaatactgtaaaatcgcagtgtcgtacggatttactaactgtcaaattgcttgtcaaaaattttagtgtgtattgaaaaataaaataagaagttattaaaagcgtccaaaatgccgttttaatttaaattttaactcaattttattttaaaaaatttattttattttttaaattttaatcaacctattctgggtccgccactggtaacgtcactttgacgtaaaaggtgcgtttaaacgaggtaaaaattcaaaaaattggccactggatattaaagggtgtaaactattcagtgattgtgactgtacataatctgatgcaacctatataaacctcagagttgtaaacctcggagatgcaaaatataaacctcgaaaacgattgtctcggtttagtcaacagatattctgaataagcacattctttctttttatcttggtgcacaatttcaatataaatttacgaagtacgtcgatttgattggtcaaaatggcaatctcaaattagctggttaagagggaggctactatacaatcaaaggtaacaaacatttaagtaagtgctaaatttgtgtcaaaatagtaactggcatgaggtatttcattggaaattgtattgttaagtacctcaagataaagaaatgatcgagtttggtaaaggagacaaagggtatattaaaattcaaacaatataatattcggtaggtatatgaagaaaatggtaacgttaaaaattatgttcagagatgaagaaataagatatatagataaatagataagaagaaaaagatagataaataagaaaaagggacagatgatttaaaaaagataacagttctaagctggaggaatcccactgaaaatacaaaggactgtaattcaattataaattactaaaatcaattttttgaaaattaaaaacaatggaagatttatattatttaataacttatggaagactttagaaggattgctggaaatcacctacaggacagggtaagaagtgaggaatcagacgcatatgtggggtagacaatataaatacctgggtaaagaacagaaaagaagagtggaatcaacacataagcaggatgtctgaatcaaggatagtaagactcgccagggacaagtcaccattgggcagaagaagtacatgacgcccaaggaaaagattgaatgacaatttaggaacagaatgaaaggcatcattgaagaaaaacaggcagtactgcctatataaaaagaaaagaagaagaagaaaaacaatgtttttacgtatacatagtttttaacacgatttttcatcaagtaacagtcgataatatatgtatagaaaaaaatacatacaaaacctaagatgcaaaaaaattgttaaatcaacatgagcttaccaaaaagtaataaaagaaatgctatacaaatagcttaagaacaatacattggaagacgacgagatatttgttaaaaaatgataagtaaaataaaaacactaaacgtaaatgggaatatcaaatttgggacataaatgtataactattagccagtgattattattattatgttgttggtatatcatgaaaacaacatttttaaaagttgcttgttataacgccatattctaaccagtctagtaatatatcctaatgaaataaccaaaatgaccacaaataattttaaatgttcggaacttaagtacttttcctaaaagtatcattatactaatttctacaacagctgctcaggtattgaccaacaaatactataaaaaatttctaataaaaatctaaatcacacaaaaaagtcaatttaccactattaaaaatcgaaaggtcatattaggcctaacataatttaaaaagttttaatcaagcgtaaccgtccagtgtgttaccctttatcatatatcctattagctgaaaaatattaattattaggttatgtatttgaatttagtaggagttcatcctcactgtcgtgccagcctctcctgaaggttatcacgattccaatgatggcgatgagaactcctatgcctagtaaaccataccctgtgtaggcaccgataggggtgagtaacaagactcctttaacggaatcgactaggtcaccggtaagatcggcttgttgagaaaaccaaaacatgggcataactgtcgatttaacattttcaagaattttaatgtgtttcactttttccattttgaggttgagttgaatctgggctctgacagtaaggggtaatcctgtttctggttctaaagctaagaacatttcgtgttgcgtcttatttggttctaaaccttcgatatctgctaaaaaggcgggatctgcttcataaaagtgagggaatgaaactaaagctggagctccatatttgcaaagtgagacatttctgacacccgagagctggtgagtgactcctttacccttaaaacaacccatttcaggatatttggtaccattatcgaaaactttatcggttccaacaaatttgtgccctttcattccttggtattcatagtcgcctctccaatctaattcgattgaactacacaaatcgtttgaaaaaattttaacagtttttttgtcgtgaggaggataccatagttccccttgagtaccttccacttctccacacgtcccttcataataaggcacacgagattcataattccaatttctaactaggcctagagtatcaattgaattagctccattgtccatgttccacattccatcgtatggagctgagtcgtttctgtctacaaaccacccaaattttttaaagggtatcttcaaaccggttatatttaatttttggactagcttaagcaaaggatcgtcgtaaccctcaaaagtgaattcttctacagtcttggtaacagtcaaattgatcttgtattcttccaagaaaaagtctactcctataagtactatgtagtttttgtccttaactaagctggctatcgatgccacaataggattgaaagtcgtgatttgatcagtaagatctcccacggatctttctggtacaaacttccacgtccttctgttgtaaaaggaaattgtggaattatcattaattgtgacattgtccctaacgtggtgttcgtggtaagtataaggcccacattcatcgaagtgcggcttgatagaggaattcctttggtactcttcggaattggtccaattgaaaaaataaaatgagagatagatcggtattggtgtttccttccacatgccgtaggcatttgtgtcctttgaggataaaccaagttcataattcatgactttcttgacaatcattgcccaaaatattgaaaaaaacaaaccgaagattataaacgcggtagcgacaccaaaagttgtccattttttacaggatggcgaacaccgacagcagcccatattgtagt

SEQ ID NO: 1010 - DNA, 4618 bp, Diabrotica virgifera
  SmartBlast Evalue=1E-118; Info=Croquemort n=1 Tax=Tribolium castaneum RepID=D2A0J8_TRICA
caacgtatgggatggataagtgctgaaggcccggcagttttttctcatacagaaaaaataacactaataaggtacaaaaaatattcttgagaacacaatgttgccatcagtgatccagggaggattacacaataacaacttcatcttccaacagaacaattggctgattcatatcagtagaattgttccagaatagttaaagaaactcatgttaatgttcttccgtggacttcccggagttcagaccttaccaccatcgaaaatgtgtgggtagagtagacagacatttaaatgaaagaatcttaggctcactaacggcctgtaaatgtgtatgatagatgactcctcgccttcaataacagccgaatttaagctaagctgtgaaagtatcaacgagactccatgataaagacatctaaaaactgcaaccctaccggaacatatcgacaaggtgaacgatatgattttggaagattcgcatacaaacgatattaaagagttggccacatcttccgacagaaattgaacatgacgaatctttacacaaaatgggtaccacttgcgctcactgaacatcacaaacccattcgcatggcactttctgaatagtatttggcgttttaagaaagacaaaagtggctatttgcgtcaatattttgaaaatacatagactacatgcctaaaatcaaacagcatcttacgtagtgaatatacgtcggttcttcagctctaaagaaggcgaaaatgccagtgccgtaagatctaagtctaaaatctacaacttggcatcattgtaatatcaattatacagggtgtcgtcactgaatagtttacatcttcatttttacactgtaatacctactgtaaaatcgcaatgtcatacggatatgctaaatgtcaaagggtttgtcaaaaatttcgcgcgtatttaaaaaattaaataacaagctattaaaaaacaagagctaattcctaaatttcatttattaattttcattttgttacattttataaaatagatttattttgttatggtttttaatttaatcaacttattctgggttcgccactggtaacgttacttcgacgtaaaaagtgtgtttaaacgaggtaaaaattcaaaaaaatcggtaactagataagggtgtaaactattcaatgaccggagatgtacagtcacaatcactgaatagtttacaactttatttttatattgtaatactgtaaaatcgcagtgtcgtacggatttactaactgtcaaattgcttgtcaaaaattttagtgtgtattgaaaaataaaataagaagttattaaaagcgtccaaactgccgttttaatttaaattttaactcaattttatttaaaaaaatttatttatttttttaattttaactggatattaaagggtgtaaactattcagtgattgtgactgtacataatctgatgcaacctatataaacctcagagttgtaaacctcggagatgcaaaatataaacctcgaaaacgattgtctcggtttagtcaacagatattctgaataagcacattctttctttttatcttggtgcacaatttcaatataaatttacgaagtacgtcgatttgattggtcaaaatggcaatctcaaattagctggttaagagggaggctactatacaatcaaaggtaacaaacatttaagtaagtgctaaatttgtgtcaaaatagtaactggcatgaggtatttcattggaaattgtattgttaagtacctcaagataaagaaatgatcgagtttggtaaaggagacaaagggtatattaaaattcaaacaatataatattcggtaggtatatgaagaaaatggtaacgttaaaaattatgttcagagatgaagaaataagatatatagataaatagataagaagaaaaagatagataaataagaaaaagggacagatgatttaaaaaagataacagttctaagctggaggaatcccactgaaaatacaaaggactgtaattcaattataaattactaaaatcaattttttgaaaattaaaaacaatggaagatttatattatttaataacttatggaagactttagaaggattgctggaaatcacctacaggacagggtaagaagtgaggaatcagacgcatatgtggggtagacaatataaatacctgggtaaagaacagaaaagaagagtggaatcaacacataagcaggatgtctgaatcaaggatagtaagactcgccagggacaagtcaccattgggcagaagaagtacatgacgcccaaggaaaagattgaatgacaatttaggaacagaatgaaaggcatcattgaagaaaaacaggcagtactgcctatataaaaagaaaagaagaagaagaaaaacaatgtttttacgtatacatagtttttaacacgatttttcatcaagtaacagtcgataatatatgtatagaaaaaaatacatacaaaacctaagatgcaaaaaaattgttaaatcaacatgagcttaccaaaaagtaataaaagaaatgctatacaaatagcttaagaacaatacattggaagacgacgagatatttgttaaaaaatgataagtaaaataaaaacactaaacgtaaatgggaatatcaaatttgggacataaatgtataactattagccagtgattattattattatgttgttggtatatcatgaaaacaacatttttaaaagttgcttgttataacgccatattctaaccagtctagtaatatatcctaatgaaataaccaaaatgaccacaaataattttaaatgttcggaacttaagtacttttcctaaaagtatcattatactaatttctacaacagctgctcaggtattgaccaacaaatactataaaaaatttctaataaaaatctaaatcacacaaaaaagtcaatttaccactattaaaaatcgaaaggtcatattaggcctaacataatttaaaaagttttaatcaagcgtaaccgtccagtgtgttaccctttatcatatatcctattagctgaaaaatattaattattaggttatgtatttgaatttagtaggagttcatcctcactgtcgtgccagcctctcctgaaggttatcacgattccaatgatggcgatgagaactcctatgcctagtaaaccataccctgtgtaggcaccgataggggtgagtaacaagactcctttaacggaatcgactaggtcaccggtaagatcggcttgttgagaaaaccaaaacatgggcataactgtcgatttaacattttcaagaattttaatgtgtttcactttttccattttgaggttgagttgaatctgggctctgacagtaaggggtaatcctgtttctggttctaaagctaagaacatttcgtgttgcgtcttatttggttctaaaccttcgatatctgctaaaaaggcgggatctgcttcataaaagtgagggaatgaaactaaagctggagctccatatttgcaaagtgagacatttctgacacccgagagctggtgagtgactcctttacccttaaaacaacccatttcaggatatttggtaccattatcgaaaactttatcggttccaacaaatttgtgccctttcattccttggtattcatagtcgcctctccaatctaattcgattgaactacacaaatcgtttgaaaaaattttaacagtttttttgtcgtgaggaggataccatagttccccttgagtaccttccacttctccacacgtcccttcataataaggcacacgagattcataattccaatttctaactaggcctagagtatcaattgaattagctccattgtccatgttccacattccatcgtatggagctgagtcgtttctgtctacaaaccacccaaattttttaaagggtatcttcaaaccggttatatttaatttttggactagcttaagcaaaggatcgtcgtaaccctcaaaagtgaattcttctacagtcttggtaacagtcaaattgatcttgtattcttccaagaaaaagtctactcctataagtactatgtagtttttgtccttaactaagctggctatcgatgccacaataggattgaaagtcgtgatttgatcagtaagatctcccacggatctttctggtacaaacttccacgtccttctgttgtaaaaggaaattgtggaattatcattaattgtgacattgtccctaacgtggtgttcgtggtaagtataaggcccacattcatcgaagtgcggcttgatagaggaattcctttggtactcttcggaattggtccaattgaaaaaataaaatgagagatagatcggtattggtgtttccttccacatgccgtaggcatttgtgtcctttgaggataaaccaagttcataattcatgactttcttgacaatcattgcccaaaatattgaaaaaaacaaaccgaagattataaacgcggtagcgacaccaaaagttgtccattttttacaggatggcgaacaccgacagcagcccatattgtagtactattcacttaattaaacaaaggcaacaacatttacataaaatatcctttgtattatgacctaacacaattaa

SEQ ID NO: 1011 - DNA, 4565 bp, Diabrotica virgifera
  SmartBlast Evalue=1E-118; Info=Croquemort n=1 Tax=Tribolium castaneum RepID=D2A0J8_TRICA
caacgtatgggatggataagtgctgaaggcccggcagttttttctcatacagaaaaaataacactaataaggtacaaaaaatattcttgagaacacaatgttgccatcagtgatccagggaggattacacaataacaacttcatcttccaacagaacaattggctgattcatatcagtagaattgttccagaatagttaaagaaactcatgttaatgttcttccgtggacttcccggagttcagaccttaccaccatcgaaaatgtgtgggtagagtagacagacatttaaatgaaagaatcttaggctcactaacggcctgtaaatgtgtatgatagatgactcctcgccttcaatttcggccgagaaaaaaaaataaacagccgaatttaaacgaagctgtgaaagtatcaacgagactccatgataaagacatctaaaaactgcaaccctaccggaacatatcgacaaggtgaacgatatgattttggaagattcgcatacaaacgatattaaagagttggccacatcttccgacagaaattgaacatgacgaatctttacacaaaatgggtaccacttgcgctcactgaacatcacaaacccattcgcatggcactttctgaatagtatttggcgttttaagaaagacaaaagtggctatttgcgtcaatattttgaaaatacatagactacatgcctaaaatcaaacagcatcttacgtagtgaatatacgtcggttcttcagctctaaagaaggcgaaaatgccagtgccgtaagatctaagtctaaaatctacaacttggcatcattgtaatatcaattatacagggtgtcgtcactgaatagtttacatcttcatttttacactgtaatacctactgtaaaatcgcaatgtcatacggatatgctaaatgtcaaagggtttgtcaaaaatttcgcgcgtatttaaaaaattaaataacaagctattaaaaaacaagagctaattcctaaatttcatttattaattttcattttgttacattttataaaatagatttattttgttatggtttttaatttaatcaacttattctgggttcgccactggtaacgttacttcgacgtaaaaagtgtgtttaaacgaggtaaaaattcaaaaaaatcggtaactagataagggtgtaaactattcaatgaccggagatgtacagtcacaatcactgaatagtttacaactttatttttatattgtaatactgtaaaatcgcagtgtcgtacggatttactaactgtcaaattgcttgtcaaaaattttagtgtgtattgaaaaataaaataagaagttattaaaagcgtccaaactgccgttttaatttaaattttaactcaattttatttaaaaaaatttatttatttttttaattttaactggatattaaagggtgtaaactattcagtgattgtgactgtacataatctgatgcaacctatataaacctcagagttgtaaacctcggagatgcaaaatataaacctcgaaaacgattgtctcggtttagtcaacagatattctgaataagcacattctttctttttatcttggtgcacaatttcaatataaatttacgaagtacgtcgatttgattggtcaaaatggcaatctcaaattagctggttaagagggaggctactatacaatcaaaggtaacaaacatttaagtaagtgctaaatttgtgtcaaaatagtaactggcatgaggtatttcattggaaattgtattgttaagtacctcaagataaagaaatgatcgagtttggtaaaggagacaaagggtatattaaaattcaaacaatataatattcggtaggtatatgaagaaaatggtaacgttaaaaattatgttcagagatgaagaaataagatatatagataaatagataagaagaaaaagatagataaataagaaaaagggacagatgatttaaaaaagataacagttctaagctggaggaatcccactgaaaatacaaaggactgtaattcaattataaattactaaaatcaattttttgaaaattaaaaacaatggaagatttatattatttaataacttatggaagactttagaaggattgctggaaatcacctacaggacagggtaagaagtgaggaatcagacgcatatgtggggtagacaatataaatacctgggtaaagaacagaaaagaagagtggaatcaacacataagcaggatgtctgaatcaaggatagtaagactcgccagggacaagtcaccattgggcagaagaagtacatgacgcccaaggaaaagattgaatgacaatttaggaacagaatgaaaggcatcattgaagaaaaacaggcagtactgcctatataaaaagaaaagaagaagaagaaaaacaatgtttttacgtatacatagtttttaacacgatttttcatcaagtaacagtcgataatatatgtatagaaaaaaatacatacaaaacctaagatgcaaaaaaattgttaaatcaacatgagcttaccaaaaagtaataaaagaaatgctatacaaatagcttaagaacaatacattggaagacgacgagatatttgttaaaaaatgataagtaaaataaaaacactaaacgtaaatgggaatatcaaatttgggacataaatgtataactattagccagtgattattattattatgttgttggtatatcatgaaaacaacatttttaaaagttgcttgttataacgccatattctaaccagtctagtaatatatcctaatgaaataaccaaaatgaccacaaataattttaaatgttcggaacttaagtacttttcctaaaagtatcattatactaatttctacaacagctgctcaggtattgaccaacaaatactataaaaaatttctaataaaaatctaaatcacacaaaaaagtcaatttaccactattaaaaatcgaaaggtcatattaggcctaacataatttaaaaagttttaatcaagcgtaaccgtccagtgtgttaccctttatcatatatcctattagctgaaaaatattaattattaggttatgtatttgaatttagtaggagttcatcctcactgtcgtgccagcctctcctgaaggttatcacgattccaatgatggcgatgagaactcctatgcctagtaaaccataccctgtgtaggcaccgataggggtgagtaacaagactcctttaacggaatcgactaggtcaccggtaagatcggcttgttgagaaaaccaaaacatgggcataactgtcgatttaacattttcaagaattttaatgtgtttcactttttccattttgaggttgagttgaatctgggctctgacagtaaggggtaatcctgtttctggttctaaagctaagaacatttcgtgttgcgtcttatttggttctaaaccttcgatatctgctaaaaaggcgggatctgcttcataaaagtgagggaatgaaactaaagctggagctccatatttgcaaagtgagacatttctgacacccgagagctggtgagtgactcctttacccttaaaacaacccatttcaggatatttggtaccattatcgaaaactttatcggttccaacaaatttgtgccctttcattccttggtattcatagtcgcctctccaatctaattcgattgaactacacaaatcgtttgaaaaaattttaacagtttttttgtcgtgaggaggataccatagttccccttgagtaccttccacttctccacacgtcccttcataataaggcacacgagattcataattccaatttctaactaggcctagagtatcaattgaattagctccattgtccatgttccacattccatcgtatggagctgagtcgtttctgtctacaaaccacccaaattttttaaagggtatcttcaaaccggttatatttaatttttggactagcttaagcaaaggatcgtcgtaaccctcaaaagtgaattcttctacagtcttggtaacagtcaaattgatcttgtattcttccaagaaaaagtctactcctataagtactatgtagtttttgtccttaactaagctggctatcgatgccacaataggattgaaagtcgtgatttgatcagtaagatctcccacggatctttctggtacaaacttccacgtccttctgttgtaaaaggaaattgtggaattatcattaattgtgacattgtccctaacgtggtgttcgtggtaagtataaggcccacattcatcgaagtgcggcttgatagaggaattcctttggtactcttcggaattggtccaattgaaaaaataaaatgagagatagatcggtattggtgtttccttccacatgccgtaggcatttgtgtcctttgaggataaaccaagttcataattcatgactttcttgacaatcattgcccaaaatattgaaaaaaacaaaccgaagattataaacgcggtagcgacaccaaaagttgtccattttttacaggatggcgaacaccgacagcagcccatattgtagt

SEQ ID NO: 1012 - DNA, 4538 bp, Diabrotica virgifera
  SmartBlast Evalue=1E-118; Info=Croquemort n=1 Tax=Tribolium castaneum RepID=D2A0J8_TRICA
attagcaataacggcaattcattcattcatgaagagtaggaaaatgttttagaatggcctaaatggaccataggtactaattggaactatttctgacctcaggtcatcaatatagcatcagttcacacgagagtttgaatgtttctcgaggttgcgtcatttgttttaaagtgcgtactcacatgataaataatattacctcttcattaaaataaaggatgtccccgaaaatagtgcgttcctttaaggtatggatataatacacaatgtagaagaaaaactcctataacattttttctaaatttaaccgtttccaaaaatgattcattgttcgccatataagcgaacttttattttcataaaattaactaatttgtcatcactgtacaagaactgtttgtgatttagtttgaaacaaaacaagaatttgtttgtttgtttaggatgaagacagggtttaatgtgaatacttatggctaaaatgctgcaactatttttgaattgtgattgtctatgtttagatttttgtatacatagttgtcagatttcaatttgcataccaaaatgtattttggttttttagccaaacggttgcatttagaaagaaatgttataagacttttttgctctacatggtgccttctacctatacctttaaggaacgcactattttcggggacaccctgcacattgttttagctgttaaatattatgtacagttgtcgtcactgaatagtttacatcttcatttttacactgtaatacctactgtaaaatcgcaatgtcatacggatatgctaaatgtcaaagggtttgtcaaaaatttcgcgcgtatttaaaaaattaaataacaagctattaaaaaacaagagctaattcctaaatttcatttattaattttcattttgttacattttataaaatagatttattttgttatggtttttaatttaatcaacttattctgggttcgccactggtaacgttacttcgacgtaaaaagtgtgtttaaacgaggtaaaaattcaaaaaaatcggtaactagataagggtgtaaactattcaatgaccggagatgtacagtcacaatcactgaatagtttacaactttatttttatattgtaatactgtaaaatcgcagtgtcgtacggatttactaactgtcaaattgcttgtcaaaaattttagtgtgtattgaaaaataaaataagaagttattaaaagcgtccaaaatgccgttttaatttaaattttaactcaattttattttaaaaaatttattttattttttaaattttaatcaacctattctgggtccgccactggtaacgtcactttgacgtaaaaggtgcgtttaaacgaggtaaaaattcaaaaaattggccactggatattaaagggtgtaaactattcagtgattgtgactgtacataatctgatgcaacctatataaacctcagagttgtaaacctcggagatgcaaaatataaacctcgaaaacgattgtctcggtttagtcaacagatattctgaataagcacattctttctttttatcttggtgcacaatttcaatataaatttacgaagtacgtcgatttgattggtcaaaatggcaatctcaaattagctggttaagagggaggctactatacaatcaaaggtaacaaacatttaagtaagtgctaaatttgtgtcaaaatagtaactggcatgaggtatttcattggaaattgtattgttaagtacctcaagataaagaaatgatcgagtttggtaaaggagacaaagggtatattaaaattcaaacaatataatattcggtaggtatatgaagaaaatggtaacgttaaaaattatgttcagagatgaagaaataagatatatagataaatagataagaagaaaaagatagataaataagaaaaagggacagatgatttaaaaaagataacagttctaagctggaggaatcccactgaaaatacaaaggactgtaattcaattataaattactaaaatcaattttttgaaaattaaaaacaatggaagatttatattatttaataacttatggaagactttagaaggattgctggaaatcacctacaggacagggtaagaagtgaggaatcagacgcatatgtggggtagacaatataaatacctgggtaaagaacagaaaagaagagtggaatcaacacataagcaggatgtctgaatcaaggatagtaagactcgccagggacaagtcaccattgggcagaagaagtacatgacgcccaaggaaaagattgaatgacaatttaggaacagaatgaaaggcatcattgaagaaaaacaggcagtactgcctatataaaaagaaaagaagaagaagaaaaacaatgtttttacgtatacatagtttttaacacgatttttcatcaagtaacagtcgataatatatgtatagaaaaaaatacatacaaaacctaagatgcaaaaaaattgttaaatcaacatgagcttaccaaaaagtaataaaagaaatgctatacaaatagcttaagaacaatacattggaagacgacgagatatttgttaaaaaatgataagtaaaataaaaacactaaacgtaaatgggaatatcaaatttgggacataaatgtataactattagccagtgattattattattatgttgttggtatatcatgaaaacaacatttttaaaagttgcttgttataacgccatattctaaccagtctagtaatatatcctaatgaaataaccaaaatgaccacaaataattttaaatgttcggaacttaagtacttttcctaaaagtatcattatactaatttctacaacagctgctcaggtattgaccaacaaatactataaaaaatttctaataaaaatctaaatcacacaaaaaagtcaatttaccactattaaaaatcgaaaggtcatattaggcctaacataatttaaaaagttttaatcaagcgtaaccgtccagtgtgttaccctttatcatatatcctattagctgaaaaatattaattattaggttatgtatttgaatttagtaggagttcatcctcactgtcgtgccagcctctcctgaaggttatcacgattccaatgatggcgatgagaactcctatgcctagtaaaccataccctgtgtaggcaccgataggggtgagtaacaagactcctttaacggaatcgactaggtcaccggtaagatcggcttgttgagaaaaccaaaacatgggcataactgtcgatttaacattttcaagaattttaatgtgtttcactttttccattttgaggttgagttgaatctgggctctgacagtaaggggtaatcctgtttctggttctaaagctaagaacatttcgtgttgcgtcttatttggttctaaaccttcgatatctgctaaaaaggcgggatctgcttcataaaagtgagggaatgaaactaaagctggagctccatatttgcaaagtgagacatttctgacacccgagagctggtgagtgactcctttacccttaaaacaacccatttcaggatatttggtaccattatcgaaaactttatcggttccaacaaatttgtgccctttcattccttggtattcatagtcgcctctccaatctaattcgattgaactacacaaatcgtttgaaaaaattttaacagtttttttgtcgtgaggaggataccatagttccccttgagtaccttccacttctccacacgtcccttcataataaggcacacgagattcataattccaatttctaactaggcctagagtatcaattgaattagctccattgtccatgttccacattccatcgtatggagctgagtcgtttctgtctacaaaccacccaaattttttaaagggtatcttcaaaccggttatatttaatttttggactagcttaagcaaaggatcgtcgtaaccctcaaaagtgaattcttctacagtcttggtaacagtcaaattgatcttgtattcttccaagaaaaagtctactcctataagtactatgtagtttttgtccttaactaagctggctatcgatgccacaataggattgaaagtcgtgatttgatcagtaagatctcccacggatctttctggtacaaacttccacgtccttctgttgtaaaaggaaattgtggaattatcattaattgtgacattgtccctaacgtggtgttcgtggtaagtataaggcccacattcatcgaagtgcggcttgatagaggaattcctttggtactcttcggaattggtccaattgaaaaaataaaatgagagatagatcggtattggtgtttccttccacatgccgtaggcatttgtgtcctttgaggataaaccaagttcataattcatgactttcttgacaatcattgcccaaaatattgaaaaaaacaaaccgaagattataaacgcggtagcgacaccaaaagttgtccattttttacaggatggcgaacaccgacagcagcccatattgtagt

SEQ ID NO: 1013 - DNA, 4525 bp, Diabrotica virgifera
  SmartBlast Evalue=1E-118; Info=Croquemort n=1 Tax=Tribolium castaneum RepID=D2A0J8_TRICA
attagcaataacggcaattcattcattcatgaagagtaggaaaatgttttagaatggcctaaatggaccataggtactaattggaactatttctgacctcaggtcatcaatatagcatcagttcacacgagagtttgaatgtttctcgaggttgcgtcatttgttttaaagtgcgtactcacatgataaataatattacctcttcattaaaataaaggatgtccccgaaaatagtgcgttcctttaaggtatggatataatacacaatgtagaagaaaaactcctataacattttttctaaatttaaccgtttccaaaaatgattcattgttcgccatataagcgaacttttattttcataaaattaactaatttgtcatcactgtacaagaactgtttgtgatttagtttgaaacaaaacaagaatttgtttgtttgtttaggatgaagacagggtttaatgtgaatacttatggctaaaatgctgcaactatttttgaattgtgattgtctatgtttagatttttgtatacatagttgtcagatttcaatttgcataccaaaatgtattttggttttttagccaaacggttgcatttagaaagaaatgttataagacttttttgctctacatggtgccttctacctatacctttaaggaacgcactattttcggggacaccctgcacattgttttagctgttaaatattatgtacagttgtcgtcactgaatagtttacatcttcatttttacactgtaatacctactgtaaaatcgcaatgtcatacggatatgctaaatgtcaaagggtttgtcaaaaatttcgcgcgtatttaaaaaattaaataacaagctattaaaaaacaagagctaattcctaaatttcatttattaattttcattttgttacattttataaaatagatttattttgttatggtttttaatttaatcaacttattctgggttcgccactggtaacgttacttcgacgtaaaaagtgtgtttaaacgaggtaaaaattcaaaaaaatcggtaactagataagggtgtaaactattcaatgaccggagatgtacagtcacaatcactgaatagtttacaactttatttttatattgtaatactgtaaaatcgcagtgtcgtacggatttactaactgtcaaattgcttgtcaaaaattttagtgtgtattgaaaaataaaataagaagttattaaaagcgtccaaactgccgttttaatttaaattttaactcaattttatttaaaaaaatttatttatttttttaattttaactggatattaaagggtgtaaactattcagtgattgtgactgtacataatctgatgcaacctatataaacctcagagttgtaaacctcggagatgcaaaatataaacctcgaaaacgattgtctcggtttagtcaacagatattctgaataagcacattctttctttttatcttggtgcacaatttcaatataaatttacgaagtacgtcgatttgattggtcaaaatggcaatctcaaattagctggttaagagggaggctactatacaatcaaaggtaacaaacatttaagtaagtgctaaatttgtgtcaaaatagtaactggcatgaggtatttcattggaaattgtattgttaagtacctcaagataaagaaatgatcgagtttggtaaaggagacaaagggtatattaaaattcaaacaatataatattcggtaggtatatgaagaaaatggtaacgttaaaaattatgttcagagatgaagaaataagatatatagataaatagataagaagaaaaagatagataaataagaaaaagggacagatgatttaaaaaagataacagttctaagctggaggaatcccactgaaaatacaaaggactgtaattcaattataaattactaaaatcaattttttgaaaattaaaaacaatggaagatttatattatttaataacttatggaagactttagaaggattgctggaaatcacctacaggacagggtaagaagtgaggaatcagacgcatatgtggggtagacaatataaatacctgggtaaagaacagaaaagaagagtggaatcaacacataagcaggatgtctgaatcaaggatagtaagactcgccagggacaagtcaccattgggcagaagaagtacatgacgcccaaggaaaagattgaatgacaatttaggaacagaatgaaaggcatcattgaagaaaaacaggcagtactgcctatataaaaagaaaagaagaagaagaaaaacaatgtttttacgtatacatagtttttaacacgatttttcatcaagtaacagtcgataatatatgtatagaaaaaaatacatacaaaacctaagatgcaaaaaaattgttaaatcaacatgagcttaccaaaaagtaataaaagaaatgctatacaaatagcttaagaacaatacattggaagacgacgagatatttgttaaaaaatgataagtaaaataaaaacactaaacgtaaatgggaatatcaaatttgggacataaatgtataactattagccagtgattattattattatgttgttggtatatcatgaaaacaacatttttaaaagttgcttgttataacgccatattctaaccagtctagtaatatatcctaatgaaataaccaaaatgaccacaaataattttaaatgttcggaacttaagtacttttcctaaaagtatcattatactaatttctacaacagctgctcaggtattgaccaacaaatactataaaaaatttctaataaaaatctaaatcacacaaaaaagtcaatttaccactattaaaaatcgaaaggtcatattaggcctaacataatttaaaaagttttaatcaagcgtaaccgtccagtgtgttaccctttatcatatatcctattagctgaaaaatattaattattaggttatgtatttgaatttagtaggagttcatcctcactgtcgtgccagcctctcctgaaggttatcacgattccaatgatggcgatgagaactcctatgcctagtaaaccataccctgtgtaggcaccgataggggtgagtaacaagactcctttaacggaatcgactaggtcaccggtaagatcggcttgttgagaaaaccaaaacatgggcataactgtcgatttaacattttcaagaattttaatgtgtttcactttttccattttgaggttgagttgaatctgggctctgacagtaaggggtaatcctgtttctggttctaaagctaagaacatttcgtgttgcgtcttatttggttctaaaccttcgatatctgctaaaaaggcgggatctgcttcataaaagtgagggaatgaaactaaagctggagctccatatttgcaaagtgagacatttctgacacccgagagctggtgagtgactcctttacccttaaaacaacccatttcaggatatttggtaccattatcgaaaactttatcggttccaacaaatttgtgccctttcattccttggtattcatagtcgcctctccaatctaattcgattgaactacacaaatcgtttgaaaaaattttaacagtttttttgtcgtgaggaggataccatagttccccttgagtaccttccacttctccacacgtcccttcataataaggcacacgagattcataattccaatttctaactaggcctagagtatcaattgaattagctccattgtccatgttccacattccatcgtatggagctgagtcgtttctgtctacaaaccacccaaattttttaaagggtatcttcaaaccggttatatttaatttttggactagcttaagcaaaggatcgtcgtaaccctcaaaagtgaattcttctacagtcttggtaacagtcaaattgatcttgtattcttccaagaaaaagtctactcctataagtactatgtagtttttgtccttaactaagctggctatcgatgccacaataggattgaaagtcgtgatttgatcagtaagatctcccacggatctttctggtacaaacttccacgtccttctgttgtaaaaggaaattgtggaattatcattaattgtgacattgtccctaacgtggtgttcgtggtaagtataaggcccacattcatcgaagtgcggcttgatagaggaattcctttggtactcttcggaattggtccaattgaaaaaataaaatgagagatagatcggtattggtgtttccttccacatgccgtaggcatttgtgtcctttgaggataaaccaagttcataattcatgactttcttgacaatcattgcccaaaatattgaaaaaaacaaaccgaagattataaacgcggtagcgacaccaaaagttgtccattttttacaggatggcgaacaccgacagcagcccatattgtagtactattcacttaattaaacaaaggcaacaacatttacataaaatatcctttgtattatgacctaacacaattaa

SEQ ID NO: 1014 - DNA, 4544 bp, Diabrotica virgifera
  SmartBlast Evalue=1E-118; Info=Croquemort n=1 Tax=Tribolium castaneum RepID=D2A0J8_TRICA
caacgtatgggatggataagtgctgaaggcccggcagttttttctcatacagaaaaaataacactaataaggtacaaaaaatattcttgagaacacaatgttgccatcagtgatccagggaggattacacaataacaacttcatcttccaacagaacaattggctgattcatatcagtagaattgttccagaatagttaaagaaactcatgttaatgttcttccgtggacttcccggagttcagaccttaccaccatcgaaaatgtgtgggtagagtagacagacatttaaatgaaagaatcttaggctcactaacggcctgtaaatgtgtatgatagatgactcctcgccttcaataacagccgaatttaagctaagctgtgaaagtatcaacgagactccatgataaagacatctaaaaactgcaaccctaccggaacatatcgacaaggtgaacgatatgattttggaagattcgcatacaaacgatattaaagagttggccacatcttccgacagaaattgaacatgacgaatctttacacaaaatgggtaccacttgcgctcactgaacatcacaaacccattcgcatggcactttctgaatagtatttggcgttttaagaaagacaaaagtggctatttgcgtcaatattttgaaaatacatagactacatgcctaaaatcaaacagcatcttacgtagtgaatatacgtcggttcttcagctctaaagaaggcgaaaatgccagtgccgtaagatctaagtctaaaatctacaacttggcatcattgtaatatcaattatacagggtgtcgtcactgaatagtttacatcttcatttttacactgtaatacctactgtaaaatcgcaatgtcatacggatatgctaaatgtcaaagggtttgtcaaaaatttcgcgcgtatttaaaaaattaaataacaagctattaaaaaacaagagctaattcctaaatttcatttattaattttcattttgttacattttataaaatagatttattttgttatggtttttaatttaatcaacttattctgggttcgccactggtaacgttacttcgacgtaaaaagtgtgtttaaacgaggtaaaaattcaaaaaaatcggtaactagataagggtgtaaactattcaatgaccggagatgtacagtcacaatcactgaatagtttacaactttatttttatattgtaatactgtaaaatcgcagtgtcgtacggatttactaactgtcaaattgcttgtcaaaaattttagtgtgtattgaaaaataaaataagaagttattaaaagcgtccaaactgccgttttaatttaaattttaactcaattttatttaaaaaaatttatttatttttttaattttaactggatattaaagggtgtaaactattcagtgattgtgactgtacataatctgatgcaacctatataaacctcagagttgtaaacctcggagatgcaaaatataaacctcgaaaacgattgtctcggtttagtcaacagatattctgaataagcacattctttctttttatcttggtgcacaatttcaatataaatttacgaagtacgtcgatttgattggtcaaaatggcaatctcaaattagctggttaagagggaggctactatacaatcaaaggtaacaaacatttaagtaagtgctaaatttgtgtcaaaatagtaactggcatgaggtatttcattggaaattgtattgttaagtacctcaagataaagaaatgatcgagtttggtaaaggagacaaagggtatattaaaattcaaacaatataatattcggtaggtatatgaagaaaatggtaacgttaaaaattatgttcagagatgaagaaataagatatatagataaatagataagaagaaaaagatagataaataagaaaaagggacagatgatttaaaaaagataacagttctaagctggaggaatcccactgaaaatacaaaggactgtaattcaattataaattactaaaatcaattttttgaaaattaaaaacaatggaagatttatattatttaataacttatggaagactttagaaggattgctggaaatcacctacaggacagggtaagaagtgaggaatcagacgcatatgtggggtagacaatataaatacctgggtaaagaacagaaaagaagagtggaatcaacacataagcaggatgtctgaatcaaggatagtaagactcgccagggacaagtcaccattgggcagaagaagtacatgacgcccaaggaaaagattgaatgacaatttaggaacagaatgaaaggcatcattgaagaaaaacaggcagtactgcctatataaaaagaaaagaagaagaagaaaaacaatgtttttacgtatacatagtttttaacacgatttttcatcaagtaacagtcgataatatatgtatagaaaaaaatacatacaaaacctaagatgcaaaaaaattgttaaatcaacatgagcttaccaaaaagtaataaaagaaatgctatacaaatagcttaagaacaatacattggaagacgacgagatatttgttaaaaaatgataagtaaaataaaaacactaaacgtaaatgggaatatcaaatttgggacataaatgtataactattagccagtgattattattattatgttgttggtatatcatgaaaacaacatttttaaaagttgcttgttataacgccatattctaaccagtctagtaatatatcctaatgaaataaccaaaatgaccacaaataattttaaatgttcggaacttaagtacttttcctaaaagtatcattatactaatttctacaacagctgctcaggtattgaccaacaaatactataaaaaatttctaataaaaatctaaatcacacaaaaaagtcaatttaccactattaaaaatcgaaaggtcatattaggcctaacataatttaaaaagttttaatcaagcgtaaccgtccagtgtgttaccctttatcatatatcctattagctgaaaaatattaattattaggttatgtatttgaatttagtaggagttcatcctcactgtcgtgccagcctctcctgaaggttatcacgattccaatgatggcgatgagaactcctatgcctagtaaaccataccctgtgtaggcaccgataggggtgagtaacaagactcctttaacggaatcgactaggtcaccggtaagatcggcttgttgagaaaaccaaaacatgggcataactgtcgatttaacattttcaagaattttaatgtgtttcactttttccattttgaggttgagttgaatctgggctctgacagtaaggggtaatcctgtttctggttctaaagctaagaacatttcgtgttgcgtcttatttggttctaaaccttcgatatctgctaaaaaggcgggatctgcttcataaaagtgagggaatgaaactaaagctggagctccatatttgcaaagtgagacatttctgacacccgagagctggtgagtgactcctttacccttaaaacaacccatttcaggatatttggtaccattatcgaaaactttatcggttccaacaaatttgtgccctttcattccttggtattcatagtcgcctctccaatctaattcgattgaactacacaaatcgtttgaaaaaattttaacagtttttttgtcgtgaggaggataccatagttccccttgagtaccttccacttctccacacgtcccttcataataaggcacacgagattcataattccaatttctaactaggcctagagtatcaattgaattagctccattgtccatgttccacattccatcgtatggagctgagtcgtttctgtctacaaaccacccaaattttttaaagggtatcttcaaaccggttatatttaatttttggactagcttaagcaaaggatcgtcgtaaccctcaaaagtgaattcttctacagtcttggtaacagtcaaattgatcttgtattcttccaagaaaaagtctactcctataagtactatgtagtttttgtccttaactaagctggctatcgatgccacaataggattgaaagtcgtgatttgatcagtaagatctcccacggatctttctggtacaaacttccacgtccttctgttgtaaaaggaaattgtggaattatcattaattgtgacattgtccctaacgtggtgttcgtggtaagtataaggcccacattcatcgaagtgcggcttgatagaggaattcctttggtactcttcggaattggtccaattgaaaaaataaaatgagagatagatcggtattggtgtttccttccacatgccgtaggcatttgtgtcctttgaggataaaccaagttcataattcatgactttcttgacaatcattgcccaaaatattgaaaaaaacaaaccgaagattataaacgcggtagcgacaccaaaagttgtccattttttacaggatggcgaacaccgacagcagcccatattgtagt

SEQ ID NO: 1015 - DNA, 4451 bp, Diabrotica virgifera
  SmartBlast Evalue=1E-118; Info=Croquemort n=1 Tax=Tribolium castaneum RepID=D2A0J8_TRICA
attagcaataacggcaattcattcattcatgaagagtaggaaaatgttttagaatggcctaaatggaccataggtactaattggaactatttctgacctcaggtcatcaatatagcatcagttcacacgagagtttgaatgtttctcgaggttgcgtcatttgttttaaagtgcgtactcacatgataaataatattacctcttcattaaaataaaggatgtccccgaaaatagtgcgttcctttaaggtatggatataatacacaatgtagaagaaaaactcctataacattttttctaaatttaaccgtttccaaaaatgattcattgttcgccatataagcgaacttttattttcataaaattaactaatttgtcatcactgtacaagaactgtttgtgatttagtttgaaacaaaacaagaatttgtttgtttgtttaggatgaagacagggtttaatgtgaatacttatggctaaaatgctgcaactatttttgaattgtgattgtctatgtttagatttttgtatacatagttgtcagatttcaatttgcataccaaaatgtattttggttttttagccaaacggttgcatttagaaagaaatgttataagacttttttgctctacatggtgccttctacctatacctttaaggaacgcactattttcggggacaccctgcacattgttttagctgttaaatattatgtacagttgtcgtcactgaatagtttacatcttcatttttacactgtaatacctactgtaaaatcgcaatgtcatacggatatgctaaatgtcaaagggtttgtcaaaaatttcgcgcgtatttaaaaaattaaataacaagctattaaaaaacaagagctaattcctaaatttcatttattaattttcattttgttacattttataaaatagatttattttgttatggtttttaatttaatcaacttattctgggttcgccactggtaacgttacttcgacgtaaaaagtgtgtttaaacgaggtaaaaattcaaaaaaatcggtaactagataagggtgtaaactattcaatgaccggagatgtacagtcacaatcactgaatagtttacaactttatttttatattgtaatactgtaaaatcgcagtgtcgtacggatttactaactgtcaaattgcttgtcaaaaattttagtgtgtattgaaaaataaaataagaagttattaaaagcgtccaaactgccgttttaatttaaattttaactcaattttatttaaaaaaatttatttatttttttaattttaactggatattaaagggtgtaaactattcagtgattgtgactgtacataatctgatgcaacctatataaacctcagagttgtaaacctcggagatgcaaaatataaacctcgaaaacgattgtctcggtttagtcaacagatattctgaataagcacattctttctttttatcttggtgcacaatttcaatataaatttacgaagtacgtcgatttgattggtcaaaatggcaatctcaaattagctggttaagagggaggctactatacaatcaaaggtaacaaacatttaagtaagtgctaaatttgtgtcaaaatagtaactggcatgaggtatttcattggaaattgtattgttaagtacctcaagataaagaaatgatcgagtttggtaaaggagacaaagggtatattaaaattcaaacaatataatattcggtaggtatatgaagaaaatggtaacgttaaaaattatgttcagagatgaagaaataagatatatagataaatagataagaagaaaaagatagataaataagaaaaagggacagatgatttaaaaaagataacagttctaagctggaggaatcccactgaaaatacaaaggactgtaattcaattataaattactaaaatcaattttttgaaaattaaaaacaatggaagatttatattatttaataacttatggaagactttagaaggattgctggaaatcacctacaggacagggtaagaagtgaggaatcagacgcatatgtggggtagacaatataaatacctgggtaaagaacagaaaagaagagtggaatcaacacataagcaggatgtctgaatcaaggatagtaagactcgccagggacaagtcaccattgggcagaagaagtacatgacgcccaaggaaaagattgaatgacaatttaggaacagaatgaaaggcatcattgaagaaaaacaggcagtactgcctatataaaaagaaaagaagaagaagaaaaacaatgtttttacgtatacatagtttttaacacgatttttcatcaagtaacagtcgataatatatgtatagaaaaaaatacatacaaaacctaagatgcaaaaaaattgttaaatcaacatgagcttaccaaaaagtaataaaagaaatgctatacaaatagcttaagaacaatacattggaagacgacgagatatttgttaaaaaatgataagtaaaataaaaacactaaacgtaaatgggaatatcaaatttgggacataaatgtataactattagccagtgattattattattatgttgttggtatatcatgaaaacaacatttttaaaagttgcttgttataacgccatattctaaccagtctagtaatatatcctaatgaaataaccaaaatgaccacaaataattttaaatgttcggaacttaagtacttttcctaaaagtatcattatactaatttctacaacagctgctcaggtattgaccaacaaatactataaaaaatttctaataaaaatctaaatcacacaaaaaagtcaatttaccactattaaaaatcgaaaggtcatattaggcctaacataatttaaaaagttttaatcaagcgtaaccgtccagtgtgttaccctttatcatatatcctattagctgaaaaatattaattattaggttatgtatttgaatttagtaggagttcatcctcactgtcgtgccagcctctcctgaaggttatcacgattccaatgatggcgatgagaactcctatgcctagtaaaccataccctgtgtaggcaccgataggggtgagtaacaagactcctttaacggaatcgactaggtcaccggtaagatcggcttgttgagaaaaccaaaacatgggcataactgtcgatttaacattttcaagaattttaatgtgtttcactttttccattttgaggttgagttgaatctgggctctgacagtaaggggtaatcctgtttctggttctaaagctaagaacatttcgtgttgcgtcttatttggttctaaaccttcgatatctgctaaaaaggcgggatctgcttcataaaagtgagggaatgaaactaaagctggagctccatatttgcaaagtgagacatttctgacacccgagagctggtgagtgactcctttacccttaaaacaacccatttcaggatatttggtaccattatcgaaaactttatcggttccaacaaatttgtgccctttcattccttggtattcatagtcgcctctccaatctaattcgattgaactacacaaatcgtttgaaaaaattttaacagtttttttgtcgtgaggaggataccatagttccccttgagtaccttccacttctccacacgtcccttcataataaggcacacgagattcataattccaatttctaactaggcctagagtatcaattgaattagctccattgtccatgttccacattccatcgtatggagctgagtcgtttctgtctacaaaccacccaaattttttaaagggtatcttcaaaccggttatatttaatttttggactagcttaagcaaaggatcgtcgtaaccctcaaaagtgaattcttctacagtcttggtaacagtcaaattgatcttgtattcttccaagaaaaagtctactcctataagtactatgtagtttttgtccttaactaagctggctatcgatgccacaataggattgaaagtcgtgatttgatcagtaagatctcccacggatctttctggtacaaacttccacgtccttctgttgtaaaaggaaattgtggaattatcattaattgtgacattgtccctaacgtggtgttcgtggtaagtataaggcccacattcatcgaagtgcggcttgatagaggaattcctttggtactcttcggaattggtccaattgaaaaaataaaatgagagatagatcggtattggtgtttccttccacatgccgtaggcatttgtgtcctttgaggataaaccaagttcataattcatgactttcttgacaatcattgcccaaaatattgaaaaaaacaaaccgaagattataaacgcggtagcgacaccaaaagttgtccattttttacaggatggcgaacaccgacagcagcccatattgtagt

SEQ ID NO: 1016 - DNA, 3326 bp, Diabrotica virgifera
  SmartBlast Evalue=1E-25; Info=Endonuclease-reverse transcriptase n=1 Tax=Bombyx mori RepID=D5LB38_BOMMO
ttttggtggatggaggttaaaattacttctcattttttcttaaaatgcattggttatcaattttgtttgcagaatatctcgcttagttttaatgtaatggacctttaatattgcttattttaaaggtcttttcaagcactacaaaaggtattagtagcattacacacctaaaatcgaccgtttctcgtgttattttaagttgaatacaccaatttgataatgtaccaaaaaaaactgtttcacctaccatatttctttttgtattataactaaaaaaaattcattaaaatccatgcagtaggatataattcggaggtaatatcctattttgctcccattgactggcgtattacagcaatatctgctattaatctaattttaaggtttaaagtaatatttctagtaatgagaattttctttactttatagaaggctgctctggctttttcgatgcgtattcttatttctttgtttttatctcagttactccgatgcttcgaggggcataaggagtgtcgagaaagaagaagatatcccagttatcgttaactttggcacccaaataggtgatattttggactctttctaactttattccatacaacaaccataaatttggtcttgaagtattgttttagcccatattaaacacatgtttcggtcatcctgtttgtaagtcgttaaactctttggaagcaattagtaccgtgtcgtcttcgtaactgagatggttgacattaattccgttgattttaatgcttgcatcttcatctaaggcttctttgaaaataaattttgagtatatattaaacaatagaggcaatataatacacccttgcctcactccacgttgtatttccactgcgtccgtcgtgttctggccaactggtatgtttgcacaaggatgccaatacaaatttttgataataccgaggtcttcgtcatcaattcccacttcttgcaagccacctatcagtttgtcgtggatgaagtgtttgcatttaattccctttttgatcactgtttttaaaaatattgttttattatcgataagttgtcattttgacaaccatattatgtcaagtgattaaaaagcagcttaacacattgattgttaacacgaagtgaacattattaacacattcgcggtcatgactgcatatgaagtcatttactccataagaatacgtgtataaaatgacagcgtgtccgcgaacgtgttaagaatgtttgacttggtcatatcactttccaaaatcaaattgtattaagttattctgaaattatattagacagtacatcccgaattgtacggatttcttttagaccaatgttatgaaatacgatccaagcagcatgtttagttgtcactagaatataaagttttaaatatcaataggtaattgacatttcaaaaatatcggtgtaaataatatgtaggtacatatattgaatgtatatagacgttatagatccatacttgttccttcttttttttagctcaagaccagtttttatattttaaaacttccctcaaaatttttgcttgtttccttttccttctctttaacctcttcatccaagcacttgagtcatcgttacctgttcttcattggacagtttggtttagcttattccatattaattccttaagatcacactaaatcttttcgttccagttgatattgggattctatatttcacaatttgaagactaaaattatcagaagtgttaaaaaatggggttaagagtcatctggaatattatgcaatgtttagggtatctgtagagtctcaaagtagtcttttataatttaagattctcctgtattattgtaggtgtctccggaagacttcgtggtattttgaaatgtttgaaaagtggacgtcagtagtatgaaatgttcaggtattactgtaaaaggtttgatatttatccgaaaggagcctgtttgaatattctcctggaaggttttagagatctctgtagggtatcagaacagtctaaaatgttccaggagtaccaaattctttttttccttcatatattctagaaaacgtaaacctgctacttgagacaatcattgtaaattgtaaaatcactgtaaaatgtaagagttaagaatttagaaaatatatcggttgatgtttccttgttatgtgtacttatagaataaatttattttaaacactgttgtagtgagcagatagactgtttgattcaaagtttagtgatattttacctatcagaacctagaaaaacaaagttattgtctcctgtaaattccttgagcccaaaatgttgactatacaggttgtcgccgaaaatagtgcgttcctttaaggtatggatataatacacaatttagaacaaaaaagtcctataacatttttttctaaagttaaccatttccaaaaaaaaatcacattgttcgccatataagcgaacttttattttcataaaattaactaatttggcatcactgtacaagaactgtttgtgatttagtttattgacaccacaaatgtaggtcagacaggtacacctgcaaaataattgtaccaccccatgtttgaaaatccaacaaaacaagaatttgtttgtttgtttaggatgaagacagggtttaatgtgaatacttatggctaaaatgctgcaactatttttgaattgtgattgtctatgtttagatttttgtatacatagttgtcagatttcaatttgcataccaaaatgtattttggttttttagccaaacggttgcatttagaaagaaatgttataagacttttttgctctacatggtgccttctacctatacctttaaggaacgcactattttcggggacaccctgtatactgctctgattctatgcagaggttgctgagaaaagttttaaaaatcaaaaaaacgagctgaactattatatagataaattgcgttaatattattaatattgcacatatttatatgggtttggtaggctacaataattgtacaaaatcgtaatataattctagtagctaaatattaatcaacactattcattgtcctggactttctctattaacttttgacatgttagtaacattcattctatgtgtagctttaatcataatataatttatagatttattcgctctgaatgttgatccatcacaatttggcaaaatttcatatacacaagtattcttagaaacaatttcaatcctcgatcaaatattttaataggagagtgaacagtggacccttaaacaacaaataacactaaacttcggaaaaataaataaatctaaaaaatagttgtacttcaacatttagttt

SEQ ID NO: 1017 - DNA, 3126 bp, Diabrotica virgifera
  SmartBlast Evalue=7E-23; Info=Endonuclease-reverse transcriptase n=1 Tax=Bombyx mori RepID=D7F170_BOMMO
attagcaataacggcaattcattcattcatgaagagtaggaaaatgttttagaatggcctaaatggaccataggtactaattggaactatttctgacctcaggtcatcaatatagcatcagttcacacgagagtttgaatgtttctcgaggttgcgtcatttgttttaaagtgcgtactcacatgataaataatattacctcttcattaaaataaaggatgtccccgaaaatagtgcgttcctttaaggtatggatataatacacaatgtagaagaaaaactcctataacattttttctaaatttaaccgtttccaaaaatgattcattgttcgccatataagcgaacttttattttcataaaattaactaatttgtcatcactgtacaagaactgtttgtgatttagtttgaaacaaaacaagaatttgtttgtttgtttaggatgaagacagggtttaatgtgaatacttatggctaaaatgctgcaactatttttgaattgtgattgtctatgtttagatttttgtatacatagttgtcagatttcaatttgcataccaaaatgtattttggttttttagccaaacggttgcatttagaaagaaatgttataagacttttttgctctacatggtgccttctacctatacctttaaggaacgcactattttcggggacaccctgtatagaaaataacattcttgaatagtgttcacacaatatattcccaattatgaatgtttgttggtcctatccgactatttcccattgtctcactctcattttctccagatcttatttgactgcatctttccacctttttgtagatcgtcctacagaccttcttccatctggtatttcccaaaacacattgtttatgaggcgattatcgttattacgtatgacatgttctgcccatcttagtctattggcctttatatatctgactagattttcctttccaaagagagagactttaacttattgtatctgagcctccattcgtttgtcacgctatctctacaagggccatacatcatttgaaggattttacgttcccacaccagcaatttatttacttatttatttgttagcgtccatgtttcgcttccatacgcgactgctcgtagtattatggtcttataaatctggatttttgcatctcatgagaggtttgacttcattatatgttgcattgcgaagaaagatctgtttcccaccattattcgtgtttcaacttctagttctatttcgttatcattgatattgttgctcctagatatttacattctttgaccactttgaagttatgatcgtttatagtaatattttgccttattcgcctatggtggcgggggtggttaccccctatgatggcgttgattaagtcgaacattattaccagatatatatttatttatcaacactaactataccagtaacgagttggtgggcaaagtctatattctaactacttgatgtcttaataacgaataaagaatgatctgcaatactttgtccgtatctataaataaactcgtaattgtttttattatgattgccgacaccgaatcgaccgtgaaatattaataatatcaaaatagctgaaattctcgaaacgagtgccctacattgtgccatcaatgtcacctagttattctactaaaaacagtaatgcttgtgtaagacctttaaaaattaaatcgatatgaattgttcttaattttttagatgctaatataaatcctgtacacgccgtcgtttttgttttgaaacgaccatgtattttgttctgtcttcttttactgtcagcccaatatttaatgcagctctttcaaagctcgagaaaatatcctaacttctaattttgattgtgtcattggcaaaaacgagtacgatttttcctccccgagcaactatgtctgatttgattgttggataaattcttcgcatgacatattctaaggccaggtaaacaacaatgggtaaacagaatttacacagaaagcatttgatattttcccccctattctaacttgtgcaaaggagttacttacacacatttgagttaccgcagttagtttcttatgtacttatgcccagctcaactactgcattccgtaatgttggacgattaattgaatcataagcctgtttgttaagatctctgatgcacgtcttgattatactcctaatactgttcaagcatttgtctaatagtaaatatttatttatttatttattcttcttttatagttcgaacactattcctttttcctttcttatgtattggtgcaataatactaccacaccattgtttaggcattatttcttgttgccaggccttttctgttaattgatgcattttacttaccgagttcatgaccgccttttttaattgacttggcatcaatattgtccagatcaggggttttatcgtttttaagcgtttctttgacatttctaatttcttctcgacttggtgggggtatttcaaattcgacagtttgatactcatttctgttatttccatcattttcatccttttcttcaaagaaattttggataatcaggagctcttcaaagtattcagaccatcatagttattcccctatttgccctattatattgctagaatgttccaatcaaaatatgttctaattgattatttcttctttcatcgtttgatctccatgttgccttgtggatcttttttctagcaagctgagtgagagtatagtaataaattgaaataacttatacattactgcagctttatttttgcttctgtattttcatacactttcatatgacttctaaccttgcgatacacaggaaaatttgatactttgtgtttcttcgttctagtcaaaaatgcattactttacacttcacaaccaaagacgtattattatgcattatgtaagcgttgagcacaccatttgaagtgtttataaagtgtgtccaccaagaatgttcgataatataaaataactttatcttttactcttagtatattatcacattcctcgaattgaaaacaattatatgttttgcatttttgtaatcattgggaagctatttcgtattgtaaccaatttctctataaataatgtatatattt

SEQ ID NO: 1018 - DNA, 6782 bp, Diabrotica virgifera
  SmartBlast Evalue=1E-118; Info=Croquemort n=1 Tax=Tribolium castaneum RepID=D2A0J8_TRICA
ttttggtggatggaggttaaaattacttctcattttttcttaaaatgcattggttatcaattttgtttgcagaatatctcgcttagttttaatgtaatggacctttaatattgcttattttaaaggtcttttcaagcactacaaaaggtattagtagcattacacacctaaaatcgaccgtttctcgtgttattttaagttgaatacaccaatttgataatgtaccaaaaaaaactgtttcacctaccatatttctttttgtattataactaaaaaaaattcattaaaatccatgcagtaggatataattcggaggtaatatcctattttgctcccattgactggcgtattacagcaatatctgctattaatctaattttaaggtttaaagtaatatttctagtaatgagaattttctttactttatagaaggctgctctggctttttcgatgcgtattcttatttctttgtttttatctcagttactccgatgcttcgaggggcataaggagtgtcgagaaagaagaagatatcccagttatcgttaactttggcacccaaataggtgatattttggactctttctaactttattccatacaacaaccataaatttggtcttgaagtattgttttagcccatattaaacacatgtttcggtcatcctgtttgtaagtcgttaaactctttggaagcaattagtaccgtgtcgtcttcgtaactgagatggttgacattaattccgttgattttaatgcttgcatcttcatctaaggcttctttgaaaataaattttgagtatatattaaacaatagaggcaatataatacacccttgcctcactccacgttgtatttccactgcgtccgtcgtgttctggccaactggtatgtttgcacaaggatgccaatacaaatttttgataataccgaggtcttcgtcatcaattcccacttcttgcaagccacctatcagtttgtcgtggatgaagtgtttgcatttaattccctttttgatcactgtttttaaaaatattgttttattatcgataagttgtcattttgacaaccatattatgtcaagtgattaaaaagcagcttaacacattgattgttaacacgaagtgaacattattaacacattcgcggtcatgactgcatatgaagtcatttactccataagaatacgtgtataaaatgacagcgtgtccgcgaacgtgttaagaatgtttgacttggtcatatcactttccaaaatcaaattgtattaagttattctgaaattatattagacagtacatcccgaattgtacggatttcttttagaccaatgttatgaaatacgatccaagcagcatgtttagttgtcactagaatataaagttttaaatatcaataggtaattgacatttcaaaaatatcggtgtaaataatatgtaggtacatatattgaatgtatatagacgttatagatccatacttgttccttcttttttttagctcaagaccagtttttatattttaaaacttccctcaaaatttttgcttgtttccttttccttctctttaacctcttcatccaagcacttgagtcatcgttacctgttcttcattggacagtttggtttagcttattccatattaattccttaagatcacactaaatcttttcgttccagttgatattgggattctatatttcacaatttgaagactaaaattatcagaagtgttaaaaaatggggttaagagtcatctggaatattatgcaatgtttagggtatctgtagagtctcaaagtagtcttttataatttaagattctcctgtattattgtaggtgtctccggaagacttcgtggtattttgaaatgtttgaaaagtggacgtcagtagtatgaaatgttcaggtattactgtaaaaggtttgatatttatccgaaaggagcctgtttgaatattctcctggaaggttttagagatctctgtagggtatcagaacagtctaaaatgttccaggagtaccaaattctttttttccttcatatattctagaaaacgtaaacctgctacttgagacaatcattgtaaattgtaaaatcactgtaaaatgtaagagttaagaatttagaaaatatatcggttgatgtttccttgttatgtgtacttatagaataaatttattttaaacactgttgtagtgagcagatagactgtttgattcaaagtttagtgatattttacctatcagaacctagaaaaacaaagttattgtctcctgtaaattccttgagcccaaaatgttgactatacaggttgtcgccgaaaatagtgcgttcctttaaggtatggatataatacacaatttagaacaaaaaagtcctataacatttttttctaaagttaaccatttccaaaaaaaaatcacattgttcgccatataagcgaacttttattttcataaaattaactaatttggcatcactgtacaagaactgtttgtgatttagtttattgacaccacaaatgtaggtcagacaggtacacctgcaaaataattgtaccaccccatgtttgaaaatccaacaaaacaagaatttgtttgtttgtttaggatgaagacagggtttaatgtgaatacttatggctaaaatgctgcaactatttttgaattgtgattgtctatgtttagatttttgtatacatagttgtcagatttcaatttgcataccaaaatgtattttggttttttagccaaacggttgcatttagaaagaaatgttataagacttttttgctctacatggtgccttctacctatacctttaaggaacgcactattttcggggacaccctgcacattgttttagctgttaaatattatgtacagttgtcgtcactgaatagtttacatcttcatttttacactgtaatacctactgtaaaatcgcaatgtcatacggatatgctaaatgtcaaagggtttgtcaaaaatttcgcgcgtatttaaaaaattaaataacaagctattaaaaaacaagagctaattcctaaatttcatttattaattttcattttgttacattttataaaatagatttattttgttatggtttttaatttaatcaacttattctgggttcgccactggtaacgttacttcgacgtaaaaagtgtgtttaaacgaggtaaaaattcaaaaaaatcggtaactagataagggtgtaaactattcaatgaccggagatgtacagtcacaatcactgaatagtttacaactttatttttatattgtaatactgtaaaatcgcagtgtcgtacggatttactaactgtcaaattgcttgtcaaaaattttagtgtgtattgaaaaataaaataagaagttattaaaagcgtccaaaatgccgttttaatttaaattttaactcaattttattttaaaaaatttattttattttttaaattttaatcaacctattctgggtccgccactggtaacgtcactttgacgtaaaaggtgcgtttaaacgaggtaaaaattcaaaaaattggccactggatattaaagggtgtaaactattcagtgattgtgactgtacataatctgatgcaacctatataaacctcagagttgtaaacctcggagatgcaaaatataaacctcgaaaacgattgtctcggtttagtcaacagatattctgaataagcacattctttctttttatcttggtgcacaatttcaatataaatttacgaagtacgtcgatttgattggtcaaaatggcaatctcaaattagctggttaagagggaggctactatacaatcaaaggtaacaaacatttaagtaagtgctaaatttgtgtcaaaatagtaactggcatgaggtatttcattggaaattgtattgttaagtacctcaagataaagaaatgatcgagtttggtaaaggagacaaagggtatattaaaattcaaacaatataatattcggtaggtatatgaagaaaatggtaacgttaaaaattatgttcagagatgaagaaataagatatatagataaatagataagaagaaaaagatagataaataagaaaaagggacagatgatttaaaaaagataacagttctaagctggaggaatcccactgaaaatacaaaggactgtaattcaattataaattactaaaatcaattttttgaaaattaaaaacaatggaagatttatattatttaataacttatggaagactttagaaggattgctggaaatcacctacaggacagggtaagaagtgaggaatcagacgcatatgtggggtagacaatataaatacctgggtaaagaacagaaaagaagagtggaatcaacacataagcaggatgtctgaatcaaggatagtaagactcgccagggacaagtcaccattgggcagaagaagtacatgacgcccaaggaaaagattgaatgacaatttaggaacagaatgaaaggcatcattgaagaaaaacaggcagtactgcctatataaaaagaaaagaagaagaagaaaaacaatgtttttacgtatacatagtttttaacacgatttttcatcaagtaacagtcgataatatatgtatagaaaaaaatacatacaaaacctaagatgcaaaaaaattgttaaatcaacatgagcttaccaaaaagtaataaaagaaatgctatacaaatagcttaagaacaatacattggaagacgacgagatatttgttaaaaaatgataagtaaaataaaaacactaaacgtaaatgggaatatcaaatttgggacataaatgtataactattagccagtgattattattattatgttgttggtatatcatgaaaacaacatttttaaaagttgcttgttataacgccatattctaaccagtctagtaatatatcctaatgaaataaccaaaatgaccacaaataattttaaatgttcggaacttaagtacttttcctaaaagtatcattatactaatttctacaacagctgctcaggtattgaccaacaaatactataaaaaatttctaataaaaatctaaatcacacaaaaaagtcaatttaccactattaaaaatcgaaaggtcatattaggcctaacataatttaaaaagttttaatcaagcgtaaccgtccagtgtgttaccctttatcatatatcctattagctgaaaaatattaattattaggttatgtatttgaatttagtaggagttcatcctcactgtcgtgccagcctctcctgaaggttatcacgattccaatgatggcgatgagaactcctatgcctagtaaaccataccctgtgtaggcaccgataggggtgagtaacaagactcctttaacggaatcgactaggtcaccggtaagatcggcttgttgagaaaaccaaaacatgggcataactgtcgatttaacattttcaagaattttaatgtgtttcactttttccattttgaggttgagttgaatctgggctctgacagtaaggggtaatcctgtttctggttctaaagctaagaacatttcgtgttgcgtcttatttggttctaaaccttcgatatctgctaaaaaggcgggatctgcttcataaaagtgagggaatgaaactaaagctggagctccatatttgcaaagtgagacatttctgacacccgagagctggtgagtgactcctttacccttaaaacaacccatttcaggatatttggtaccattatcgaaaactttatcggttccaacaaatttgtgccctttcattccttggtattcatagtcgcctctccaatctaattcgattgaactacacaaatcgtttgaaaaaattttaacagtttttttgtcgtgaggaggataccatagttccccttgagtaccttccacttctccacacgtcccttcataataaggcacacgagattcataattccaatttctaactaggcctagagtatcaattgaattagctccattgtccatgttccacattccatcgtatggagctgagtcgtttctgtctacaaaccacccaaattttttaaagggtatcttcaaaccggttatatttaatttttggactagcttaagcaaaggatcgtcgtaaccctcaaaagtgaattcttctacagtcttggtaacagtcaaattgatcttgtattcttccaagaaaaagtctactcctataagtactatgtagtttttgtccttaactaagctggctatcgatgccacaataggattgaaagtcgtgatttgatcagtaagatctcccacggatctttctggtacaaacttccacgtccttctgttgtaaaaggaaattgtggaattatcattaattgtgacattgtccctaacgtggtgttcgtggtaagtataaggcccacattcatcgaagtgcggcttgatagaggaattcctttggtactcttcggaattggtccaattgaaaaaataaaatgagagatagatcggtattggtgtttccttccacatgccgtaggcatttgtgtcctttgaggataaaccaagttcataattcatgactttcttgacaatcattgcccaaaatattgaaaaaaacaaaccgaagattataaacgcggtagcgacaccaaaagttgtccattttttacaggatggcgaacaccgacagcagcccatattgtagtactattcacttaattaaacaaaggcaacaacatttacataaaatatcctttgtattatgacctaacacaattaa

SEQ ID NO: 1019 - DNA, 1156 bp, Diabrotica virgifera
attagcaataacggcaattcattcattcatgaagagtaggaaaatgttttagaatggcctaaatggaccataggtactaattggaactatttctgacctcaggtcatcaatatagcatcagttcacacgagagtttgaatgtttctcgaggttgcgtcatttgttttaaagtgcgtactcacatgataaataatattacctcttcattaaaataaaggatgtccccgaaaatagtgcgttcctttaaggtatggatataatacacaatgtagaagaaaaactcctataacattttttctaaatttaaccgtttccaaaaatgattcattgttcgccatataagcgaacttttattttcataaaattaactaatttgtcatcactgtacaagaactgtttgtgatttagtttgaaacaaaacaagaatttgtttgtttgtttaggatgaagacagggtttaatgtgaatacttatggctaaaatgctgcaactatttttgaattgtgattgtctatgtttagatttttgtatacatagttgtcagatttcaatttgcataccaaaatgtattttggttttttagccaaacggttgcatttagaaagaaatgttataagacttttttgctctacatggtgccttctacctatacctttaaggaacgcactattttcggggacaccctgtatactgctctgattctatgcagaggttgctgagaaaagttttaaaaatcaaaaaaacgagctgaactattatatagataaattgcgttaatattattaatattgcacatatttatatgggtttggtaggctacaataattgtacaaaatcgtaatataattctagtagctaaatattaatcaacactattcattgtcctggactttctctattaacttttgacatgttagtaacattcattctatgtgtagctttaatcataatataatttatagatttattcgctctgaatgttgatccatcacaatttggcaaaatttcatatacacaagtattcttagaaacaatttcaatcctcgatcaaatattttaataggagagtgaacagtggacccttaaacaacaaataacactaaacttcggaaaaataaataaatctaaaaaatagttgtacttcaacatttagttt

SEQ ID NO: 1020 - DNA, 982 bp, Diabrotica virgifera
  SmartBlast Evalue=2E-17; Info=Endonuclease-reverse transcriptase n=1 Tax=Bombyx mori RepID=D5LB38_BOMMO
ttttggtggatggaggttaaaattacttctcattttttcttaaaatgcattggttatcaattttgtttgcagaatatctcgcttagttttaatgtaatggacctttaatattgcttattttaaaggtcttttcaagcactacaaaaggtattagtagcattacacacctaaaatcgaccgtttctcgtgttattttaagttgaatacaccaatttgataatgtaccaaaaaaaactgtttcacctaccatatttctttttgtattataactaaaaaaaattcattaaaatccatgcagtaggatataattcggaggtaatatcctattttgctcccattgactggcgtattacagcaatatctgctattaatctaattttaaggtttaaagtaatatttctagtaatgagaattttctttactttatagaaggctgctctggctttttcgatgcgtattcttatttctttgtttttatctcagttactccgatgcttcgaggggcataaggagtgtcgagaaagaagaagatatcccagttatcgttaactttggcacccaaataggtgatattttggactctttctaactttattccatacaacaaccataaatttggtcttgaagtattgttttagcccatattaaacacatgtttcggtcatcctgtttgtaagtcgttaaactctttggaagcaattagtaccgtgtcgtcttcgtaactgagatggttgacattaattccgttgattttaatgcttgcatcttcatctaaggcttctttgaaaataaattctgagtgtatattaaaaagtagaggcaataaaatacactcttgcctcagttcacttcgaatttctactgcttccgtcgtgttctgattgatgtcaatacaaatttttgaaaatacggaggttttggtcatcatttcccgcctgttgcaagacacataatatatcagtctgttgtaggttacccggtc

SEQ ID NO: 1021 - DNA, 383 bp, Diabrotica virgifera
ttttggtggatggaggttaaaattacttctcattttttcttaaaatgcattggttatcaattttgtttgcagaatatctcgcttagttttaatgtaatggacctttaatattgcttattttaaaggtcttttcaagcactacaaaaggtattagtagcattacacacctaaaatcgaccgtttctcgtgttattttaagttgaatacaccaatttgataatgtaccaaaaaaaaaactatttcacctaccatatttctttttgtattataactaaaaaaattttcattaaaatccatgcagtaggatggaattcggaggtaatatcctatttttgctcccattgactggcgtattacagcaatgtctgctactgcaagcgcca

SEQ ID NO: 1022 - DNA, 6708 bp, Diabrotica virgifera
  SmartBlast Evalue=1E-118; Info=Croquemort n=1 Tax=Tribolium castaneum RepID=D2A0J8_TRICA
ttttggtggatggaggttaaaattacttctcattttttcttaaaatgcattggttatcaattttgtttgcagaatatctcgcttagttttaatgtaatggacctttaatattgcttattttaaaggtcttttcaagcactacaaaaggtattagtagcattacacacctaaaatcgaccgtttctcgtgttattttaagttgaatacaccaatttgataatgtaccaaaaaaaactgtttcacctaccatatttctttttgtattataactaaaaaaaattcattaaaatccatgcagtaggatataattcggaggtaatatcctattttgctcccattgactggcgtattacagcaatatctgctattaatctaattttaaggtttaaagtaatatttctagtaatgagaattttctttactttatagaaggctgctctggctttttcgatgcgtattcttatttctttgtttttatctcagttactccgatgcttcgaggggcataaggagtgtcgagaaagaagaagatatcccagttatcgttaactttggcacccaaataggtgatattttggactctttctaactttattccatacaacaaccataaatttggtcttgaagtattgttttagcccatattaaacacatgtttcggtcatcctgtttgtaagtcgttaaactctttggaagcaattagtaccgtgtcgtcttcgtaactgagatggttgacattaattccgttgattttaatgcttgcatcttcatctaaggcttctttgaaaataaattttgagtatatattaaacaatagaggcaatataatacacccttgcctcactccacgttgtatttccactgcgtccgtcgtgttctggccaactggtatgtttgcacaaggatgccaatacaaatttttgataataccgaggtcttcgtcatcaattcccacttcttgcaagccacctatcagtttgtcgtggatgaagtgtttgcatttaattccctttttgatcactgtttttaaaaatattgttttattatcgataagttgtcattttgacaaccatattatgtcaagtgattaaaaagcagcttaacacattgattgttaacacgaagtgaacattattaacacattcgcggtcatgactgcatatgaagtcatttactccataagaatacgtgtataaaatgacagcgtgtccgcgaacgtgttaagaatgtttgacttggtcatatcactttccaaaatcaaattgtattaagttattctgaaattatattagacagtacatcccgaattgtacggatttcttttagaccaatgttatgaaatacgatccaagcagcatgtttagttgtcactagaatataaagttttaaatatcaataggtaattgacatttcaaaaatatcggtgtaaataatatgtaggtacatatattgaatgtatatagacgttatagatccatacttgttccttcttttttttagctcaagaccagtttttatattttaaaacttccctcaaaatttttgcttgtttccttttccttctctttaacctcttcatccaagcacttgagtcatcgttacctgttcttcattggacagtttggtttagcttattccatattaattccttaagatcacactaaatcttttcgttccagttgatattgggattctatatttcacaatttgaagactaaaattatcagaagtgttaaaaaatggggttaagagtcatctggaatattatgcaatgtttagggtatctgtagagtctcaaagtagtcttttataatttaagattctcctgtattattgtaggtgtctccggaagacttcgtggtattttgaaatgtttgaaaagtggacgtcagtagtatgaaatgttcaggtattactgtaaaaggtttgatatttatccgaaaggagcctgtttgaatattctcctggaaggttttagagatctctgtagggtatcagaacagtctaaaatgttccaggagtaccaaattctttttttccttcatatattctagaaaacgtaaacctgctacttgagacaatcattgtaaattgtaaaatcactgtaaaatgtaagagttaagaatttagaaaatatatcggttgatgtttccttgttatgtgtacttatagaataaatttattttaaacactgttgtagtgagcagatagactgtttgattcaaagtttagtgatattttacctatcagaacctagaaaaacaaagttattgtctcctgtaaattccttgagcccaaaatgttgactatacaggttgtcgccgaaaatagtgcgttcctttaaggtatggatataatacacaatttagaacaaaaaagtcctataacatttttttctaaagttaaccatttccaaaaaaaaatcacattgttcgccatataagcgaacttttattttcataaaattaactaatttggcatcactgtacaagaactgtttgtgatttagtttattgacaccacaaatgtaggtcagacaggtacacctgcaaaataattgtaccaccccatgtttgaaaatccaacaaaacaagaatttgtttgtttgtttaggatgaagacagggtttaatgtgaatacttatggctaaaatgctgcaactatttttgaattgtgattgtctatgtttagatttttgtatacatagttgtcagatttcaatttgcataccaaaatgtattttggttttttagccaaacggttgcatttagaaagaaatgttataagacttttttgctctacatggtgccttctacctatacctttaaggaacgcactattttcggggacaccctgcacattgttttagctgttaaatattatgtacagttgtcgtcactgaatagtttacatcttcatttttacactgtaatacctactgtaaaatcgcaatgtcatacggatatgctaaatgtcaaagggtttgtcaaaaatttcgcgcgtatttaaaaaattaaataacaagctattaaaaaacaagagctaattcctaaatttcatttattaattttcattttgttacattttataaaatagatttattttgttatggtttttaatttaatcaacttattctgggttcgccactggtaacgttacttcgacgtaaaaagtgtgtttaaacgaggtaaaaattcaaaaaaatcggtaactagataagggtgtaaactattcaatgaccggagatgtacagtcacaatcactgaatagtttacaactttatttttatattgtaatactgtaaaatcgcagtgtcgtacggatttactaactgtcaaattgcttgtcaaaaattttagtgtgtattgaaaaataaaataagaagttattaaaagcgtccaaaatgccgttttaatttaaattttaactcaattttattttaaaaaatttattttattttttaaattttaatcaacctattctgggtccgccactggtaacgtcactttgacgtaaaaggtgcgtttaaacgaggtaaaaattcaaaaaattggccactggatattaaagggtgtaaactattcagtgattgtgactgtacataatctgatgcaacctatataaacctcagagttgtaaacctcggagatgcaaaatataaacctcgaaaacgattgtctcggtttagtcaacagatattctgaataagcacattctttctttttatcttggtgcacaatttcaatataaatttacgaagtacgtcgatttgattggtcaaaatggcaatctcaaattagctggttaagagggaggctactatacaatcaaaggtaacaaacatttaagtaagtgctaaatttgtgtcaaaatagtaactggcatgaggtatttcattggaaattgtattgttaagtacctcaagataaagaaatgatcgagtttggtaaaggagacaaagggtatattaaaattcaaacaatataatattcggtaggtatatgaagaaaatggtaacgttaaaaattatgttcagagatgaagaaataagatatatagataaatagataagaagaaaaagatagataaataagaaaaagggacagatgatttaaaaaagataacagttctaagctggaggaatcccactgaaaatacaaaggactgtaattcaattataaattactaaaatcaattttttgaaaattaaaaacaatggaagatttatattatttaataacttatggaagactttagaaggattgctggaaatcacctacaggacagggtaagaagtgaggaatcagacgcatatgtggggtagacaatataaatacctgggtaaagaacagaaaagaagagtggaatcaacacataagcaggatgtctgaatcaaggatagtaagactcgccagggacaagtcaccattgggcagaagaagtacatgacgcccaaggaaaagattgaatgacaatttaggaacagaatgaaaggcatcattgaagaaaaacaggcagtactgcctatataaaaagaaaagaagaagaagaaaaacaatgtttttacgtatacatagtttttaacacgatttttcatcaagtaacagtcgataatatatgtatagaaaaaaatacatacaaaacctaagatgcaaaaaaattgttaaatcaacatgagcttaccaaaaagtaataaaagaaatgctatacaaatagcttaagaacaatacattggaagacgacgagatatttgttaaaaaatgataagtaaaataaaaacactaaacgtaaatgggaatatcaaatttgggacataaatgtataactattagccagtgattattattattatgttgttggtatatcatgaaaacaacatttttaaaagttgcttgttataacgccatattctaaccagtctagtaatatatcctaatgaaataaccaaaatgaccacaaataattttaaatgttcggaacttaagtacttttcctaaaagtatcattatactaatttctacaacagctgctcaggtattgaccaacaaatactataaaaaatttctaataaaaatctaaatcacacaaaaaagtcaatttaccactattaaaaatcgaaaggtcatattaggcctaacataatttaaaaagttttaatcaagcgtaaccgtccagtgtgttaccctttatcatatatcctattagctgaaaaatattaattattaggttatgtatttgaatttagtaggagttcatcctcactgtcgtgccagcctctcctgaaggttatcacgattccaatgatggcgatgagaactcctatgcctagtaaaccataccctgtgtaggcaccgataggggtgagtaacaagactcctttaacggaatcgactaggtcaccggtaagatcggcttgttgagaaaaccaaaacatgggcataactgtcgatttaacattttcaagaattttaatgtgtttcactttttccattttgaggttgagttgaatctgggctctgacagtaaggggtaatcctgtttctggttctaaagctaagaacatttcgtgttgcgtcttatttggttctaaaccttcgatatctgctaaaaaggcgggatctgcttcataaaagtgagggaatgaaactaaagctggagctccatatttgcaaagtgagacatttctgacacccgagagctggtgagtgactcctttacccttaaaacaacccatttcaggatatttggtaccattatcgaaaactttatcggttccaacaaatttgtgccctttcattccttggtattcatagtcgcctctccaatctaattcgattgaactacacaaatcgtttgaaaaaattttaacagtttttttgtcgtgaggaggataccatagttccccttgagtaccttccacttctccacacgtcccttcataataaggcacacgagattcataattccaatttctaactaggcctagagtatcaattgaattagctccattgtccatgttccacattccatcgtatggagctgagtcgtttctgtctacaaaccacccaaattttttaaagggtatcttcaaaccggttatatttaatttttggactagcttaagcaaaggatcgtcgtaaccctcaaaagtgaattcttctacagtcttggtaacagtcaaattgatcttgtattcttccaagaaaaagtctactcctataagtactatgtagtttttgtccttaactaagctggctatcgatgccacaataggattgaaagtcgtgatttgatcagtaagatctcccacggatctttctggtacaaacttccacgtccttctgttgtaaaaggaaattgtggaattatcattaattgtgacattgtccctaacgtggtgttcgtggtaagtataaggcccacattcatcgaagtgcggcttgatagaggaattcctttggtactcttcggaattggtccaattgaaaaaataaaatgagagatagatcggtattggtgtttccttccacatgccgtaggcatttgtgtcctttgaggataaaccaagttcataattcatgactttcttgacaatcattgcccaaaatattgaaaaaaacaaaccgaagattataaacgcggtagcgacaccaaaagttgtccattttttacaggatggcgaacaccgacagcagcccatattgtagt

SEQ ID NO: 1023 - DNA, 6695 bp, Diabrotica virgifera
  SmartBlast Evalue=1E-118; Info=Croquemort n=1 Tax=Tribolium castaneum RepID=D2A0J8_TRICA
ttttggtggatggaggttaaaattacttctcattttttcttaaaatgcattggttatcaattttgtttgcagaatatctcgcttagttttaatgtaatggacctttaatattgcttattttaaaggtcttttcaagcactacaaaaggtattagtagcattacacacctaaaatcgaccgtttctcgtgttattttaagttgaatacaccaatttgataatgtaccaaaaaaaactgtttcacctaccatatttctttttgtattataactaaaaaaaattcattaaaatccatgcagtaggatataattcggaggtaatatcctattttgctcccattgactggcgtattacagcaatatctgctattaatctaattttaaggtttaaagtaatatttctagtaatgagaattttctttactttatagaaggctgctctggctttttcgatgcgtattcttatttctttgtttttatctcagttactccgatgcttcgaggggcataaggagtgtcgagaaagaagaagatatcccagttatcgttaactttggcacccaaataggtgatattttggactctttctaactttattccatacaacaaccataaatttggtcttgaagtattgttttagcccatattaaacacatgtttcggtcatcctgtttgtaagtcgttaaactctttggaagcaattagtaccgtgtcgtcttcgtaactgagatggttgacattaattccgttgattttaatgcttgcatcttcatctaaggcttctttgaaaataaattttgagtatatattaaacaatagaggcaatataatacacccttgcctcactccacgttgtatttccactgcgtccgtcgtgttctggccaactggtatgtttgcacaaggatgccaatacaaatttttgataataccgaggtcttcgtcatcaattcccacttcttgcaagccacctatcagtttgtcgtggatgaagtgtttgcatttaattccctttttgatcactgtttttaaaaatattgttttattatcgataagttgtcattttgacaaccatattatgtcaagtgattaaaaagcagcttaacacattgattgttaacacgaagtgaacattattaacacattcgcggtcatgactgcatatgaagtcatttactccataagaatacgtgtataaaatgacagcgtgtccgcgaacgtgttaagaatgtttgacttggtcatatcactttccaaaatcaaattgtattaagttattctgaaattatattagacagtacatcccgaattgtacggatttcttttagaccaatgttatgaaatacgatccaagcagcatgtttagttgtcactagaatataaagttttaaatatcaataggtaattgacatttcaaaaatatcggtgtaaataatatgtaggtacatatattgaatgtatatagacgttatagatccatacttgttccttcttttttttagctcaagaccagtttttatattttaaaacttccctcaaaatttttgcttgtttccttttccttctctttaacctcttcatccaagcacttgagtcatcgttacctgttcttcattggacagtttggtttagcttattccatattaattccttaagatcacactaaatcttttcgttccagttgatattgggattctatatttcacaatttgaagactaaaattatcagaagtgttaaaaaatggggttaagagtcatctggaatattatgcaatgtttagggtatctgtagagtctcaaagtagtcttttataatttaagattctcctgtattattgtaggtgtctccggaagacttcgtggtattttgaaatgtttgaaaagtggacgtcagtagtatgaaatgttcaggtattactgtaaaaggtttgatatttatccgaaaggagcctgtttgaatattctcctggaaggttttagagatctctgtagggtatcagaacagtctaaaatgttccaggagtaccaaattctttttttccttcatatattctagaaaacgtaaacctgctacttgagacaatcattgtaaattgtaaaatcactgtaaaatgtaagagttaagaatttagaaaatatatcggttgatgtttccttgttatgtgtacttatagaataaatttattttaaacactgttgtagtgagcagatagactgtttgattcaaagtttagtgatattttacctatcagaacctagaaaaacaaagttattgtctcctgtaaattccttgagcccaaaatgttgactatacaggttgtcgccgaaaatagtgcgttcctttaaggtatggatataatacacaatttagaacaaaaaagtcctataacatttttttctaaagttaaccatttccaaaaaaaaatcacattgttcgccatataagcgaacttttattttcataaaattaactaatttggcatcactgtacaagaactgtttgtgatttagtttattgacaccacaaatgtaggtcagacaggtacacctgcaaaataattgtaccaccccatgtttgaaaatccaacaaaacaagaatttgtttgtttgtttaggatgaagacagggtttaatgtgaatacttatggctaaaatgctgcaactatttttgaattgtgattgtctatgtttagatttttgtatacatagttgtcagatttcaatttgcataccaaaatgtattttggttttttagccaaacggttgcatttagaaagaaatgttataagacttttttgctctacatggtgccttctacctatacctttaaggaacgcactattttcggggacaccctgcacattgttttagctgttaaatattatgtacagttgtcgtcactgaatagtttacatcttcatttttacactgtaatacctactgtaaaatcgcaatgtcatacggatatgctaaatgtcaaagggtttgtcaaaaatttcgcgcgtatttaaaaaattaaataacaagctattaaaaaacaagagctaattcctaaatttcatttattaattttcattttgttacattttataaaatagatttattttgttatggtttttaatttaatcaacttattctgggttcgccactggtaacgttacttcgacgtaaaaagtgtgtttaaacgaggtaaaaattcaaaaaaatcggtaactagataagggtgtaaactattcaatgaccggagatgtacagtcacaatcactgaatagtttacaactttatttttatattgtaatactgtaaaatcgcagtgtcgtacggatttactaactgtcaaattgcttgtcaaaaattttagtgtgtattgaaaaataaaataagaagttattaaaagcgtccaaactgccgttttaatttaaattttaactcaattttatttaaaaaaatttatttatttttttaattttaactggatattaaagggtgtaaactattcagtgattgtgactgtacataatctgatgcaacctatataaacctcagagttgtaaacctcggagatgcaaaatataaacctcgaaaacgattgtctcggtttagtcaacagatattctgaataagcacattctttctttttatcttggtgcacaatttcaatataaatttacgaagtacgtcgatttgattggtcaaaatggcaatctcaaattagctggttaagagggaggctactatacaatcaaaggtaacaaacatttaagtaagtgctaaatttgtgtcaaaatagtaactggcatgaggtatttcattggaaattgtattgttaagtacctcaagataaagaaatgatcgagtttggtaaaggagacaaagggtatattaaaattcaaacaatataatattcggtaggtatatgaagaaaatggtaacgttaaaaattatgttcagagatgaagaaataagatatatagataaatagataagaagaaaaagatagataaataagaaaaagggacagatgatttaaaaaagataacagttctaagctggaggaatcccactgaaaatacaaaggactgtaattcaattataaattactaaaatcaattttttgaaaattaaaaacaatggaagatttatattatttaataacttatggaagactttagaaggattgctggaaatcacctacaggacagggtaagaagtgaggaatcagacgcatatgtggggtagacaatataaatacctgggtaaagaacagaaaagaagagtggaatcaacacataagcaggatgtctgaatcaaggatagtaagactcgccagggacaagtcaccattgggcagaagaagtacatgacgcccaaggaaaagattgaatgacaatttaggaacagaatgaaaggcatcattgaagaaaaacaggcagtactgcctatataaaaagaaaagaagaagaagaaaaacaatgtttttacgtatacatagtttttaacacgatttttcatcaagtaacagtcgataatatatgtatagaaaaaaatacatacaaaacctaagatgcaaaaaaattgttaaatcaacatgagcttaccaaaaagtaataaaagaaatgctatacaaatagcttaagaacaatacattggaagacgacgagatatttgttaaaaaatgataagtaaaataaaaacactaaacgtaaatgggaatatcaaatttgggacataaatgtataactattagccagtgattattattattatgttgttggtatatcatgaaaacaacatttttaaaagttgcttgttataacgccatattctaaccagtctagtaatatatcctaatgaaataaccaaaatgaccacaaataattttaaatgttcggaacttaagtacttttcctaaaagtatcattatactaatttctacaacagctgctcaggtattgaccaacaaatactataaaaaatttctaataaaaatctaaatcacacaaaaaagtcaatttaccactattaaaaatcgaaaggtcatattaggcctaacataatttaaaaagttttaatcaagcgtaaccgtccagtgtgttaccctttatcatatatcctattagctgaaaaatattaattattaggttatgtatttgaatttagtaggagttcatcctcactgtcgtgccagcctctcctgaaggttatcacgattccaatgatggcgatgagaactcctatgcctagtaaaccataccctgtgtaggcaccgataggggtgagtaacaagactcctttaacggaatcgactaggtcaccggtaagatcggcttgttgagaaaaccaaaacatgggcataactgtcgatttaacattttcaagaattttaatgtgtttcactttttccattttgaggttgagttgaatctgggctctgacagtaaggggtaatcctgtttctggttctaaagctaagaacatttcgtgttgcgtcttatttggttctaaaccttcgatatctgctaaaaaggcgggatctgcttcataaaagtgagggaatgaaactaaagctggagctccatatttgcaaagtgagacatttctgacacccgagagctggtgagtgactcctttacccttaaaacaacccatttcaggatatttggtaccattatcgaaaactttatcggttccaacaaatttgtgccctttcattccttggtattcatagtcgcctctccaatctaattcgattgaactacacaaatcgtttgaaaaaattttaacagtttttttgtcgtgaggaggataccatagttccccttgagtaccttccacttctccacacgtcccttcataataaggcacacgagattcataattccaatttctaactaggcctagagtatcaattgaattagctccattgtccatgttccacattccatcgtatggagctgagtcgtttctgtctacaaaccacccaaattttttaaagggtatcttcaaaccggttatatttaatttttggactagcttaagcaaaggatcgtcgtaaccctcaaaagtgaattcttctacagtcttggtaacagtcaaattgatcttgtattcttccaagaaaaagtctactcctataagtactatgtagtttttgtccttaactaagctggctatcgatgccacaataggattgaaagtcgtgatttgatcagtaagatctcccacggatctttctggtacaaacttccacgtccttctgttgtaaaaggaaattgtggaattatcattaattgtgacattgtccctaacgtggtgttcgtggtaagtataaggcccacattcatcgaagtgcggcttgatagaggaattcctttggtactcttcggaattggtccaattgaaaaaataaaatgagagatagatcggtattggtgtttccttccacatgccgtaggcatttgtgtcctttgaggataaaccaagttcataattcatgactttcttgacaatcattgcccaaaatattgaaaaaaacaaaccgaagattataaacgcggtagcgacaccaaaagttgtccattttttacaggatggcgaacaccgacagcagcccatattgtagtactattcacttaattaaacaaaggcaacaacatttacataaaatatcctttgtattatgacctaacacaattaa

SEQ ID NO: 1024 - DNA, 6621 bp, Diabrotica virgifera
  SmartBlast Evalue=1E-118; Info=Croquemort n=1 Tax=Tribolium castaneum RepID=D2A0J8_TRICA
ttttggtggatggaggttaaaattacttctcattttttcttaaaatgcattggttatcaattttgtttgcagaatatctcgcttagttttaatgtaatggacctttaatattgcttattttaaaggtcttttcaagcactacaaaaggtattagtagcattacacacctaaaatcgaccgtttctcgtgttattttaagttgaatacaccaatttgataatgtaccaaaaaaaactgtttcacctaccatatttctttttgtattataactaaaaaaaattcattaaaatccatgcagtaggatataattcggaggtaatatcctattttgctcccattgactggcgtattacagcaatatctgctattaatctaattttaaggtttaaagtaatatttctagtaatgagaattttctttactttatagaaggctgctctggctttttcgatgcgtattcttatttctttgtttttatctcagttactccgatgcttcgaggggcataaggagtgtcgagaaagaagaagatatcccagttatcgttaactttggcacccaaataggtgatattttggactctttctaactttattccatacaacaaccataaatttggtcttgaagtattgttttagcccatattaaacacatgtttcggtcatcctgtttgtaagtcgttaaactctttggaagcaattagtaccgtgtcgtcttcgtaactgagatggttgacattaattccgttgattttaatgcttgcatcttcatctaaggcttctttgaaaataaattttgagtatatattaaacaatagaggcaatataatacacccttgcctcactccacgttgtatttccactgcgtccgtcgtgttctggccaactggtatgtttgcacaaggatgccaatacaaatttttgataataccgaggtcttcgtcatcaattcccacttcttgcaagccacctatcagtttgtcgtggatgaagtgtttgcatttaattccctttttgatcactgtttttaaaaatattgttttattatcgataagttgtcattttgacaaccatattatgtcaagtgattaaaaagcagcttaacacattgattgttaacacgaagtgaacattattaacacattcgcggtcatgactgcatatgaagtcatttactccataagaatacgtgtataaaatgacagcgtgtccgcgaacgtgttaagaatgtttgacttggtcatatcactttccaaaatcaaattgtattaagttattctgaaattatattagacagtacatcccgaattgtacggatttcttttagaccaatgttatgaaatacgatccaagcagcatgtttagttgtcactagaatataaagttttaaatatcaataggtaattgacatttcaaaaatatcggtgtaaataatatgtaggtacatatattgaatgtatatagacgttatagatccatacttgttccttcttttttttagctcaagaccagtttttatattttaaaacttccctcaaaatttttgcttgtttccttttccttctctttaacctcttcatccaagcacttgagtcatcgttacctgttcttcattggacagtttggtttagcttattccatattaattccttaagatcacactaaatcttttcgttccagttgatattgggattctatatttcacaatttgaagactaaaattatcagaagtgttaaaaaatggggttaagagtcatctggaatattatgcaatgtttagggtatctgtagagtctcaaagtagtcttttataatttaagattctcctgtattattgtaggtgtctccggaagacttcgtggtattttgaaatgtttgaaaagtggacgtcagtagtatgaaatgttcaggtattactgtaaaaggtttgatatttatccgaaaggagcctgtttgaatattctcctggaaggttttagagatctctgtagggtatcagaacagtctaaaatgttccaggagtaccaaattctttttttccttcatatattctagaaaacgtaaacctgctacttgagacaatcattgtaaattgtaaaatcactgtaaaatgtaagagttaagaatttagaaaatatatcggttgatgtttccttgttatgtgtacttatagaataaatttattttaaacactgttgtagtgagcagatagactgtttgattcaaagtttagtgatattttacctatcagaacctagaaaaacaaagttattgtctcctgtaaattccttgagcccaaaatgttgactatacaggttgtcgccgaaaatagtgcgttcctttaaggtatggatataatacacaatttagaacaaaaaagtcctataacatttttttctaaagttaaccatttccaaaaaaaaatcacattgttcgccatataagcgaacttttattttcataaaattaactaatttggcatcactgtacaagaactgtttgtgatttagtttattgacaccacaaatgtaggtcagacaggtacacctgcaaaataattgtaccaccccatgtttgaaaatccaacaaaacaagaatttgtttgtttgtttaggatgaagacagggtttaatgtgaatacttatggctaaaatgctgcaactatttttgaattgtgattgtctatgtttagatttttgtatacatagttgtcagatttcaatttgcataccaaaatgtattttggttttttagccaaacggttgcatttagaaagaaatgttataagacttttttgctctacatggtgccttctacctatacctttaaggaacgcactattttcggggacaccctgcacattgttttagctgttaaatattatgtacagttgtcgtcactgaatagtttacatcttcatttttacactgtaatacctactgtaaaatcgcaatgtcatacggatatgctaaatgtcaaagggtttgtcaaaaatttcgcgcgtatttaaaaaattaaataacaagctattaaaaaacaagagctaattcctaaatttcatttattaattttcattttgttacattttataaaatagatttattttgttatggtttttaatttaatcaacttattctgggttcgccactggtaacgttacttcgacgtaaaaagtgtgtttaaacgaggtaaaaattcaaaaaaatcggtaactagataagggtgtaaactattcaatgaccggagatgtacagtcacaatcactgaatagtttacaactttatttttatattgtaatactgtaaaatcgcagtgtcgtacggatttactaactgtcaaattgcttgtcaaaaattttagtgtgtattgaaaaataaaataagaagttattaaaagcgtccaaactgccgttttaatttaaattttaactcaattttatttaaaaaaatttatttatttttttaattttaactggatattaaagggtgtaaactattcagtgattgtgactgtacataatctgatgcaacctatataaacctcagagttgtaaacctcggagatgcaaaatataaacctcgaaaacgattgtctcggtttagtcaacagatattctgaataagcacattctttctttttatcttggtgcacaatttcaatataaatttacgaagtacgtcgatttgattggtcaaaatggcaatctcaaattagctggttaagagggaggctactatacaatcaaaggtaacaaacatttaagtaagtgctaaatttgtgtcaaaatagtaactggcatgaggtatttcattggaaattgtattgttaagtacctcaagataaagaaatgatcgagtttggtaaaggagacaaagggtatattaaaattcaaacaatataatattcggtaggtatatgaagaaaatggtaacgttaaaaattatgttcagagatgaagaaataagatatatagataaatagataagaagaaaaagatagataaataagaaaaagggacagatgatttaaaaaagataacagttctaagctggaggaatcccactgaaaatacaaaggactgtaattcaattataaattactaaaatcaattttttgaaaattaaaaacaatggaagatttatattatttaataacttatggaagactttagaaggattgctggaaatcacctacaggacagggtaagaagtgaggaatcagacgcatatgtggggtagacaatataaatacctgggtaaagaacagaaaagaagagtggaatcaacacataagcaggatgtctgaatcaaggatagtaagactcgccagggacaagtcaccattgggcagaagaagtacatgacgcccaaggaaaagattgaatgacaatttaggaacagaatgaaaggcatcattgaagaaaaacaggcagtactgcctatataaaaagaaaagaagaagaagaaaaacaatgtttttacgtatacatagtttttaacacgatttttcatcaagtaacagtcgataatatatgtatagaaaaaaatacatacaaaacctaagatgcaaaaaaattgttaaatcaacatgagcttaccaaaaagtaataaaagaaatgctatacaaatagcttaagaacaatacattggaagacgacgagatatttgttaaaaaatgataagtaaaataaaaacactaaacgtaaatgggaatatcaaatttgggacataaatgtataactattagccagtgattattattattatgttgttggtatatcatgaaaacaacatttttaaaagttgcttgttataacgccatattctaaccagtctagtaatatatcctaatgaaataaccaaaatgaccacaaataattttaaatgttcggaacttaagtacttttcctaaaagtatcattatactaatttctacaacagctgctcaggtattgaccaacaaatactataaaaaatttctaataaaaatctaaatcacacaaaaaagtcaatttaccactattaaaaatcgaaaggtcatattaggcctaacataatttaaaaagttttaatcaagcgtaaccgtccagtgtgttaccctttatcatatatcctattagctgaaaaatattaattattaggttatgtatttgaatttagtaggagttcatcctcactgtcgtgccagcctctcctgaaggttatcacgattccaatgatggcgatgagaactcctatgcctagtaaaccataccctgtgtaggcaccgataggggtgagtaacaagactcctttaacggaatcgactaggtcaccggtaagatcggcttgttgagaaaaccaaaacatgggcataactgtcgatttaacattttcaagaattttaatgtgtttcactttttccattttgaggttgagttgaatctgggctctgacagtaaggggtaatcctgtttctggttctaaagctaagaacatttcgtgttgcgtcttatttggttctaaaccttcgatatctgctaaaaaggcgggatctgcttcataaaagtgagggaatgaaactaaagctggagctccatatttgcaaagtgagacatttctgacacccgagagctggtgagtgactcctttacccttaaaacaacccatttcaggatatttggtaccattatcgaaaactttatcggttccaacaaatttgtgccctttcattccttggtattcatagtcgcctctccaatctaattcgattgaactacacaaatcgtttgaaaaaattttaacagtttttttgtcgtgaggaggataccatagttccccttgagtaccttccacttctccacacgtcccttcataataaggcacacgagattcataattccaatttctaactaggcctagagtatcaattgaattagctccattgtccatgttccacattccatcgtatggagctgagtcgtttctgtctacaaaccacccaaattttttaaagggtatcttcaaaccggttatatttaatttttggactagcttaagcaaaggatcgtcgtaaccctcaaaagtgaattcttctacagtcttggtaacagtcaaattgatcttgtattcttccaagaaaaagtctactcctataagtactatgtagtttttgtccttaactaagctggctatcgatgccacaataggattgaaagtcgtgatttgatcagtaagatctcccacggatctttctggtacaaacttccacgtccttctgttgtaaaaggaaattgtggaattatcattaattgtgacattgtccctaacgtggtgttcgtggtaagtataaggcccacattcatcgaagtgcggcttgatagaggaattcctttggtactcttcggaattggtccaattgaaaaaataaaatgagagatagatcggtattggtgtttccttccacatgccgtaggcatttgtgtcctttgaggataaaccaagttcataattcatgactttcttgacaatcattgcccaaaatattgaaaaaaacaaaccgaagattataaacgcggtagcgacaccaaaagttgtccattttttacaggatggcgaacaccgacagcagcccatattgtagt

SEQ ID NO: 1025 - DNA, 5296 bp, Diabrotica virgifera
  SmartBlast Evalue=2E-25; Info=Endonuclease-reverse transcriptase n=1 Tax=Bombyx mori RepID=D5LB38_BOMMO
ttttggtggatggaggttaaaattacttctcattttttcttaaaatgcattggttatcaattttgtttgcagaatatctcgcttagttttaatgtaatggacctttaatattgcttattttaaaggtcttttcaagcactacaaaaggtattagtagcattacacacctaaaatcgaccgtttctcgtgttattttaagttgaatacaccaatttgataatgtaccaaaaaaaactgtttcacctaccatatttctttttgtattataactaaaaaaaattcattaaaatccatgcagtaggatataattcggaggtaatatcctattttgctcccattgactggcgtattacagcaatatctgctattaatctaattttaaggtttaaagtaatatttctagtaatgagaattttctttactttatagaaggctgctctggctttttcgatgcgtattcttatttctttgtttttatctcagttactccgatgcttcgaggggcataaggagtgtcgagaaagaagaagatatcccagttatcgttaactttggcacccaaataggtgatattttggactctttctaactttattccatacaacaaccataaatttggtcttgaagtattgttttagcccatattaaacacatgtttcggtcatcctgtttgtaagtcgttaaactctttggaagcaattagtaccgtgtcgtcttcgtaactgagatggttgacattaattccgttgattttaatgcttgcatcttcatctaaggcttctttgaaaataaattttgagtatatattaaacaatagaggcaatataatacacccttgcctcactccacgttgtatttccactgcgtccgtcgtgttctggccaactggtatgtttgcacaaggatgccaatacaaatttttgataataccgaggtcttcgtcatcaattcccacttcttgcaagccacctatcagtttgtcgtggatgaagtgtttgcatttaattccctttttgatcactgtttttaaaaatattgttttattatcgataagttgtcattttgacaaccatattatgtcaagtgattaaaaagcagcttaacacattgattgttaacacgaagtgaacattattaacacattcgcggtcatgactgcatatgaagtcatttactccataagaatacgtgtataaaatgacagcgtgtccgcgaacgtgttaagaatgtttgacttggtcatatcactttccaaaatcaaattgtattaagttattctgaaattatattagacagtacatcccgaattgtacggatttcttttagaccaatgttatgaaatacgatccaagcagcatgtttagttgtcactagaatataaagttttaaatatcaataggtaattgacatttcaaaaatatcggtgtaaataatatgtaggtacatatattgaatgtatatagacgttatagatccatacttgttccttcttttttttagctcaagaccagtttttatattttaaaacttccctcaaaatttttgcttgtttccttttccttctctttaacctcttcatccaagcacttgagtcatcgttacctgttcttcattggacagtttggtttagcttattccatattaattccttaagatcacactaaatcttttcgttccagttgatattgggattctatatttcacaatttgaagactaaaattatcagaagtgttaaaaaatggggttaagagtcatctggaatattatgcaatgtttagggtatctgtagagtctcaaagtagtcttttataatttaagattctcctgtattattgtaggtgtctccggaagacttcgtggtattttgaaatgtttgaaaagtggacgtcagtagtatgaaatgttcaggtattactgtaaaaggtttgatatttatccgaaaggagcctgtttgaatattctcctggaaggttttagagatctctgtagggtatcagaacagtctaaaatgttccaggagtaccaaattctttttttccttcatatattctagaaaacgtaaacctgctacttgagacaatcattgtaaattgtaaaatcactgtaaaatgtaagagttaagaatttagaaaatatatcggttgatgtttccttgttatgtgtacttatagaataaatttattttaaacactgttgtagtgagcagatagactgtttgattcaaagtttagtgatattttacctatcagaacctagaaaaacaaagttattgtctcctgtaaattccttgagcccaaaatgttgactatacaggttgtcgccgaaaatagtgcgttcctttaaggtatggatataatacacaatttagaacaaaaaagtcctataacatttttttctaaagttaaccatttccaaaaaaaaatcacattgttcgccatataagcgaacttttattttcataaaattaactaatttggcatcactgtacaagaactgtttgtgatttagtttattgacaccacaaatgtaggtcagacaggtacacctgcaaaataattgtaccaccccatgtttgaaaatccaacaaaacaagaatttgtttgtttgtttaggatgaagacagggtttaatgtgaatacttatggctaaaatgctgcaactatttttgaattgtgattgtctatgtttagatttttgtatacatagttgtcagatttcaatttgcataccaaaatgtattttggttttttagccaaacggttgcatttagaaagaaatgttataagacttttttgctctacatggtgccttctacctatacctttaaggaacgcactattttcggggacaccctgtatagaaaataacattcttgaatagtgttcacacaatatattcccaattatgaatgtttgttggtcctatccgactatttcccattgtctcactctcattttctccagatcttatttgactgcatctttccacctttttgtagatcgtcctacagaccttcttccatctggtatttcccaaaacacattgtttatgaggcgattatcgttattacgtatgacatgttctgcccatcttagtctattggcctttatatatctgactagattttcctttccaaagagagagactttaacttattgtatctgagcctccattcgtttgtcacgctatctctacaagggccatacatcatttgaaggattttacgttcccacaccagcaatttatttacttatttatttgttagcgtccatgtttcgcttccatacgcgactgctcgtagtattatggtcttataaatctggatttttgcatctcatgagaggtttgacttcattatatgttgcattgcgaagaaagatctgtttcccaccattattcgtgtttcaacttctagttctatttcgttatcattgatattgttgctcctagatatttacattctttgaccactttgaagttatgatcgtttatagtaatattttgccttattcgcctatggtggcgggggtggttaccccctatgatggcgttgattaagtcgaacattattaccagatatatatttatttatcaacactaactataccagtaacgagttggtgggcaaagtctatattctaactacttgatgtcttaataacgaataaagaatgatctgcaatactttgtccgtatctataaataaactcgtaattgtttttattatgattgccgacaccgaatcgaccgtgaaatattaataatatcaaaatagctgaaattctcgaaacgagtgccctacattgtgccatcaatgtcacctagttattctactaaaaacagtaatgcttgtgtaagacctttaaaaattaaatcgatatgaattgttcttaattttttagatgctaatataaatcctgtacacgccgtcgtttttgttttgaaacgaccatgtattttgttctgtcttcttttactgtcagcccaatatttaatgcagctctttcaaagctcgagaaaatatcctaacttctaattttgattgtgtcattggcaaaaacgagtacgatttttcctccccgagcaactatgtctgatttgattgttggataaattcttcgcatgacatattctaaggccaggtaaacaacaatgggtaaacagaatttacacagaaagcatttgatattttcccccctattctaacttgtgcaaaggagttacttacacacatttgagttaccgcagttagtttcttatgtacttatgcccagctcaactactgcattccgtaatgttggacgattaattgaatcataagcctgtttgttaagatctctgatgcacgtcttgattatactcctaatactgttcaagcatttgtctaatagtaaatatttatttatttatttattcttcttttatagttcgaacactattcctttttcctttcttatgtattggtgcaataatactaccacaccattgtttaggcattatttcttgttgccaggccttttctgttaattgatgcattttacttaccgagttcatgaccgccttttttaattgacttggcatcaatattgtccagatcaggggttttatcgtttttaagcgtttctttgacatttctaatttcttctcgacttggtgggggtatttcaaattcgacagtttgatactcatttctgttatttccatcattttcatccttttcttcaaagaaattttggataatcaggagctcttcaaagtattcagaccatcatagttattcccctatttgccctattatattgctagaatgttccaatcaaaatatgttctaattgattatttcttctttcatcgtttgatctccatgttgccttgtggatcttttttctagcaagctgagtgagagtatagtaataaattgaaataacttatacattactgcagctttatttttgcttctgtattttcatacactttcatatgacttctaaccttgcgatacacaggaaaatttgatactttgtgtttcttcgttctagtcaaaaatgcattactttacacttcacaaccaaagacgtattattatgcattatgtaagcgttgagcacaccatttgaagtgtttataaagtgtgtccaccaagaatgttcgataatataaaataactttatcttttactcttagtatattatcacattcctcgaattgaaaacaattatatgttttgcatttttgtaatcattgggaagctatttcgtattgtaaccaatttctctataaataatgtatatattt

SEQ ID NO: 1026 - DNA, 4726 bp, Diabrotica virgifera
  SmartBlast Evalue=1E-118; Info=Croquemort n=1 Tax=Tribolium castaneum RepID=D2A0J8_TRICA
caacgtatgggatggataagtgctgaaggcccggcagttttttctcatacagaaaaaataacactaataaggtacaaaaaatattcttgagaacacaatgttgccatcagtgatccagggaggattacacaataacaacttcatcttccaacagaacaattggctgattcatatcagtagaattgttccagaatagttaaagaaactcatgttaatgttcttccgtggacttcccggagttcagaccttaccaccatcgaaaatgtgtgggtagagtagacagacatttaaatgaaagaatcttaggctcactaacggcctgtaaatgtgtatgatagatgactcctcgccttcaatttcggccgagaaaaaaaaataaacagccgaatttaaacgaagctgtgaaagtatcaacgagactccatgataaagacatctaaaaactgcaaccctaccggaacatatcgacaaggtgaacgatatgattttggaagattcgcatacaaacgatattaaagagttggccacatcttccgacagaaattgaacatgacgaatctttacacaaaatgggtaccacttgcgctcactgaacatcacaaacccattcgcatggcactttctgaatagtatttggcgttttaagaaagacaaaagtggctatttgcgtcaatattttgaaaatacatagactacatgcctaaaatcaaacagcatcttacgtagtgaatatacgtcggttcttcagctctaaagaaggcgaaaatgccagtgccgtaagatctaagtctaaaatctacaacttggcatcattgtaatatcaattatacagggtgtcgtcactgaatagtttacatcttcatttttacactgtaatacctactgtaaaatcgcaatgtcatacggatatgctaaatgtcaaagggtttgtcaaaaatttcgcgcgtatttaaaaaattaaataacaagctattaaaaaacaagagctaattcctaaatttcatttattaattttcattttgttacattttataaaatagatttattttgttatggtttttaatttaatcaacttattctgggttcgccactggtaacgttacttcgacgtaaaaagtgtgtttaaacgaggtaaaaattcaaaaaaatcggtaactagataagggtgtaaactattcaatgaccggagatgtacagtcacaatcactgaatagtttacaactttatttttatattgtaatactgtaaaatcgcagtgtcgtacggatttactaactgtcaaattgcttgtcaaaaattttagtgtgtattgaaaaataaaataagaagttattaaaagcgtccaaaatgccgttttaatttaaattttaactcaattttattttaaaaaatttattttattttttaaattttaatcaacctattctgggtccgccactggtaacgtcactttgacgtaaaaggtgcgtttaaacgaggtaaaaattcaaaaaattggccactggatattaaagggtgtaaactattcagtgattgtgactgtacataatctgatgcaacctatataaacctcagagttgtaaacctcggagatgcaaaatataaacctcgaaaacgattgtctcggtttagtcaacagatattctgaataagcacattctttctttttatcttggtgcacaatttcaatataaatttacgaagtacgtcgatttgattggtcaaaatggcaatctcaaattagctggttaagagggaggctactatacaatcaaaggtaacaaacatttaagtaagtgctaaatttgtgtcaaaatagtaactggcatgaggtatttcattggaaattgtattgttaagtacctcaagataaagaaatgatcgagtttggtaaaggagacaaagggtatattaaaattcaaacaatataatattcggtaggtatatgaagaaaatggtaacgttaaaaattatgttcagagatgaagaaataagatatatagataaatagataagaagaaaaagatagataaataagaaaaagggacagatgatttaaaaaagataacagttctaagctggaggaatcccactgaaaatacaaaggactgtaattcaattataaattactaaaatcaattttttgaaaattaaaaacaatggaagatttatattatttaataacttatggaagactttagaaggattgctggaaatcacctacaggacagggtaagaagtgaggaatcagacgcatatgtggggtagacaatataaatacctgggtaaagaacagaaaagaagagtggaatcaacacataagcaggatgtctgaatcaaggatagtaagactcgccagggacaagtcaccattgggcagaagaagtacatgacgcccaaggaaaagattgaatgacaatttaggaacagaatgaaaggcatcattgaagaaaaacaggcagtactgcctatataaaaagaaaagaagaagaagaaaaacaatgtttttacgtatacatagtttttaacacgatttttcatcaagtaacagtcgataatatatgtatagaaaaaaatacatacaaaacctaagatgcaaaaaaattgttaaatcaacatgagcttaccaaaaagtaataaaagaaatgctatacaaatagcttaagaacaatacattggaagacgacgagatatttgttaaaaaatgataagtaaaataaaaacactaaacgtaaatgggaatatcaaatttgggacataaatgtataactattagccagtgattattattattatgttgttggtatatcatgaaaacaacatttttaaaagttgcttgttataacgccatattctaaccagtctagtaatatatcctaatgaaataaccaaaatgaccacaaataattttaaatgttcggaacttaagtacttttcctaaaagtatcattatactaatttctacaacagctgctcaggtattgaccaacaaatactataaaaaatttctaataaaaatctaaatcacacaaaaaagtcaatttaccactattaaaaatcgaaaggtcatattaggcctaacataatttaaaaagttttaatcaagcgtaaccgtccagtgtgttaccctttatcatatatcctattagctgaaaaatattaattattaggttatgtatttgaatttagtaggagttcatcctcactgtcgtgccagcctctcctgaaggttatcacgattccaatgatggcgatgagaactcctatgcctagtaaaccataccctgtgtaggcaccgataggggtgagtaacaagactcctttaacggaatcgactaggtcaccggtaagatcggcttgttgagaaaaccaaaacatgggcataactgtcgatttaacattttcaagaattttaatgtgtttcactttttccattttgaggttgagttgaatctgggctctgacagtaaggggtaatcctgtttctggttctaaagctaagaacatttcgtgttgcgtcttatttggttctaaaccttcgatatctgctaaaaaggcgggatctgcttcataaaagtgagggaatgaaactaaagctggagctccatatttgcaaagtgagacatttctgacacccgagagctggtgagtgactcctttacccttaaaacaacccatttcaggatatttggtaccattatcgaaaactttatcggttccaacaaatttgtgccctttcattccttggtattcatagtcgcctctccaatctaattcgattgaactacacaaatcgtttgaaaaaattttaacagtttttttgtcgtgaggaggataccatagttccccttgagtaccttccacttctccacacgtcccttcataataaggcacacgagattcataattccaatttctaactaggcctagagtatcaattgaattagctccattgtccatgttccacattccatcgtatggagctgagtcgtttctgtctacaaaccacccaaattttttaaagggtatcttcaaaccggttatatttaatttttggactagcttaagcaaaggatcgtcgtaaccctcaaaagtgaattcttctacagtcttggtaacagtcaaattgatcttgtattcttccaagaaaaagtctactcctataagtactatgtagtttttgtccttaactaagctggctatcgatgccacaataggattgaaagtcgtgatttgatcagtaagatctcccacggatctttctggtacaaacttccacgtccttctgttgtaaaaggaaattgtggaattatcattaattgtgacattgtccctaacgtggtgttcgtggtaagtataaggcccacattcatcgaagtgcggcttgatagaggaattcctttggtactcttcggaattggtccaattgaaaaaataaaatgagagatagatcggtattggtgtttccttccacatgccgtaggcatttgtgtcctttgaggataaaccaagttcataattcatgactttcttgacaatcattgcccaaaatattgaaaaaaacaaaccgaagattataaacgcggtagcgacaccaaaagttgtccattttttacaggatggcgaacaccgacagcagcccatattgtagtactattcacttaattaaacaaaggcaacaacatttacataaaatatcctttgtattatgacctaacacaattaa

SEQ ID NO: 1027 - DNA, 4705 bp, Diabrotica virgifera
  SmartBlast Evalue=1E-118; Info=Croquemort n=1 Tax=Tribolium castaneum RepID=D2A0J8_TRICA
caacgtatgggatggataagtgctgaaggcccggcagttttttctcatacagaaaaaataacactaataaggtacaaaaaatattcttgagaacacaatgttgccatcagtgatccagggaggattacacaataacaacttcatcttccaacagaacaattggctgattcatatcagtagaattgttccagaatagttaaagaaactcatgttaatgttcttccgtggacttcccggagttcagaccttaccaccatcgaaaatgtgtgggtagagtagacagacatttaaatgaaagaatcttaggctcactaacggcctgtaaatgtgtatgatagatgactcctcgccttcaataacagccgaatttaagctaagctgtgaaagtatcaacgagactccatgataaagacatctaaaaactgcaaccctaccggaacatatcgacaaggtgaacgatatgattttggaagattcgcatacaaacgatattaaagagttggccacatcttccgacagaaattgaacatgacgaatctttacacaaaatgggtaccacttgcgctcactgaacatcacaaacccattcgcatggcactttctgaatagtatttggcgttttaagaaagacaaaagtggctatttgcgtcaatattttgaaaatacatagactacatgcctaaaatcaaacagcatcttacgtagtgaatatacgtcggttcttcagctctaaagaaggcgaaaatgccagtgccgtaagatctaagtctaaaatctacaacttggcatcattgtaatatcaattatacagggtgtcgtcactgaatagtttacatcttcatttttacactgtaatacctactgtaaaatcgcaatgtcatacggatatgctaaatgtcaaagggtttgtcaaaaatttcgcgcgtatttaaaaaattaaataacaagctattaaaaaacaagagctaattcctaaatttcatttattaattttcattttgttacattttataaaatagatttattttgttatggtttttaatttaatcaacttattctgggttcgccactggtaacgttacttcgacgtaaaaagtgtgtttaaacgaggtaaaaattcaaaaaaatcggtaactagataagggtgtaaactattcaatgaccggagatgtacagtcacaatcactgaatagtttacaactttatttttatattgtaatactgtaaaatcgcagtgtcgtacggatttactaactgtcaaattgcttgtcaaaaattttagtgtgtattgaaaaataaaataagaagttattaaaagcgtccaaaatgccgttttaatttaaattttaactcaattttattttaaaaaatttattttattttttaaattttaatcaacctattctgggtccgccactggtaacgtcactttgacgtaaaaggtgcgtttaaacgaggtaaaaattcaaaaaattggccactggatattaaagggtgtaaactattcagtgattgtgactgtacataatctgatgcaacctatataaacctcagagttgtaaacctcggagatgcaaaatataaacctcgaaaacgattgtctcggtttagtcaacagatattctgaataagcacattctttctttttatcttggtgcacaatttcaatataaatttacgaagtacgtcgatttgattggtcaaaatggcaatctcaaattagctggttaagagggaggctactatacaatcaaaggtaacaaacatttaagtaagtgctaaatttgtgtcaaaatagtaactggcatgaggtatttcattggaaattgtattgttaagtacctcaagataaagaaatgatcgagtttggtaaaggagacaaagggtatattaaaattcaaacaatataatattcggtaggtatatgaagaaaatggtaacgttaaaaattatgttcagagatgaagaaataagatatatagataaatagataagaagaaaaagatagataaataagaaaaagggacagatgatttaaaaaagataacagttctaagctggaggaatcccactgaaaatacaaaggactgtaattcaattataaattactaaaatcaattttttgaaaattaaaaacaatggaagatttatattatttaataacttatggaagactttagaaggattgctggaaatcacctacaggacagggtaagaagtgaggaatcagacgcatatgtggggtagacaatataaatacctgggtaaagaacagaaaagaagagtggaatcaacacataagcaggatgtctgaatcaaggatagtaagactcgccagggacaagtcaccattgggcagaagaagtacatgacgcccaaggaaaagattgaatgacaatttaggaacagaatgaaaggcatcattgaagaaaaacaggcagtactgcctatataaaaagaaaagaagaagaagaaaaacaatgtttttacgtatacatagtttttaacacgatttttcatcaagtaacagtcgataatatatgtatagaaaaaaatacatacaaaacctaagatgcaaaaaaattgttaaatcaacatgagcttaccaaaaagtaataaaagaaatgctatacaaatagcttaagaacaatacattggaagacgacgagatatttgttaaaaaatgataagtaaaataaaaacactaaacgtaaatgggaatatcaaatttgggacataaatgtataactattagccagtgattattattattatgttgttggtatatcatgaaaacaacatttttaaaagttgcttgttataacgccatattctaaccagtctagtaatatatcctaatgaaataaccaaaatgaccacaaataattttaaatgttcggaacttaagtacttttcctaaaagtatcattatactaatttctacaacagctgctcaggtattgaccaacaaatactataaaaaatttctaataaaaatctaaatcacacaaaaaagtcaatttaccactattaaaaatcgaaaggtcatattaggcctaacataatttaaaaagttttaatcaagcgtaaccgtccagtgtgttaccctttatcatatatcctattagctgaaaaatattaattattaggttatgtatttgaatttagtaggagttcatcctcactgtcgtgccagcctctcctgaaggttatcacgattccaatgatggcgatgagaactcctatgcctagtaaaccataccctgtgtaggcaccgataggggtgagtaacaagactcctttaacggaatcgactaggtcaccggtaagatcggcttgttgagaaaaccaaaacatgggcataactgtcgatttaacattttcaagaattttaatgtgtttcactttttccattttgaggttgagttgaatctgggctctgacagtaaggggtaatcctgtttctggttctaaagctaagaacatttcgtgttgcgtcttatttggttctaaaccttcgatatctgctaaaaaggcgggatctgcttcataaaagtgagggaatgaaactaaagctggagctccatatttgcaaagtgagacatttctgacacccgagagctggtgagtgactcctttacccttaaaacaacccatttcaggatatttggtaccattatcgaaaactttatcggttccaacaaatttgtgccctttcattccttggtattcatagtcgcctctccaatctaattcgattgaactacacaaatcgtttgaaaaaattttaacagtttttttgtcgtgaggaggataccatagttccccttgagtaccttccacttctccacacgtcccttcataataaggcacacgagattcataattccaatttctaactaggcctagagtatcaattgaattagctccattgtccatgttccacattccatcgtatggagctgagtcgtttctgtctacaaaccacccaaattttttaaagggtatcttcaaaccggttatatttaatttttggactagcttaagcaaaggatcgtcgtaaccctcaaaagtgaattcttctacagtcttggtaacagtcaaattgatcttgtattcttccaagaaaaagtctactcctataagtactatgtagtttttgtccttaactaagctggctatcgatgccacaataggattgaaagtcgtgatttgatcagtaagatctcccacggatctttctggtacaaacttccacgtccttctgttgtaaaaggaaattgtggaattatcattaattgtgacattgtccctaacgtggtgttcgtggtaagtataaggcccacattcatcgaagtgcggcttgatagaggaattcctttggtactcttcggaattggtccaattgaaaaaataaaatgagagatagatcggtattggtgtttccttccacatgccgtaggcatttgtgtcctttgaggataaaccaagttcataattcatgactttcttgacaatcattgcccaaaatattgaaaaaaacaaaccgaagattataaacgcggtagcgacaccaaaagttgtccattttttacaggatggcgaacaccgacagcagcccatattgtagtactattcacttaattaaacaaaggcaacaacatttacataaaatatcctttgtattatgacctaacacaattaa

SEQ ID NO: 1028 - DNA, 4652 bp, Diabrotica virgifera
  SmartBlast Evalue=1E-118; Info=Croquemort n=1 Tax=Tribolium castaneum RepID=D2A0J8_TRICA
caacgtatgggatggataagtgctgaaggcccggcagttttttctcatacagaaaaaataacactaataaggtacaaaaaatattcttgagaacacaatgttgccatcagtgatccagggaggattacacaataacaacttcatcttccaacagaacaattggctgattcatatcagtagaattgttccagaatagttaaagaaactcatgttaatgttcttccgtggacttcccggagttcagaccttaccaccatcgaaaatgtgtgggtagagtagacagacatttaaatgaaagaatcttaggctcactaacggcctgtaaatgtgtatgatagatgactcctcgccttcaatttcggccgagaaaaaaaaataaacagccgaatttaaacgaagctgtgaaagtatcaacgagactccatgataaagacatctaaaaactgcaaccctaccggaacatatcgacaaggtgaacgatatgattttggaagattcgcatacaaacgatattaaagagttggccacatcttccgacagaaattgaacatgacgaatctttacacaaaatgggtaccacttgcgctcactgaacatcacaaacccattcgcatggcactttctgaatagtatttggcgttttaagaaagacaaaagtggctatttgcgtcaatattttgaaaatacatagactacatgcctaaaatcaaacagcatcttacgtagtgaatatacgtcggttcttcagctctaaagaaggcgaaaatgccagtgccgtaagatctaagtctaaaatctacaacttggcatcattgtaatatcaattatacagggtgtcgtcactgaatagtttacatcttcatttttacactgtaatacctactgtaaaatcgcaatgtcatacggatatgctaaatgtcaaagggtttgtcaaaaatttcgcgcgtatttaaaaaattaaataacaagctattaaaaaacaagagctaattcctaaatttcatttattaattttcattttgttacattttataaaatagatttattttgttatggtttttaatttaatcaacttattctgggttcgccactggtaacgttacttcgacgtaaaaagtgtgtttaaacgaggtaaaaattcaaaaaaatcggtaactagataagggtgtaaactattcaatgaccggagatgtacagtcacaatcactgaatagtttacaactttatttttatattgtaatactgtaaaatcgcagtgtcgtacggatttactaactgtcaaattgcttgtcaaaaattttagtgtgtattgaaaaataaaataagaagttattaaaagcgtccaaaatgccgttttaatttaaattttaactcaattttattttaaaaaatttattttattttttaaattttaatcaacctattctgggtccgccactggtaacgtcactttgacgtaaaaggtgcgtttaaacgaggtaaaaattcaaaaaattggccactggatattaaagggtgtaaactattcagtgattgtgactgtacataatctgatgcaacctatataaacctcagagttgtaaacctcggagatgcaaaatataaacctcgaaaacgattgtctcggtttagtcaacagatattctgaataagcacattctttctttttatcttggtgcacaatttcaatataaatttacgaagtacgtcgatttgattggtcaaaatggcaatctcaaattagctggttaagagggaggctactatacaatcaaaggtaacaaacatttaagtaagtgctaaatttgtgtcaaaatagtaactggcatgaggtatttcattggaaattgtattgttaagtacctcaagataaagaaatgatcgagtttggtaaaggagacaaagggtatattaaaattcaaacaatataatattcggtaggtatatgaagaaaatggtaacgttaaaaattatgttcagagatgaagaaataagatatatagataaatagataagaagaaaaagatagataaataagaaaaagggacagatgatttaaaaaagataacagttctaagctggaggaatcccactgaaaatacaaaggactgtaattcaattataaattactaaaatcaattttttgaaaattaaaaacaatggaagatttatattatttaataacttatggaagactttagaaggattgctggaaatcacctacaggacagggtaagaagtgaggaatcagacgcatatgtggggtagacaatataaatacctgggtaaagaacagaaaagaagagtggaatcaacacataagcaggatgtctgaatcaaggatagtaagactcgccagggacaagtcaccattgggcagaagaagtacatgacgcccaaggaaaagattgaatgacaatttaggaacagaatgaaaggcatcattgaagaaaaacaggcagtactgcctatataaaaagaaaagaagaagaagaaaaacaatgtttttacgtatacatagtttttaacacgatttttcatcaagtaacagtcgataatatatgtatagaaaaaaatacatacaaaacctaagatgcaaaaaaattgttaaatcaacatgagcttaccaaaaagtaataaaagaaatgctatacaaatagcttaagaacaatacattggaagacgacgagatatttgttaaaaaatgataagtaaaataaaaacactaaacgtaaatgggaatatcaaatttgggacataaatgtataactattagccagtgattattattattatgttgttggtatatcatgaaaacaacatttttaaaagttgcttgttataacgccatattctaaccagtctagtaatatatcctaatgaaataaccaaaatgaccacaaataattttaaatgttcggaacttaagtacttttcctaaaagtatcattatactaatttctacaacagctgctcaggtattgaccaacaaatactataaaaaatttctaataaaaatctaaatcacacaaaaaagtcaatttaccactattaaaaatcgaaaggtcatattaggcctaacataatttaaaaagttttaatcaagcgtaaccgtccagtgtgttaccctttatcatatatcctattagctgaaaaatattaattattaggttatgtatttgaatttagtaggagttcatcctcactgtcgtgccagcctctcctgaaggttatcacgattccaatgatggcgatgagaactcctatgcctagtaaaccataccctgtgtaggcaccgataggggtgagtaacaagactcctttaacggaatcgactaggtcaccggtaagatcggcttgttgagaaaaccaaaacatgggcataactgtcgatttaacattttcaagaattttaatgtgtttcactttttccattttgaggttgagttgaatctgggctctgacagtaaggggtaatcctgtttctggttctaaagctaagaacatttcgtgttgcgtcttatttggttctaaaccttcgatatctgctaaaaaggcgggatctgcttcataaaagtgagggaatgaaactaaagctggagctccatatttgcaaagtgagacatttctgacacccgagagctggtgagtgactcctttacccttaaaacaacccatttcaggatatttggtaccattatcgaaaactttatcggttccaacaaatttgtgccctttcattccttggtattcatagtcgcctctccaatctaattcgattgaactacacaaatcgtttgaaaaaattttaacagtttttttgtcgtgaggaggataccatagttccccttgagtaccttccacttctccacacgtcccttcataataaggcacacgagattcataattccaatttctaactaggcctagagtatcaattgaattagctccattgtccatgttccacattccatcgtatggagctgagtcgtttctgtctacaaaccacccaaattttttaaagggtatcttcaaaccggttatatttaatttttggactagcttaagcaaaggatcgtcgtaaccctcaaaagtgaattcttctacagtcttggtaacagtcaaattgatcttgtattcttccaagaaaaagtctactcctataagtactatgtagtttttgtccttaactaagctggctatcgatgccacaataggattgaaagtcgtgatttgatcagtaagatctcccacggatctttctggtacaaacttccacgtccttctgttgtaaaaggaaattgtggaattatcattaattgtgacattgtccctaacgtggtgttcgtggtaagtataaggcccacattcatcgaagtgcggcttgatagaggaattcctttggtactcttcggaattggtccaattgaaaaaataaaatgagagatagatcggtattggtgtttccttccacatgccgtaggcatttgtgtcctttgaggataaaccaagttcataattcatgactttcttgacaatcattgcccaaaatattgaaaaaaacaaaccgaagattataaacgcggtagcgacaccaaaagttgtccattttttacaggatggcgaacaccgacagcagcccatattgtagt

SEQ ID NO: 1029 - DNA, 4639 bp, Diabrotica virgifera
  SmartBlast Evalue=1E-118; Info=Croquemort n=1 Tax=Tribolium castaneum RepID=D2A0J8_TRICA
caacgtatgggatggataagtgctgaaggcccggcagttttttctcatacagaaaaaataacactaataaggtacaaaaaatattcttgagaacacaatgttgccatcagtgatccagggaggattacacaataacaacttcatcttccaacagaacaattggctgattcatatcagtagaattgttccagaatagttaaagaaactcatgttaatgttcttccgtggacttcccggagttcagaccttaccaccatcgaaaatgtgtgggtagagtagacagacatttaaatgaaagaatcttaggctcactaacggcctgtaaatgtgtatgatagatgactcctcgccttcaatttcggccgagaaaaaaaaataaacagccgaatttaaacgaagctgtgaaagtatcaacgagactccatgataaagacatctaaaaactgcaaccctaccggaacatatcgacaaggtgaacgatatgattttggaagattcgcatacaaacgatattaaagagttggccacatcttccgacagaaattgaacatgacgaatctttacacaaaatgggtaccacttgcgctcactgaacatcacaaacccattcgcatggcactttctgaatagtatttggcgttttaagaaagacaaaagtggctatttgcgtcaatattttgaaaatacatagactacatgcctaaaatcaaacagcatcttacgtagtgaatatacgtcggttcttcagctctaaagaaggcgaaaatgccagtgccgtaagatctaagtctaaaatctacaacttggcatcattgtaatatcaattatacagggtgtcgtcactgaatagtttacatcttcatttttacactgtaatacctactgtaaaatcgcaatgtcatacggatatgctaaatgtcaaagggtttgtcaaaaatttcgcgcgtatttaaaaaattaaataacaagctattaaaaaacaagagctaattcctaaatttcatttattaattttcattttgttacattttataaaatagatttattttgttatggtttttaatttaatcaacttattctgggttcgccactggtaacgttacttcgacgtaaaaagtgtgtttaaacgaggtaaaaattcaaaaaaatcggtaactagataagggtgtaaactattcaatgaccggagatgtacagtcacaatcactgaatagtttacaactttatttttatattgtaatactgtaaaatcgcagtgtcgtacggatttactaactgtcaaattgcttgtcaaaaattttagtgtgtattgaaaaataaaataagaagttattaaaagcgtccaaactgccgttttaatttaaattttaactcaattttatttaaaaaaatttatttatttttttaattttaactggatattaaagggtgtaaactattcagtgattgtgactgtacataatctgatgcaacctatataaacctcagagttgtaaacctcggagatgcaaaatataaacctcgaaaacgattgtctcggtttagtcaacagatattctgaataagcacattctttctttttatcttggtgcacaatttcaatataaatttacgaagtacgtcgatttgattggtcaaaatggcaatctcaaattagctggttaagagggaggctactatacaatcaaaggtaacaaacatttaagtaagtgctaaatttgtgtcaaaatagtaactggcatgaggtatttcattggaaattgtattgttaagtacctcaagataaagaaatgatcgagtttggtaaaggagacaaagggtatattaaaattcaaacaatataatattcggtaggtatatgaagaaaatggtaacgttaaaaattatgttcagagatgaagaaataagatatatagataaatagataagaagaaaaagatagataaataagaaaaagggacagatgatttaaaaaagataacagttctaagctggaggaatcccactgaaaatacaaaggactgtaattcaattataaattactaaaatcaattttttgaaaattaaaaacaatggaagatttatattatttaataacttatggaagactttagaaggattgctggaaatcacctacaggacagggtaagaagtgaggaatcagacgcatatgtggggtagacaatataaatacctgggtaaagaacagaaaagaagagtggaatcaacacataagcaggatgtctgaatcaaggatagtaagactcgccagggacaagtcaccattgggcagaagaagtacatgacgcccaaggaaaagattgaatgacaatttaggaacagaatgaaaggcatcattgaagaaaaacaggcagtactgcctatataaaaagaaaagaagaagaagaaaaacaatgtttttacgtatacatagtttttaacacgatttttcatcaagtaacagtcgataatatatgtatagaaaaaaatacatacaaaacctaagatgcaaaaaaattgttaaatcaacatgagcttaccaaaaagtaataaaagaaatgctatacaaatagcttaagaacaatacattggaagacgacgagatatttgttaaaaaatgataagtaaaataaaaacactaaacgtaaatgggaatatcaaatttgggacataaatgtataactattagccagtgattattattattatgttgttggtatatcatgaaaacaacatttttaaaagttgcttgttataacgccatattctaaccagtctagtaatatatcctaatgaaataaccaaaatgaccacaaataattttaaatgttcggaacttaagtacttttcctaaaagtatcattatactaatttctacaacagctgctcaggtattgaccaacaaatactataaaaaatttctaataaaaatctaaatcacacaaaaaagtcaatttaccactattaaaaatcgaaaggtcatattaggcctaacataatttaaaaagttttaatcaagcgtaaccgtccagtgtgttaccctttatcatatatcctattagctgaaaaatattaattattaggttatgtatttgaatttagtaggagttcatcctcactgtcgtgccagcctctcctgaaggttatcacgattccaatgatggcgatgagaactcctatgcctagtaaaccataccctgtgtaggcaccgataggggtgagtaacaagactcctttaacggaatcgactaggtcaccggtaagatcggcttgttgagaaaaccaaaacatgggcataactgtcgatttaacattttcaagaattttaatgtgtttcactttttccattttgaggttgagttgaatctgggctctgacagtaaggggtaatcctgtttctggttctaaagctaagaacatttcgtgttgcgtcttatttggttctaaaccttcgatatctgctaaaaaggcgggatctgcttcataaaagtgagggaatgaaactaaagctggagctccatatttgcaaagtgagacatttctgacacccgagagctggtgagtgactcctttacccttaaaacaacccatttcaggatatttggtaccattatcgaaaactttatcggttccaacaaatttgtgccctttcattccttggtattcatagtcgcctctccaatctaattcgattgaactacacaaatcgtttgaaaaaattttaacagtttttttgtcgtgaggaggataccatagttccccttgagtaccttccacttctccacacgtcccttcataataaggcacacgagattcataattccaatttctaactaggcctagagtatcaattgaattagctccattgtccatgttccacattccatcgtatggagctgagtcgtttctgtctacaaaccacccaaattttttaaagggtatcttcaaaccggttatatttaatttttggactagcttaagcaaaggatcgtcgtaaccctcaaaagtgaattcttctacagtcttggtaacagtcaaattgatcttgtattcttccaagaaaaagtctactcctataagtactatgtagtttttgtccttaactaagctggctatcgatgccacaataggattgaaagtcgtgatttgatcagtaagatctcccacggatctttctggtacaaacttccacgtccttctgttgtaaaaggaaattgtggaattatcattaattgtgacattgtccctaacgtggtgttcgtggtaagtataaggcccacattcatcgaagtgcggcttgatagaggaattcctttggtactcttcggaattggtccaattgaaaaaataaaatgagagatagatcggtattggtgtttccttccacatgccgtaggcatttgtgtcctttgaggataaaccaagttcataattcatgactttcttgacaatcattgcccaaaatattgaaaaaaacaaaccgaagattataaacgcggtagcgacaccaaaagttgtccattttttacaggatggcgaacaccgacagcagcccatattgtagtactattcacttaattaaacaaaggcaacaacatttacataaaatatcctttgtattatgacctaacacaattaa

SEQ ID NO: 1030 - DNA, 655 bp, Diabrotica virgifera
aattttttatagtaataagtaataatttctaatacagttcacaatgaattttggtattagtatactgttttttacaatatgtgtcaaccaaggatttttggcggcttctcagcgaaaaccttcaaaaccagaaaaattgccttggtcaaacgacagactttctaccaaggagccagaaactagctcatatcgtccatggtccacaacagaatcttatccttggcgaacatcgacacgatcggatagcagtacttataggacctggtccactactcgccgtcccacatactggccaacgggcacaacttggtggccaacagaaagatcgacacgatccgatagcagcacttataggccttggtccactactcgccgtcccacatactggccaacgggcaccacttggtggccaacagatacaacttggcagtcaacaacaaatcgacctttcacaaccactcaatctccaataccaccgccaactcctagacctgcaccaagtattgataactactgttttaaatgcttgtttttagaaattgatttcaggttaagaaaataatattttaagtttttgaaacaatatacataaataattttattgtaacaaaaaattgtgtgttttaataaaattatctaaaattttagagtaaaa

SEQ ID NO: 1031 - DNA, 655 bp, Diabrotica virgifera
aattttttatagtaataagtaataatttctaatacagttcacaatgaattttggtattagtatactgttttttacaatatgtgtcaaccaaggatttttggcggcttctcagcgaaaaccttcaaaaccagaaaaattgccttggtcaaacgacagactttctaccaaggagccagaaactagctcatatcgtccatggtccacaacagaatcttatccttggcgaacatcgacacgatcggatagcagtacttataggacctggtccactactcgccgtcccacatactggccaacgggcacaacttggtggccaacagaaagatcgacacgatccgatagcagcacttataggccttggtccactactcgccgtcccacctactggccaacgggcacaacttggtggccaacagatacaacttggcagtcaacaacaaatcgacctttcacaaccactcaatctccaataccaccgccaactcctagacctgcaccaagtattgataactactgttttaaatgcttgtttttagaaattgatttcaggttaagaaaataatattttaagtttttgaaacaatatacataaataattttattgtaacaaaaaattgtgtgttttaataaaattatctaaaattttagagtaaaa

SEQ ID NO: 1032 - DNA, 3619 bp, Diabrotica virgifera
  SmartBlast Evalue=0; Info="Atypical protein kinase C, isoform F n=1 Tax=Drosophila melanogaster RepID=Q0E971_DROME"
ctatgttgttactacagctgtttcggcggggtgcctttctcaagtgatatattttgcagtgtgtttgccttttttaagtctttgactgaagaggttgaggagtggggagctgtttgtctcgagttggtcgttcagaattatatctgtatttttcaatttattaagcccattattatcagatatatttatgaaccaacttgaaacaacaatttctaaacaccccgtatttaaacagttcttatattggtggagatacgtggatgaatactagtatgctttacaggaactaacagacaacttgaccaatttctatcataattaattcacttcatagtaatattgagtttacaatagaaacagaacagaataattccataaactttctagatgtaacgattaccagactacacaacaaacatgagttctccgtatatcataaacctacccatactgacacaactatacacaattcatcatcccatcctacacaacacaaattagcagcctaccatagcatgatacatagactgacagaaattcccatgtcaaaaaataacttcgagatagaactaatatcattaaacaaatagcagtaaacaatggctataacgaacaaacaattaacaacattttaaaccaaaaactccataagaaagccctgaaattagtctatccaccaccacagaaagaacccagtaccttctgctctatcacatatactggcaagataacaacaaaaatagccagatacataaaaaagaaaggaataacaccagctttcagaactaacaacaacttaagcaaatatattaagaacaataagagccgaaagagaaaacaactacagagtggtgtttacaaactaacttgtggtgactgtccgaaaacttacatcggtcaaactggcagaacctttgacaaacagatagcagaacacaaaagggctttcaacaatagaaaaacagacacttctacatacgcatttcaccttctagatcataatcattcttttaatgaagagtttcaaattctgcatattcaaaataaaggcctcaagctatctttattagaatctatggaaattaataaattaaaaaatacagatataattctgaatgaccaactcgagacaaacagctccccactcctcaacctgttcagttaaagactttaaaaaggcaaacccatagtaaactaaatcacttgagaaaggcactctgccgaaacaactgtagtcacatagttataataaattttgtggaagtatacataacaaacgttttcagtgttttgattgatattgtgtactatttcattagaaaacgacaattttgacagacaaaccgaatttttccatataatacaatataaaatgcggcagagtaggattcgacggcagacatgacactttgtcaatgtggaaggagtacaggtacgggttagcccaatactgaactcggatagataatacattctatatttgagcaccctaataaactaaagaagaaataataaacgattaagtactaaataaatacataaatacttttcgatttgaaatagacactaaagcactagttgagaggaaggcaaaagatattttgaagtaaagatttggcgggctgcggtctcacgtccacctgcaggtagtgtcccccgttgccgatgtccacggcggagtcccccaggtccggaggcggcggtggcgggaacaacggaggaggataacggtgcgccgccgccggtggtggcggtggaggcaggttggagggatgcaatgcacagaggacgttatgtcacacgcaatcttctaacgacatgagtagcgggttcacgtactcgaacccttcgaattctgattgatcgatcttctcgattactcgtggatcatctggtgtaaggtgtacaggttcatcggtaaattctggtgggaaattggctaaatctctttctgagtccaatcgtggtttatagggagggggtacttgcttctgttccaacatatcccagtcaatacttttgaaaaactgatgacccgtaatctcaatgaaagcttcagggctgtgacatcctagcctgtcagccgggtttttgttcaagaatcctttcagaacgttcgcagctttcacgctaagcgatcgaggtatacgaatagttttctcgagaatcacttggaatagatagtcttcagtgttttggtctggattttcagacgctcccgctatatcgaatggcgagcggccggccaacatctcgtacaacaagacacctaaagcccaccaatcaacggaaaatccatagtcttcgccccttaaaatttcgggagctatgtaattgggcgtaccgcagaacgtggatgtagtatcgcctggcctaataccttctttacacataccataatcagtcaacttgatatgaccctcgtgatccaatagtacgttatctagtttcagatccctatagatgattcccttgcagtggaggaagtttaaggcgagggagatttccgcagcatagaatctcgcatgttcttcgggcaacctcctctgcctctgcatatgaaacatcaaatcaccacccctaacgaactcaataacgaagaacaatctcgaaggcgtttgaaagcacgaatgcaatccgaccagaaacggatgattggaagcagtttcgaaaacgtgtttctcggtttgcacccaatcgatatcctcgtcgtcggtaacaagagccttcttaatcaccttcatggcgtatatgcgttttgtctttttcaattctaccatcaggactttggcgtaggagccgcggccgattacgcggatcagttcgaaatcgttcagggaatattggcgttgagagccgggttctaaatcgtcgacaggcttgttggggtcttctacgggaacagattcgccagtgacatctggcggaggttccggaaaatctttttctcgtatctcccacttggactcggttatcggcgtattattcgcttgcgcttccccattgtggtcttctcgaattactggttcttgatgctcactcgtgcaaggtttatttacagccttgtggcatttcttatgaacgagaagtttacactggatacacttgaaaccttgtctgcctaatccccagattctatcgttacaatacgcgcaaaatgctctcctattgaatcttttagcttggaatatgtgtccattaaccctataaagcttcctccaccgacgtgctcctcttctataaatacttctgtcctcgccctggcagggcattcctggctgcgacggcacattggggaaaacaccagtggtgtttccgataagggaagagggttcgtacgtgtatatgggatgatatgcccacaaaacggtagcttctgcgaaatcagcgaaaagtttcctcaaccaagttctatctaccatcttctgtgcatcacatggcacaacaataacaaaaaaagcactaaaaaacactgcacttacaactaattgattcacgattacacttccaacaatacattaagttataagcgacggaaaattaattgttaattagacaccaacaaattaaaaagttttttccgttttaggtgaactgatttatctcgattctgaacgtg

SEQ ID NO: 1033 - DNA, 3567 bp, Diabrotica virgifera
  SmartBlast Evalue=0; Info="Atypical protein kinase C, isoform F n=1 Tax=Drosophila melanogaster RepID=Q0E971_DROME"
cttctctccatcccaggccaattctttcatgatctcttgttacagtttttctccatctattatcgggtcttcgtcttcttcttcttccgtctggttggtattcgagtgcttgtctggctatattatttcggtccttccctagagtatgtcgaatccatctccatttccttcttttaatcgtgactgttattttctcttgttttgttcttcatagatctatgtttgttattttatttggccagtatattttcactatttttctcaacgatttatttataaaggtttgtaatttttttgtagttgtctcttcctgtctccaagattctgcgccatacaataatatactcttaatacagctgttaaatattttgattttggttaattttaatatatcgcgtgtgttccagattttctttaatgagttatatgcatgttgtgcctttactattctttttcctacatctgatctactattttagtagatctcgaagttattttttgacagaacagatataactgaacatcattaaacaaatagcagtaaacaatggctataacgaacaaacaattaacaacattttaaaccaaaaactccataagaaagccctgaaattagtctatccaccaccacagaaagaacccagtaccttctgctctatcacatatactggcaagataacaacaaaaatagccagatacataaaaaagaaaggaataacaccagctttcagaactaacaacaacttaagcaaatatattaagaacaataagagccgaaagagaaaacaactacagagtggtgtttacaaactaacttgtggtgactgtccgaaaacttacatcggtcaaactggcagaacctttgacaaacagatagcagaacacaaaagggctttcaacaatagaaaaacagacacttctacatacgcatttcaccttctagatcataatcattcttttaatgaagagtttcaaattctgcatattcaaaataaaggcctcaagctatctttattagaatctatggaaattaataaattaaaaaatacagatataattctgaatgaccaactcgagacaaacagctccccactcctcaacctgttcagttaaagactttaaaaaggcaaacccatagtaaactaaatcacttgagaaaggcactctgccgaaacaactgtagtcacatagttataataaattttgtggaagtatacataacaaacgttttcagtgttttgattgatattgtgtactatttcattagaaaacgacaattttgacagacaaaccgaatttttccatataatacaatataaaatgcggcagagtaggattcgacggcagacatgacactttgtcaatgtggaaggagtacaggtacgggttagcccaatactgaactcggatagataatacattctatatttgagcaccctaataaactaaagaagaaataataaacgattaagtactaaataaatacataaatacttttcgatttgaaatagacactaaagcactagttgagaggaaggcaaaagatattttgaagtaaagatttggcgggctgcggtctcacgtccacctgcaggtagtgtcccccgttgccgatgtccacggcggagtcccccaggtccggaggcggcggtggcgggaacaacggaggaggataacggtgcgccgccgccggtggtggcggtggaggcaggttggagggatgcaatgcacagaggacgttatgtcacacgcaatcttctaacgacatgagtagcgggttcacgtactcgaacccttcgaattctgattgatcgatcttctcgattactcgtggatcatctggtgtaaggtgtacaggttcatcggtaaattctggtgggaaattggctaaatctctttctgagtccaatcgtggtttatagggagggggtacttgcttctgttccaacatatcccagtcaatacttttgaaaaactgatgacccgtaatctcaatgaaagcttcagggctgtgacatcctagcctgtcagccgggtttttgttcaagaatcctttcagaacgttcgcagctttcacgctaagcgatcgaggtatacgaatagttttctcgagaatcacttggaatagatagtcttcagtgttttggtctggattttcagacgctcccgctatatcgaatggcgagcggccggccaacatctcgtacaacaagacacctaaagcccaccaatcaacggaaaatccatagtcttcgccccttaaaatttcgggagctatgtaattgggcgtaccgcagaacgtggatgtagtatcgcctggcctaataccttctttacacataccataatcagtcaacttgatatgaccctcgtgatccaatagtacgttatctagtttcagatccctatagatgattcccttgcagtggaggaagtttaaggcgagggagatttccgcagcatagaatctcgcatgttcttcgggcaacctcctctgcctctgcatatgaaacatcaaatcaccacccctaacgaactcaataacgaagaacaatctcgaaggcgtttgaaagcacgaatgcaatccgaccagaaacggatgattggaagcagtttcgaaaacgtgtttctcggtttgcacccaatcgatatcctcgtcgtcggtaacaagagccttcttaatcaccttcatggcgtatatgcgttttgtctttttcaattctaccatcaggactttggcgtaggagccgcggccgattacgcggatcagttcgaaatcgttcagggaatattggcgttgagagccgggttctaaatcgtcgacaggcttgttggggtcttctacgggaacagattcgccagtgacatctggcggaggttccggaaaatctttttctcgtatctcccacttggactcggttatcggcgtattattcgcttgcgcttccccattgtggtcttctcgaattactggttcttgatgctcactcgtgcaaggtttatttacagccttgtggcatttcttatgaacgagaagtttacactggatacacttgaaaccttgtctgcctaatccccagattctatcgttacaatacgcgcaaaatgctctcctattgaatcttttagcttggaatatgtgtccattaaccctataaagcttcctccaccgacgtgctcctcttctataaatacttctgtcctcgccctggcagggcattcctggctgcgacggcacattggggaaaacaccagtggtgtttccgataagggaagagggttcgtacgtgtatatgggatgatatgcccacaaaacggtagcttctgcgaaatcagcgaaaagtttcctcaaccaagttctatctaccatcttctgtgcatcacatggcacaacaataacaaaaaaagcactaaaaaacactgcacttacaactaattgattcacgattacacttccaacaatacattaagttataagcgacggaaaattaattgttaattagacaccaacaaattaaaaagttttttccgttttaggtgaactgatttatctcgattctgaacgtg

SEQ ID NO: 1034 - DNA, 3454 bp, Diabrotica virgifera
  SmartBlast Evalue=0; Info="Atypical protein kinase C, isoform F n=1 Tax=Drosophila melanogaster RepID=Q0E971_DROME"
ctatgttgttactacagctgtttcggcggggtgcctttctcaagtgatatattttgcagtgtgtttgccttttttaagtctttgactgaagaggttgaggagtggggagctgtttgtctcgagttggtcgttcagaattatatctgtatttttcaatttattaagcccattattatcagatatatttatgaaccaacttgaaacaacaatttctaaacaccccgtatttaaacagttcttatattggtggagatacgtggatgaatactagtatgctttacaggaactaacagacaacttgaccaatttctatcataattaattcacttcatagtaatattgagtttacaatagaaacagaacagaataattccataaactttctagatgtaacgattaccagactacacaacaaacatgagttctccgtatatcataaacctacccatactgacacaactatacacaattcatcatcccatcctacacaacacaaattagcagcctaccatagcatgatacatagactgacagaaattcccatgtcaaaaaataacttcgagatagaactaatatcattaaacaaatagcagtaaacaatggctataacgaacaaacaattaacaacattttaaaccaaaaactccataagaaagccctgaaattagtctatccaccaccacagaaagaacccagtaccttctgctctatcacatatactggcaagataacaacaaaaatagccagatacataaaaaagaaaggaataacaccagctttcagaactaacaacaacttaagcaaatatattaagaacaataagagccgaaagagaaaacaactacagagtggtgtttacaaactaacttgtggtgactgtccgaaaacttacatcggtcaaactggcagaacctttgacaaacagatagcagaacacaaaagggctttcaacaatagaaaaacagacacttctacatacgcatttcaccttctagatcataatcattcttttaatgaagagtttcaaattctgcatattcaaaataaaggcctcaagctatctttattagaatctatggaaattaataaattaaaaaatacagatataattctgaatgaccaactcgagacaaacagctccccactcctcaacctgttcagttaaagactttaaaaaggcaaacccatagtaaactaaatcacttgagaaaggcactctgccgaaacaactgtagtcacatagttataataaattttgtggaagtatacataacaaacgttttcagtgttttgattgatattgtgtactatttcattagaaaacgacaattttgacagacaaaccgaatttttccatataatacaatataaaatgcggcagagtaggattcgacggcagacatgacactttgtcaatgtggaaggagtacaggtacgggttagcccaatactgaactcggatagataatacattctatatttgagcaccctaataaactaaagaagaaataataaacgattaagtactaaataaatacataaatacttttcgatttgaaatagacactaaagcactagttgagaggaaggcaaaagatattttgaagtaaagatttggcgggctgcggtctcacgtccacctgcaggtagtgtcccccgttgccgatgtccacggcggagtcccccaggtccggaggcggcggtggcgggaacaacggaggaggataacggtgcgccgccgccggtggtggcggtggaggcaggttggagggatgcaatgcacagaggacgttatgtcacacgcaatcttctaacgacatgagtagcgggttcacgtactcgaacccttcgaattctgattgatcgatcttctcgattactcgtggatcatctggtgtaaggtgtacaggttcatcggtaaattctggtgggaaattggctaaatctctttctgagtccaatcgtggtttatagggagggggtacttgcttctgttccaacatatcccagtcaatacttttgaaaaactgatgacccgtaatctcaatgaaagcttcagggctgtgacatcctagcctgtcagccgggtttttgttcaagaatcctttcagaacgttcgcagctttcacgctaagcgatcgaggtatacgaatagttttctcgagaatcacttggaatagatagtcttcagtgttttggtctggattttcagacgctcccgctatatcgaatggcgagcggccggccaacatctcgtacaacaagacacctaaagcccaccaatcaacggaaaatccatagtcttcgccccttaaaatttcgggagctatgtaattgggcgtaccgcagaacgtggatgtagtatcgcctggcctaataccttctttacacataccataatcagtcaacttgatatgaccctcgtgatccaatagtacgttatctagtttcagatccctatagatgattcccttgcagtggaggaagtttaaggcgagggagatttccgcagcatagaatctcgcatgttcttcgggcaacctcctctgcctctgcatatgaaacatcaaatcaccacccctaacgaactcaataacgaagaacaatctcgaaggcgtttgaaagcacgaatgcaatccgaccagaaacggatgattggaagcagtttcgaaaacgtgtttctcggtttgcacccaatcgatatcctcgtcgtcggtaacaagagccttcttaatcaccttcatggcgtatatgcgttttgtctttttcaattctaccatcaggactttggcgtaggagccgcggccgattacgcggatcagttcgaaatcgttcagggaatattggcgttgagagccgggttctaaatcgtcgacaggcttgttggggtcttctacgggaacagattcgccagtgacatctggcggaggttccggaaaatctttttctcgtatctcccacttggactcggttatcggcgtattattcgcttgcgcttccccattgtggtcttctcgaattactggttcttgatgctcactcgtgcaaggtttatttacagccttgtggcatttcttatgaacgagaagtttacactggatacacttgaaaccttgtctgcctaatccccagattctatcgttacaatacgcgcaaaatgctctcctattgaatcttttagcttggaatatgtgtccattaaccctataaagcttcctccaccgacgtgctcctcttctataaatacttctgtcctcgccctggcagggcattcctggctgcgacggcacattggggaaaactgtggacaaaacaatataaattaggccatttttttcactggacagactatctctgataacttttaacattttttagaccaacatgcaccgaatacacgttccttttatttatttgtgttggaaaatgttattgtgttgtgctgcaagttcga

SEQ ID NO: 1035 - DNA, 3402 bp, Diabrotica virgifera
  SmartBlast Evalue=0; Info="Atypical protein kinase C, isoform F n=1 Tax=Drosophila melanogaster RepID=Q0E971_DROME"
cttctctccatcccaggccaattctttcatgatctcttgttacagtttttctccatctattatcgggtcttcgtcttcttcttcttccgtctggttggtattcgagtgcttgtctggctatattatttcggtccttccctagagtatgtcgaatccatctccatttccttcttttaatcgtgactgttattttctcttgttttgttcttcatagatctatgtttgttattttatttggccagtatattttcactatttttctcaacgatttatttataaaggtttgtaatttttttgtagttgtctcttcctgtctccaagattctgcgccatacaataatatactcttaatacagctgttaaatattttgattttggttaattttaatatatcgcgtgtgttccagattttctttaatgagttatatgcatgttgtgcctttactattctttttcctacatctgatctactattttagtagatctcgaagttattttttgacagaacagatataactgaacatcattaaacaaatagcagtaaacaatggctataacgaacaaacaattaacaacattttaaaccaaaaactccataagaaagccctgaaattagtctatccaccaccacagaaagaacccagtaccttctgctctatcacatatactggcaagataacaacaaaaatagccagatacataaaaaagaaaggaataacaccagctttcagaactaacaacaacttaagcaaatatattaagaacaataagagccgaaagagaaaacaactacagagtggtgtttacaaactaacttgtggtgactgtccgaaaacttacatcggtcaaactggcagaacctttgacaaacagatagcagaacacaaaagggctttcaacaatagaaaaacagacacttctacatacgcatttcaccttctagatcataatcattcttttaatgaagagtttcaaattctgcatattcaaaataaaggcctcaagctatctttattagaatctatggaaattaataaattaaaaaatacagatataattctgaatgaccaactcgagacaaacagctccccactcctcaacctgttcagttaaagactttaaaaaggcaaacccatagtaaactaaatcacttgagaaaggcactctgccgaaacaactgtagtcacatagttataataaattttgtggaagtatacataacaaacgttttcagtgttttgattgatattgtgtactatttcattagaaaacgacaattttgacagacaaaccgaatttttccatataatacaatataaaatgcggcagagtaggattcgacggcagacatgacactttgtcaatgtggaaggagtacaggtacgggttagcccaatactgaactcggatagataatacattctatatttgagcaccctaataaactaaagaagaaataataaacgattaagtactaaataaatacataaatacttttcgatttgaaatagacactaaagcactagttgagaggaaggcaaaagatattttgaagtaaagatttggcgggctgcggtctcacgtccacctgcaggtagtgtcccccgttgccgatgtccacggcggagtcccccaggtccggaggcggcggtggcgggaacaacggaggaggataacggtgcgccgccgccggtggtggcggtggaggcaggttggagggatgcaatgcacagaggacgttatgtcacacgcaatcttctaacgacatgagtagcgggttcacgtactcgaacccttcgaattctgattgatcgatcttctcgattactcgtggatcatctggtgtaaggtgtacaggttcatcggtaaattctggtgggaaattggctaaatctctttctgagtccaatcgtggtttatagggagggggtacttgcttctgttccaacatatcccagtcaatacttttgaaaaactgatgacccgtaatctcaatgaaagcttcagggctgtgacatcctagcctgtcagccgggtttttgttcaagaatcctttcagaacgttcgcagctttcacgctaagcgatcgaggtatacgaatagttttctcgagaatcacttggaatagatagtcttcagtgttttggtctggattttcagacgctcccgctatatcgaatggcgagcggccggccaacatctcgtacaacaagacacctaaagcccaccaatcaacggaaaatccatagtcttcgccccttaaaatttcgggagctatgtaattgggcgtaccgcagaacgtggatgtagtatcgcctggcctaataccttctttacacataccataatcagtcaacttgatatgaccctcgtgatccaatagtacgttatctagtttcagatccctatagatgattcccttgcagtggaggaagtttaaggcgagggagatttccgcagcatagaatctcgcatgttcttcgggcaacctcctctgcctctgcatatgaaacatcaaatcaccacccctaacgaactcaataacgaagaacaatctcgaaggcgtttgaaagcacgaatgcaatccgaccagaaacggatgattggaagcagtttcgaaaacgtgtttctcggtttgcacccaatcgatatcctcgtcgtcggtaacaagagccttcttaatcaccttcatggcgtatatgcgttttgtctttttcaattctaccatcaggactttggcgtaggagccgcggccgattacgcggatcagttcgaaatcgttcagggaatattggcgttgagagccgggttctaaatcgtcgacaggcttgttggggtcttctacgggaacagattcgccagtgacatctggcggaggttccggaaaatctttttctcgtatctcccacttggactcggttatcggcgtattattcgcttgcgcttccccattgtggtcttctcgaattactggttcttgatgctcactcgtgcaaggtttatttacagccttgtggcatttcttatgaacgagaagtttacactggatacacttgaaaccttgtctgcctaatccccagattctatcgttacaatacgcgcaaaatgctctcctattgaatcttttagcttggaatatgtgtccattaaccctataaagcttcctccaccgacgtgctcctcttctataaatacttctgtcctcgccctggcagggcattcctggctgcgacggcacattggggaaaactgtggacaaaacaatataaattaggccatttttttcactggacagactatctctgataacttttaacattttttagaccaacatgcaccgaatacacgttccttttatttatttgtgttggaaaatgttattgtgttgtgctgcaagttcga

SEQ ID NO: 1036 - DNA, 2247 bp, Diabrotica virgifera
  SmartBlast Evalue=2E-31; Info=Reverse transcriptase n=1 Tax= Schistosoma japonicum RepID=C7C210_SCHJA
cgtatgttgtataatccgtgtataatattaatatacacggagtatacgacatacgacagaagctcgaaacaaatgactattaatgaaaagccctgtagggatcaatattcataactctgatcatactactcatccatcagccgacaaagctacgtgcgatcgctggcggttcagcagtacgtttgaattttattcactgcacactcgagctgacccgcggagtgcactgagaacacgatagtttctgctacgccgccacgtgcacgcggcttgaaaacaagtcaggagggttggcagtctgtgctgggaaatcattcagtacacgctgaccgcccgatcgattacaacgtagatacagatctgtgtgaccacccaataagatctgtagtttctttttatatagctctgtcatataaactttcaaaaaaactgtcagatattattacagaatacactaaatttttcacctaaattcaccgtaaaaaatatactagaattagttaataaaatacaacattttcaattgcgcaacaactccagactaatttcattcgacgtaaaaaatctttttcctagtgtttctcctatagaaacttttgttctagttaaaaatcttttagaccataatacaaatccgatcattgcatttgaaattttacaccttgaaatttgcataaatcaagactattttgaattcaataatcaaatatacacaaacaacagtgcaggacttattatgggtaatcctctaagcccattgctatcagatatatttatgaaccaacttgaaacaacaatttctaaacatcccgtatttaaacagttcttatattggtggagatacgtggatgatatactagtatgctttacaggaactaacagacaacttgaccaatttctatcataattaattcacttcatagtaatattgagtttacaatagaaacagaacagaataagtccataaactttctagatgtaacgattaccagactacacaacaaacatgagttctccgtatatcataaacctacccatactgacacaactatacacaattcatcatcccatcctacacaacacaaattagcagcctaccatagcatgatacatagactgacagaaattcccatgtcaaaaaataacttcgagatagaactaatatcattaaacaaatagcagtaaacaatggctataacgaacaaacaattaacaacattttaaaccaaaaactccataagaaagccctgaaattagtctatccaccaccacagaaagaacccagtaccttctgctctatcacatatactggcaagataacaacaaaaatagccagatacataaaaaagaaaggaataacaccagctttcagaactaacaacaacttaagcaaatatattaagaacaataagagccgaaagagaaaacaactacagagtggtgtttacaaactaacttgtggtgactgtccgaaaacttacatcggtcaaactggcagaacctttgacaaacggatagcagaacacaaaagggctttcaacaatagaaaaacagacacttctacatacgcacttcaccttctagatcataatcattctttcaatgaagagtttcaaattctgcatatccaaaataaaggccttaagctatctttattagaatctatggaaattaataaattgaaaaatacagatataattctgaatggccaactcgagacaaacagctccccactcctcaacttcttcagttaaagactttaaaaagacaaacccatagtaatctaaatcacttgaggaaggcactctgccgaaacagctgtagtcacatagttgtaataaattttgtggaagtatagaaaacaaacgttttcagtgttttattgttagatttacattatcttctataaatttaaaacaatataatttagatgactatgactcttacgataacaactttgacgcttcttatgtgttgcttcatctaccagtagatcttgttatgataatataatgtattattaggatataaatgattgaatattattcaaatcaaatgagtttatttatctaaattttaacttcttaattatattaagggtttcttaaggacttaagccaaaaatatacagtgtgttccagttctcatcagaaagttcattaaatttgcaggaaacggaagatctgacaacaatgtaaatacaatgtaaatattgggtgttgcatatataaaactcacactgtatag

SEQ ID NO: 1037 - DNA, 2272 bp, Diabrotica virgifera
gtgattttgacattttcacaattttcagtcggtgtttagacgggagagaaaaaaaaattgtttgtaaagtttagtgtctacctgaaaataaataaatatgtctattaaaaacaataacatgtggatgtttggcctagttttgtttactgttacagtagttgccttaagtactgcccaatcaacagacccttacgacaaattagctgatcattggttcaataaatgtaacaacgaaacaaaagggactgtagccttcgacaaactatattcgaatagcgtcgagttcaagaggtacttgaaatacaccttcaagtttatcccaggagagaagaaagtattttgtgataaagaacgtgacatcctaaaaaagaggatgcaggaactaacgtccaacatgagaccttgtttgccccaaaaggaaaagttttttgaacaatttatatatgacagcttcaaggaagtcttgcactttttgtgtcataataacggagaacacattgatgctttcttttcgaccagatccagtgaatgccgaaacaaactgttcaactcagaaaatccaaatttgggaaattgtttctctggaatattcagacctgcatcaggccttaataaaacagttttgtgctctgattatggagtagtcaaaaaatgttttgccgaagccttgacacagaactgcccagccgatggtggcttcaaaaaacttaacgaagacttctttagttacgctagtaaaccctgctcaggctgtgctttctacatcaactcattgttactgactgtttcaatactcgcgtcgtacatctttagtcgtaaataacttgagttttttaattagaaactctgctatccaattttgttgttgatctatggtacgaaaactacataaacataataatttctaatggtctttttaacggagtttagtaattgtgacgtttgataatctgctacaaatattgtaaattgaataatgttcataataaatgtctccgtggcaaatatttgctaccaaatcaattgcaaaatatatcccaaattcaatttcttttagcacattccagtagcctttatttaatataatatctagaacatgtttataagaaccaaaaagtctttgtaacaaattcatttgccgttttttcagattcaccagaatatgtaaaactaaagagtgcaaatagtaattctataattcttctaataatacggagatattgaataatgttaaaacgcttggaatacgctgaaaataaaacgaaaatatggaatctctaataaaaaatatgaagcattgttatgttataaatagtaaacaaaccggcaaatttacaggaacgcaggtatatataaaggcacgtatccactatgttggcgctccgcgttccatgcaactgctctaatcgatagggcatgcgctgctctacatataaaccgccacccttttaacccactctccagtttcttccaatttaacattgcgattgaactgtcttgattaaaatgtaaaattaaacaataatagtagatctatcaataaaacactgaaaacgtttgttttctgtacttccacaaaatttattacaactatgtgactaaagctgtaatcataatcattcttttaatgaacagtttcaaattctgcatattcaaagtaaaaaccttaagctatctttattagaatctatggaaattaataaattgaaaaatacagatataattctgaatggccaactcgagacaaacagctccccactcctcaacttcttcagttaaagactttaaaaagacaaacccatagtaatctaaatcacttgaggaaggcactctgccgaaacagctgtagtcacatagttgtaataaattttgtggaagtatagaaaacaaacgttttcagtgttttattgttagatttacattatcttctataaatttaaaacaatataatttagatgactatgactcttacgataacaactttgacgcttcttatgtgttgcttcatctaccagtagatcttgttatgataatataatgtattattaggatataaatgattgaatattattcaaatcaaatgagtttatttatctaaattttaacttcttaattatattaagggtttcttaaggacttaagccaaaaatatacagtgtgttccagttctcatcagaaagttcattaaatttgcaggaaacggaagatctgacaacaatgtaaatacaatgtaaatattgggtgttgcatatataaaactcacactgtatag

(The sequence listing continues in the following parts.)

1.-46. (canceled)

47. A method of causing mortality or stunting in Diabrotica species larvae comprising providing in the diet of Diabrotica species larvae at least one recombinant RNA comprising at least one silencing element essentially identical or essentially complementary to a target gene of said Diabrotica species larvae, wherein said target gene sequence is selected from the group consisting of SEQ ID NOs:1-15624 or the complement thereof, and wherein ingestion of said recombinant RNA by said Diabrotica species larvae results in mortality or stunting in said Diabrotica species larvae.

48. The method of claim 47, wherein said Diabrotica species is at least one selected from the group consisting of Diabrotica balteata, Diabrotica barberi, Diabrotica beniensis, Diabrotica cristata, Diabrotica curvipustulata, Diabrotica dissimilis, Diabrotica elegantula, Diabrotica emorsitans, Diabrotica graminea, Diabrotica hispanolae, Diabrotica lemniscata, Diabrotica linsleyi, Diabrotica longicornis, Diabrotica milleri, Diabrotica nummularis, Diabrotica occlusa, Diabrotica porracea, Diabrotica scutellata, Diabrotica speciosa, Diabrotica tibialis, Diabrotica trifasciata, Diabrotica undecimpunctata, Diabrotica virgifera, and Diabrotica viridula.

49. The method of claim 47, wherein said Diabrotica species is at least one selected from the group consisting of Diabrotica virgifera virgifera (Western Corn Rootworm, WCR), Diabrotica undecimpunctata howardii (Southern Corn Rootworm, SCR), Diabrotica barberi (Northern Corn Rootworm, NCR), Diabrotica virgifera zeae (Mexican Corn Rootworm, MCR), Diabrotica balteata (Brazilian Corn Rootworm, BZR), or Brazilian Corn Rootworm complex (BCR) consisting of Diabrotica viridula and Diabrotica speciosa.

50. The method of claim 47, wherein said silencing element comprises at least 18 contiguous nucleotides with a sequence of about 95% to about 100% identity with a segment of equivalent length of said target gene.

51.-97. (canceled)

98. A method of providing a plant having improved resistance to a Diabrotica species infestation comprising expressing in said plant at least one polynucleotide comprising at least 18 contiguous nucleotides that are essentially identical or complementary to a segment of equivalent length of a DNA having a sequence selected from the group consisting of SEQ ID NOs:1-15624.

99. (canceled)

100. The method of claim 98, wherein said plant is selected from the group consisting of maize, cucumber, squash, soybeans, and dry beans.

101.-102. (canceled)

103. The method of claim 98, wherein said Diabrotica species is at least one selected from the group consisting of Diabrotica balteata, Diabrotica barberi, Diabrotica beniensis, Diabrotica cristata, Diabrotica curvipustulata, Diabrotica dissimilis, Diabrotica elegantula, Diabrotica emorsitans, Diabrotica graminea, Diabrotica hispanolae, Diabrotica lemniscata, Diabrotica linsleyi, Diabrotica longicornis, Diabrotica milleri, Diabrotica nummularis, Diabrotica occlusa, Diabrotica porracea, Diabrotica scutellata, Diabrotica speciosa, Diabrotica tibialis, Diabrotica trifasciata, Diabrotica undecimpunctata, Diabrotica virgifera, and Diabrotica viridula.

104. The method of claim 98, wherein said Diabrotica species is at least one selected from the group consisting of Diabrotica virgifera virgifera (Western Corn Rootworm, WCR), Diabrotica undecimpunctata howardii (Southern Corn Rootworm, SCR), Diabrotica barberi (Northern Corn Rootworm, NCR), Diabrotica virgifera zeae (Mexican Corn Rootworm, MCR), Diabrotica balteata (Brazilian Corn Rootworm, BZR), or Brazilian Corn Rootworm complex (BCR) consisting of Diabrotica viridula and Diabrotica speciosa.

105. The method of claim 98, wherein said expressing is by means of transgenic expression or transient expression.

106. The method of claim 98, further comprising expression in said plant of at least one pesticidal agent selected from the group consisting of a patatin, a plant lectin, a phytoecdysteroid, a Bacillus thuringiensis insecticidal protein, a Xenorhabdus insecticidal protein, a Photorhabdus insecticidal protein, a Bacillus laterosporous insecticidal protein, and a Bacillus sphearicus insecticidal protein.

107. The method of claim 98, wherein said identity is 100% identity.

108. The plant having improved resistance to a Diabrotica species infestation, provided by the method of claim 98.

109. Seed of the plant of claim 98.

110. A recombinant DNA construct comprising a heterologous promoter operably linked to DNA comprising at least one segment of 18 or more contiguous nucleotides with a sequence of about 95% to about 100% identity with a segment of equivalent length of a DNA having a sequence selected from the group consisting of SEQ ID NOs:1-15624 or the DNA complement thereof.

111. The recombinant DNA construct of claim 110, wherein said heterologous promoter is selected from the group consisting of a promoter functional in a plant, a promoter functional in a prokaryote, a promoter functional in a fungal cell, and a baculovirus promoter.

112. A recombinant vector comprising the recombinant DNA construct of claim 110.

113. The recombinant vector of claim 112, wherein said recombinant vector is a recombinant plant virus vector or a recombinant baculovirus vector.

114. (canceled)

115. A plant chromosome or plastid comprising the recombinant DNA construct of claim 110.

116. A transgenic plant cell having in its genome the recombinant DNA construct of claim 110.

117. A transgenic plant comprising the transgenic plant cell of claim 116.

118.-139. (canceled)
